United States Patent Application Publication US 2011/0296543 A1 - sequence listing, part 7

SEQ ID NO: 29391 - DNA, 1626 bp, Unknown
  Obtained from environmental sample
  misc_feature (1)..(1626): n is a, c, g, or t
atgggcgaagaactaaacagccgcgcccagaaagcggcgggagatctttcaaaaagcattacgtcaatgactgatcaattccttgcccttgcgctccgtaccgaccctgaaggggagagaatgcgcggtgatattcaagtgtcaattaacgcgttaaatatacaacttaatgatatacttacggaggtttcaggaaaaataggctcatatcctgaattttcccttgacagcatcagtaaatcaggagatagaaaatatattttctacaaaccgataatgtaccgccaattggcagataacaatttcttccgaggcttaatcagactggaagtttctttagactcaattatcaatgaaattaaccgaggacagatgacgctcttttttacaataggaattgtcgcgtttatagttttattaacgggtatcagcggggcttttatattctcaggtttgattatcaagccaattataaatctggtaaaacatattgaaataatccgcgacactgaagacaaggcgaaacttgccggtaaggacataaatatttccagtaaggacgaaatcgcgatccttggaaatacaatcaatgacatgactcacggtcttgtaaaagccgcgcttgccgcctctgatctttcaatcggtaaagaaatacagaaaaaatttattccattggaagttgacagtcagggaaacaagcaaagcagcgggcttaagaatacgcaaaatttaaatttcttcggttactacgaaggcgcaaagggcgtgtccggcgactattttgattacagggatctcgacggccgttattatgcaattataaaatgcgacgttgcgggcaagggaataccggcggcgctcattatgattcaggtagcgaccatgttccttaactatttcaagcaatggaaacaaaacgcaaaaggaatgcacatagaagaagtcgtgtatcagataaatgaatttattgaaaccctcgcgttcaagggacgctttgccgcctttacgctttgtcttttcgactccgcgacaggaacggcgcgtttctgcaacgccggcgacaatatcgttcacctttacgacgcttcggaaggcaagctaaaagtgattacattgccgcaatcccccgccaccggcgtactccccaactttatgatcgaatcctcgggcggatacaacgtccaaaccataatggtagatcacggcgacatccttctgctctacactgacggtattgaagaatcaaaacgaaaattccgcgacaataattttagggaaataatctgcaatgaaggcgctctcgacacgccccacgagaatcacctgtgcgggcaggccgacgaggagatgacgcccgagcgcgtagaggcgattatcaacacggtaatggcaaaaaagatttataccttaaaaaaataccacaatcctgaaggcgatacagagctcaaatttgatttttcaacctgtaaaggcaatgctgaagaagtgataatggcgatggtttcggtagaaaaaatgttccgttgttacaaaagcccggacgccggcgaagattcccgcgttctggtggataaaaagagtagacggcttcccctgaaaaaccatctcgtgccgaaattctga

SEQ ID NO: 29392 - protein, 541 aa, Unknown
  Obtained from environmental sample
  DOMAIN (131)...(205): HAMP domain
  misc_feature (1)..(541): Xaa is any amino acid
MGEELNSRAQKAAGDLSKSITSMTDQFLALALRTDPEGERMRGDIQVSINALNIQLNDILTEVSGKIGSYPEFSLDSISKSGDRKYIFYKPIMYRQLADNNFFRGLIRLEVSLDSIINEINRGQMTLFFTIGIVAFIVLLTGISGAFIFSGLIIKPIINLVKHIEIIRDTEDKAKLAGKDINISSKDEIAILGNTINDMTHGLVKAALAASDLSIGKEIQKKFIPLEVDSQGNKQSSGLKNTQNLNFFGYYEGAKGVSGDYFDYRDLDGRYYAIIKCDVAGKGIPAALIMIQVATMFLNYFKQWKQNAKGMHIEEVVYQINEFIETLAFKGRFAAFTLCLFDSATGTARFCNAGDNIVHLYDASEGKLKVITLPQSPATGVLPNFMIESSGGYNVQTIMVDHGDILLLYTDGIEESKRKFRDNNFREIICNEGALDTPHENHLCGQADEEMTPERVEAIINTVMAKKIYTLKKYHNPEGDTELKFDFSTCKGNAEEVIMAMVSVEKMFRCYKSPDAGEDSRVLVDKKSRRLPLKNHLVPKF

SEQ ID NO: 29393 - DNA, 738 bp, Unknown
  Obtained from environmental sample
  misc_feature (1)..(738): n is a, c, g, or t
atgaacataaaagaatccatttcgtttttcttttttggcgactcctgcctagcttgcgggaactccaaaaaaatagacccctggctttgccataactgcaaggaagagctaattgcttgcggacagcaccctatatggcccggcaaagaggatgtcataagccttttccctatgaattccctaaccaggagcctgattttggctatgaaatacaagggaatgcagaaaatagcctcgtatttggtggcgaactcctccgttggccgcaaaggggaagctctccaaattttggagagctggggaaaaaacatgagctttgtccctgtgcctgtgcacagcgcgcgaaagcgagagaggggctacaaccaatgcgagcaggctgcccttgaactttcgctccactgcggaggcaaattacaaacaaacgtcttaaaaaggcgaatctacaagccttcgcaaacatcactgggaagcggtgcccgctctttgaatgttgcgggtgcatttgaggcaaaaaaagcccaaaatttgaaaatctctccgcaaatagttgtcgttgacgatgtttatacaacgggggcaacaacggcatcttgtgcgagggctttgaagagagcgggctttgaaaacataaaaacctgtaccctgctatatgaattgccagcaagcgcaatggcggatatggttgcggataggaaaataggttggagaacggaggaggatctcgtgccgatctga

SEQ ID NO: 29394 - protein, 245 aa, Unknown
  Obtained from environmental sample
  misc_feature (1)..(245): Xaa is any amino acid
MNIKESISFFFFGDSCLACGNSKKIDPWLCHNCKEELIACGQHPIWPGKEDVISLFPMNSLTRSLILAMKYKGMQKIASYLVANSSVGRKGEALQILESWGKNMSFVPVPVHSARKRERGYNQCEQAALELSLHCGGKLQTNVLKRRIYKPSQTSLGSGARSLNVAGAFEAKKAQNLKISPQIVVVDDVYTTGATTASCARALKRAGFENIKTCTLLYELPASAMADMVADRKIGWRTEEDLVPI

SEQ ID NO: 29395 - DNA, 849 bp, Unknown
  Obtained from environmental sample
  misc_feature (1)..(849): n is a, c, g, or t
gtggcaataacagcagaagagggtctaaaagtcttgagccaagaactaaaaaaagcgagcaagccagagcattacagcncacagcaaatagaaaacgcaaatgcgagaattgccctaatacaaaaattgaaacgcaaataccacacagatttgaacggcttaatagatttgcgtgaaaagagaaaacaggaattggaaagtttggaaaattcagattccgatatagccgaattgcaaaaaaattcatccaaactgaggcttgattttgaaaaaactgccgctgaactttcaaaaaagagaatttctggcgcaaaaaaactggatacagaggttgaagatattttgcacaccttagcaatgtcaaccgccatattttctacacgcttcacgcagttggaaaacctgaacgcctccggtgcggagcagggggaattttggcttgccccaaacaagggcgaaggttccaagccattgaagcaagccgcaagcggcggcgaactatcccgcgttttgctctcatttaaatgcgcaatggcagaaagagacaaaatcccccttttggtctttgacgaagtggatagcggaatcagcggcgaaaccgcccacaaggttggagaatgtctgcgagagcttggcaaataccaccaagtgctgacaataacgcacctgcaccaggttgcggcacaggcaagcggtcaattttgcgtaaaaaagatagaaacaaaggaacgcacctatacaaccgtagaacctttgagcgaaaaagagcgaatttccgagattgccagaatgctcggagacgaaaattccccagcagttttggctcatgcaagggaattgatgaaataa

SEQ ID NO: 29396 - protein, 282 aa, Unknown
  Obtained from environmental sample
  DOMAIN (26)...(245): RecF/RecN/SMC N terminal domain
  misc_feature (1)..(282): Xaa is any amino acid
MAITAEEGLKVLSQELKKASKPEHYSXQQIENANARIALIQKLKRKYHTDLNGLIDLREKRKQELESLENSDSDIAELQKNSSKLRLDFEKTAAELSKKRISGAKKLDTEVEDILHTLAMSTAIFSTRFTQLENLNASGAEQGEFWLAPNKGEGSKPLKQAASGGELSRVLLSFKCAMAERDKIPLLVFDEVDSGISGETAHKVGECLRELGKYHQVLTITHLHQVAAQASGQFCVKKIETKERTYTTVEPLSEKERISEIARMLGDENSPAVLAHARELMK

SEQ ID NO: 29397 - DNA, 579 bp, Unknown
  Obtained from environmental sample
  misc_feature (1)..(579): n is a, c, g, or t
atgatcagatcggccgagatggacgaaaaactggcgcaaattcccggcaggattaaggaactgcgggaaatccttgagatcagcgcgatggatatggctaatgatattcatattccgccggaaatctacaatagatatgaaaacggcgaacaggatatccctatcagcgtattgaacaacatagccggcaggctcggcatagacatgaccgtgattattaccggcgaagaccccagaatgaaaagcgccgccgtatgccgcaaaggaaaaggcgttcaaatcgaacgttacccgggctatgaattttccagcctcgcctacaacttcaagggcaggacaatggagccgcttctggtgctgctcgattcctcgcgcccgcccgcggcgcaggtgtcacattcggggcaggaatttaattatgtggttgaaggccggatgaaagtcaccgtgggcaaagcggaatatatccttgccgaaggcgattcgatttactttgacgcgaccctgccccacggtcagagcgcggtagacggatacgcccgatttatcacgatcattcaggaatggccgaggttataa

SEQ ID NO: 29398 - protein, 192 aa, Unknown
  Obtained from environmental sample
  DOMAIN (18)...(72): Helix-turn-helix
  misc_feature (1)..(192): Xaa is any amino acid
MIRSAEMDEKLAQIPGRIKELREILEISAMDMANDIHIPPEIYNRYENGEQDIPISVLNNIAGRLGIDMTVIITGEDPRMKSAAVCRKGKGVQIERYPGYEFSSLAYNFKGRTMEPLLVLLDSSRPPAAQVSHSGQEFNYVVEGRMKVTVGKAEYILAEGDSIYFDATLPHGQSAVDGYARFITIIQEWPRL

SEQ ID NO: 29399 - DNA, 348 bp, Unknown
  Obtained from environmental sample
  misc_feature (1)..(348): n is a, c, g, or t
atggccgaggttataatgagtgaactgttatcacgatactgcccccggattgaatttgacagctacgaagatttttacgctaactatagctgcaaggtgccggatgattttaattttgcccgcgacgtggttgacgaatggggccggctaaatccgcaaaagttggcccttttgtggacggacgattccggggccatgaaatcttttacctttaccgacatcaaacggctgtccgacaaagcggctaacgcgcttatcgcgcttggaataaaaaaaggcgacgtggcaatgctgatactcaaacagcggcctcttgtttgggtgatgatgtgcgcacttgaaaaatag

SEQ ID NO: 29400 - protein, 115 aa, Unknown
  Obtained from environmental sample
  misc_feature (1)..(115): Xaa is any amino acid
MAEVIMSELLSRYCPRIEFDSYEDFYANYSCKVPDDFNFARDVVDEWGRLNPQKLALLWTDDSGAMKSFTFTDIKRLSDKAANALIALGIKKGDVAMLILKQRPLVWVMMCALEK

SEQ ID NO: 29401 - DNA, 576 bp, Unknown
  Obtained from environmental sample
  misc_feature (1)..(576): n is a, c, g, or t
gtgcgccccaaatgcgctaaactggaacacattgccgttctgtacgacaaagaaaagcgtgtaggtacacgcggcgattatattgatctgcaggcagaaatagaaaaggcaagtgaaaattttaattacattgcgacaaaaaccgaagaacccatgctgatatatttttcctccggcaccaccggtatgccaaagatggtgctgcacaaccacagcctccccctggggcatattgtcaccgcaaaatactggcaatgcgtggaagactgcaaggttcatctgacccagaccgattcaggctgggcaaaattcgcctggggaaaaatttacggccagtggctctgcggcgccgccataggcgcgtacgacacggaaaaatttaccccgcagggaatgttggacgcgttacagcggctgaaaccggcgactttctgcgcgccggcgacggttttccgttatctgataaaagaggacctttccggttatgacttcagtttcatccgccacacttcggttgcgggcgaacccctgagcccggaagtgtacaataaactaaaaatcattaacgggccttga

SEQ ID NO: 29402 - protein, 191 aa, Unknown
  Obtained from environmental sample
  misc_feature (1)..(191): Xaa is any amino acid
MRPKCAKLEHIAVLYDKEKRVGTRGDYIDLQAEIEKASENFNYIATKTEEPMLIYFSSGTTGMPKMVLHNHSLPLGHIVTAKYWQCVEDCKVHLTQTDSGWAKFAWGKIYGQWLCGAAIGAYDTEKFTPQGMLDALQRLKPATFCAPATVFRYLIKEDLSGYDFSFIRHTSVAGEPLSPEVYNKLKIINGP

SEQ ID NO: 29403 - DNA, 906 bp, Unknown
  Obtained from environmental sample
  misc_feature (1)..(906): n is a, c, g, or t
gtggatgaatatcaggaccttttgcgggtttccgtcgccagcgccgctaacgatcacagactcggcgctaacgaggcgcctccggctatcgtgtccatgttcctcggcgaggaattgactgaaattatcgaggccattgaatcgggcaaggcttataagaacaaggaaaaacttgatatgcaaattggcgtgtctgttttgccgcatttccccaaggataccacagaccgcaaccgcacatcacccttcgcgtttaccggcaacaagtttgagttccgcatgctcggctcatcattctcaatcgccggacccaacatcgtattaaacacgattgtcgccgaaaccttaagccagttagcggattctcttgaaaaatcgaagaattttaaaagcgacctcgcggcgctgatcaagaaaacaatcagcgagcacaagcggatcgtttttaacggcaataactacgcggaagaatgggtggtcgaagcgcaaaagcgcggattgtccaaccttaaaaccacagtagacgccctgccggaatttatttccaaaaaaagcgtggaattgtttaccaaacaccatgtttttaccgaagtagagcttcactcgcggtatgaaatacttatggaagcttactgtaaaaccatccatattgaggcgcttactatggtagatatggtcaagggcgattttttccccgccagcgtaaactaccaaaatgatttattggagcttcttcagagaaagaaagcgatgggttattatgattcttcgctggaggaaaatttgataagtaatatttcaaaactgtccgccagtctgctcaacaaattaacggcgcttgaaaatgtgattttgggagaccaaagaggaaagggacatcgcgtcccaggcgcgtttctaccgtga

SEQ ID NO: 29404 - protein, 301 aa, Unknown
  Obtained from environmental sample
  misc_feature (1)..(301): Xaa is any amino acid
MDEYQDLLRVSVASAANDHRLGANEAPPAIVSMFLGEELTEIIEAIESGKAYKNKEKLDMQIGVSVLPHFPKDTTDRNRTSPFAFTGNKFEFRMLGSSFSIAGPNIVLNTIVAETLSQLADSLEKSKNFKSDLAALIKKTISEHKRIVFNGNNYAEEWVVEAQKRGLSNLKTTVDALPEFISKKSVELFTKHHVFTEVELHSRYEILMEAYCKTIHIEALTMVDMVKGDFFPASVNYQNDLLELLQRKKAMGYYDSSLEENLISNISKLSASLLNKLTALENVILGDQRGKGHRVPGAFLP

SEQ ID NO: 29405 - DNA, 423 bp, Unknown
  Obtained from environmental sample
  misc_feature (1)..(423): n is a, c, g, or t
atgaccatgggtgtaaatgaccaaaatttggatgaactttttgcggaagccagaaaagcggcggacttcgcttacgcgaagtattccaggttcagagttggcgcggctttgcttgccgatgatggaagtgttttttcaggctgcaatgtggaaaaccgttcctacgggcttaccatttgcgcggagagaacagccgttgtaaaagcggtcagttcaggccgccgttcttttaaagcgctggcaatttccactcccgattcagaaaccccagtaggcccctgcggcgcctgccggcaagttctaagtgaatttatgccgccatcatcgcctgtaattttcggcgggagcggaagcgaaaaagtaattacaactttgggtgaactgtacccctatgattctttgcatgaattgggcggggactaa

SEQ ID NO: 29406 - protein, 140 aa, Unknown
  Obtained from environmental sample
  DOMAIN (7)...(115): Cytidine and deoxycytidylate deaminase zinc-binding region
  misc_feature (1)..(140): Xaa is any amino acid
MTMGVNDQNLDELFAEARKAADFAYAKYSRFRVGAALLADDGSVFSGCNVENRSYGLTICAERTAVVKAVSSGRRSFKALAISTPDSETPVGPCGACRQVLSEFMPPSSPVIFGGSGSEKVITTLGELYPYDSLHELGGD

SEQ ID NO: 29407 - DNA, 828 bp, Unknown
  Obtained from environmental sample
  misc_feature (1)..(828): n is a, c, g, or t
gtggttcagaccctcctcaggaacggagcggacattagtatccgtaatattagcggcaagagccctttgtatatcgcggttgagaatgaacggatcaaccttgttcccgtgttggtttcccagaacgcggacattttcgcggcggacattcacggccttaccccctacgccctcgcgttgacagagaagccctcggtcctgccttctctaatcaccgaagaaacagtctaccacagtgacagtcagggcaatacgatccttcattacactatcaaatattgtggaactaccgaaatcattggctatattctcgacaaaaaagcccctgtaaacgcccggaataaagaaggagataccagtcttcacctggcagttagggagaacgatgaggaggcaggggttcttcttcttaacaggggggctgatatttttgcccctaatgataaaggggaaagtcctctttttctcacttttccgggtccgggaaaagagtcttcggaactgcggagttggatgattacacctcagactcttatggccaaagacggcttgggtaatacggcccttcactatgctgcccagtggcaatttgaccggtggattcctctgctaattcagagaggggccaatacagaagcggcaaatgccacaggggagacgcctctctttgcggcggtaaagtacgatgggccttctacaatccgggttttgacaaattcaggggcccgtctggaaagctcgggacactcttggcaattcggcgcttcacgcggcggtacgctggaacagtctaaggtcagcggaaatcctgattgccctgggccttga

SEQ ID NO: 29408 - protein, 275 aa, Unknown
  Obtained from environmental sample
  DOMAIN (18)...(50): Ankyrin repeat
  misc_feature (1)..(275): Xaa is any amino acid
MVQTLLRNGADISIRNISGKSPLYIAVENERINLVPVLVSQNADIFAADIHGLTPYALALTEKPSVLPSLITEETVYHSDSQGNTILHYTIKYCGTTEIIGYILDKKAPVNARNKEGDTSLHLAVRENDEEAGVLLLNRGADIFAPNDKGESPLFLTFPGPGKESSELRSWMITPQTLMAKDGLGNTALHYAAQWQFDRWIPLLIQRGANTEAANATGETPLFAAVKYDGPSTIRVLTNSGARLESSGHSWQFGASRGGTLEQSKVSGNPDCPGP

SEQ ID NO: 29409 - DNA, 414 bp, Unknown
  Obtained from environmental sample
  misc_feature (1)..(414): n is a, c, g, or t
gtgaacatacctgtggggctttcacccgccgaattaatccagcgggcccaggaagcctcagaccggaaccgctataacctggccctgcaatactacaaggcccttctcgaacggaatagtaccaacatagatctggtttgcgccgcggaatacgagattgcgtttatttattacaaacagaaaaaatacggccaggcgaaagaaggatttaactctctgctggaacgttacaatgcccccgacggcgatatgcttccgccccagttcaggcggctttcaaccatagtccttgatcgtatcaaagaaaaagaaacgccgttaaagagcaggaaggcaaaaaaatcaaccggggtttttaaggtttcgctactgacgaacggagcgagtgtcgtgggcgtgcttgcacgtacatga

SEQ ID NO: 29410 - protein, 137 aa, Unknown
  Obtained from environmental sample
  misc_feature (1)..(137): Xaa is any amino acid
MNIPVGLSPAELIQRAQEASDRNRYNLALQYYKALLERNSTNIDLVCAAEYEIAFIYYKQKKYGQAKEGFNSLLERYNAPDGDMLPPQFRRLSTIVLDRIKEKETPLKSRKAKKSTGVFKVSLLTNGASVVGVLART

SEQ ID NO: 29411 - DNA, 483 bp, Unknown
  Obtained from environmental sample
  misc_feature (1)..(483): n is a, c, g, or t
atgattggcaagatcaccgatattcttaaaaaggaaaaaggcaaggatgttgacattgccgtctgccttgatgttacaggttccatgcaggcctattttgacgcgatacgccagaagttaatccccatgttgaaggatatgaccgccgattttgcctctttcagaataggcatggtcttctacaaagattactatgatgaatttatgaacaaggtttttccctttacccgtgactttgacgcgcttcagaagagtatcagcggcgtgaaggtaagcgggggaggggatattcccgaggcggtttacgaggcgctctacgcgggcgctacaaagctgtcatgggaggcggataaaaggatcatgcttttaataggcgacgccccgccccacccgcgccccagaggcgccatcacaaagcaaatggtagacagggaagccgcaaaccgcggaatcgaactgcacgccatgatcctcccccagtga

SEQ ID NO: 29412 - protein, 160 aa, Unknown
  Obtained from environmental sample
  misc_feature (1)..(160): Xaa is any amino acid
MIGKITDILKKEKGKDVDIAVCLDVTGSMQAYFDAIRQKLIPMLKDMTADFASFRIGMVFYKDYYDEFMNKVFPFTRDFDALQKSISGVKVSGGGDIPEAVYEALYAGATKLSWEADKRIMLLIGDAPPHPRPRGAITKQMVDREAANRGIELHAMILPQ

SEQ ID NO: 29413 - DNA, 726 bp, Unknown
  Obtained from environmental sample
  misc_feature (1)..(726): n is a, c, g, or t
atggagatatctcccgcctattcggcctttcccaaccgcggcatacgggcggagccgtacttcataaataagataatcgacaaaagcggcaggatcttagagaaaacggtagtcaaggagcagcaggtcatatcgccggcgaccgctttcttgatgacctctatgctcggcagcgtggtatgttgcggtacggcggcgtccatacccggtcttggcttccgcagaccggcgggcggcaaaaccggcacgacaaacgagtactccgacgcgtggttcgtgggcttcacaccgcagataaccacaggcgtgtggaccggcatagacgagcggcggtctatgggccacggcgtaacaggttccgccgccgcgataccggtttgggtagacgcgatgaaagaactccacaaaaatctcccaaggcaagatttctcgcgccccgtggggacaaaagcgctgatgatatgctcgcagtccttcggattggccaagagttcgtgccccaagcagaaggtagagtacttcaaatacgaaatgatggtagactcatgcaacgtgcacggcgtggcgagggggctacgcagcggcgacgagatggacatcttcggcccgtcgtcaagacgcggcgggacgggcggcggaggcggcggttcaaacaccggcggcagcggcggtagtagcggcggcggcgggagcccgccggccaaaaaaccgtcgttcatgttttga

SEQ ID NO: 29414 - protein, 241 aa, Unknown
  Obtained from environmental sample
  misc_feature (1)..(241): Xaa is any amino acid
MEISPAYSAFPNRGIRAEPYFINKIIDKSGRILEKTVVKEQQVISPATAFLMTSMLGSVVCCGTAASIPGLGFRRPAGGKTGTTNEYSDAWFVGFTPQITTGVWTGIDERRSMGHGVTGSAAAIPVWVDAMKELHKNLPRQDFSRPVGTKALMICSQSFGLAKSSCPKQKVEYFKYEMMVDSCNVHGVARGLRSGDEMDIFGPSSRRGGTGGGGGGSNTGGSGGSSGGGGSPPAKKPSFMF

SEQ ID NO: 29415 - DNA, 927 bp, Unknown
  Obtained from environmental sample
  misc_feature (1)..(927): n is a, c, g, or t
atggcttgggaatacgaaacccgttcgcagtggaacaacagaatataccaatcgagcagttggcttacggtacaggttactgacataggaattaccacgcgttacgcctacaacaaggttcttgtgtgggcaacaatgctttcaacgggcgctcccgtcgcaaacgccagggtggaacttcttgaagggaataccgtagtcaggcagggcactagcaacgcccaggggctggcgctctttgaattccgcgatggggagtttgtctcccgttttaccgatctggaaccctactacggcttaagcgactggtcaaaaggctttcgcgtccgggtgattcaggacggcggggccatggcaggtggagaccaggcggaatttgttccgaacaacagccacaatatatggcgtttcccggttcaagcttccgtaagccctttcgaggcggaaaaagacagggccctggtttttatgttcactgaccgcgggctttacaggccgggagaaaccgtcactttccggggcatagacaggaatctttccagggggagattcttcccctacgaaggcaattacagcattgaggtttcaaccggcggacgcaacgccccggtgattgcctcgcttggcggaaaaactaccggaagcggcggaagttatggctcctttgccattcccgcaaaccttgatccgggccgttacgttatgcgctacaagcgccttgagggcggcggccaggactactcaattacctttttggttgccaatttcgagcggctccgtgtcgaagcgtccttaaaatttcccgatcttacctattatcagggtgaaaagatatcaggccgccctttccgcctcttacctgtcaggcggtgggctttcaggcgctccatacacctattactggagccgcgaaccagcggggtttaa

SEQ ID NO: 29416 - protein, 308 aa, Unknown
  Obtained from environmental sample
  DOMAIN (23)...(298): Alpha-2-macroglobulin family N-terminal region
  misc_feature (1)..(308): Xaa is any amino acid
MAWEYETRSQWNNRIYQSSSWLTVQVTDIGITTRYAYNKVLVWATMLSTGAPVANARVELLEGNTVVRQGTSNAQGLALFEFRDGEFVSRFTDLEPYYGLSDWSKGFRVRVIQDGGAMAGGDQAEFVPNNSHNIWRFPVQASVSPFEAEKDRALVFMFTDRGLYRPGETVTFRGIDRNLSRGRFFPYEGNYSIEVSTGGRNAPVIASLGGKTTGSGGSYGSFAIPANLDPGRYVMRYKRLEGGGQDYSITFLVANFERLRVEASLKFPDLTYYQGEKISGRPFRLLPVRRWAFRRSIHLLLEPRTSGV

SEQ ID NO: 29417 - DNA, 315 bp, Unknown
  Obtained from environmental sample
  misc_feature (1)..(315): n is a, c, g, or t
atgatgaaaaagctgttttttacattttttcttatttttaccctgtttttgccgctttcggcgcaggttagattgggaaatttttctcaaaagggagtcgcaactcaggaaatgaaggacaatgggcttgtcgccgcacattcttcacttccgctaaatacggttataaaagtaaaaaatgaagctaatggcaaggaagtggacgtaaaaatcaccaacagaataagcaattcgcccggtcgaattatcgatctttcaccggatgcgtttaaagcgctggaattaaaagagacggtattgttacaatttctgtaa

SEQ ID NO: 29418 - protein, 104 aa, Unknown
  Obtained from environmental sample
  SIGNAL (1)...(21)
  DOMAIN (20)...(103): Rare lipoprotein A (RlpA)-like double-psi beta-barrel
  misc_feature (1)..(104): Xaa is any amino acid
MMKKLFFTFFLIFTLFLPLSAQVRLGNFSQKGVATQEMKDNGLVAAHSSLPLNTVIKVKNEANGKEVDVKITNRISNSPGRIIDLSPDAFKALELKETVLLQFL

SEQ ID NO: 29419 - DNA, 1545 bp, Unknown
  Obtained from environmental sample
  misc_feature (1)..(1545): n is a, c, g, or t
ttgaccgagataaaacctacaaaaaacagttttattttattatgcgcgcctgaacaggattatgtaatttccggtacgcgcgccaacatcgttaccggcgcttcaattaaaagcctcccctgggatataaacgccgattcttttacgttagacgatattcaatatctgcgtttcgggcgttacatggataacggctggctgttatcggtgcaaatcccaaaaaccgaaatttttgacgaggtggaagagcagaacaaccgttattccctgctcatagcgtttgcgacagccataatgatcggcctggcgtattacctcatttcaaaatttgtcaatgatccgataaaacggctgacagaggatgtctcgcggcttgcgcttggcaatctggatacgcgcattgaaataaactcaaatgatgaattgggcatgctggcccaggcctttaacaaaatgacttccgacctgaaaaaatccattgaggaaagcgcccgcgagcgcgcggaaaaagaacggattggcgcggagttgggcgtggcggcggcgatacaggccagtatgcttcccaatattttcccgcccttccccgaaagaaccgaatttgacctgtacgcctccatgattccggcaaaggaggttggcggtgatttttatgatttctatttaattgataaagacaatctggcggtggttatcgcggatgtttcaggcaagggcgttcccgccgcgttattcatgatgattacgaaaaccatgatcaagaaccgcctgcaaagcggaaagagtcttatattcgacatggagaatataaaccgcgagctttgcggcaacaacataatggatatgttcgttaccgcgtggatttgcgttctgaaaatttcatccggcgagcttgcgtatgtcaatgcgggccacaacccgcctcttgttatgcggcatgggcatggttttggttttctcgtttcgccgcccgaccttgtgcttgccggcatggacgatacgagctaccacgcccgcatgatgcggctgaggccgacagatgttttgttcctctacacggacggcataacggaggcggaaaacgacaaaggtgaattttacggcaaggaccggctgatgaccttccttaacgcgaacggcggcatgcccccccgtactctgatcgacaagttccgtgatgatataagggcttttgccggcggcgcggaacaatcggatgacatcaccatgatggccctcaggatatgcgggacggcatgtacgggaacttccattaccctgaaagccagtcttgaagacctggaaaaactgatcgcctttataggcaaagagcttgagaccgccgcctgccccggcaaggaaagcgcccagatagagcttgccgccgaggaggtttttgtcaacatcgccaattacgcttatgccaaagaagcctccggacaagtcaccgttgagtacggcatcatccccgctccggacggggcggcaatgagcgtggtcttttgtgacaaaaggccgtcctttcaaccctctggatcacgttga

SEQ ID NO: 29420 - protein, 514 aa, Unknown
  Obtained from environmental sample
  DOMAIN (89)...(158): HAMP domain
  misc_feature (1)..(514): Xaa is any amino acid
MTEIKPTKNSFILLCAPEQDYVISGTRANIVTGASIKSLPWDINADSFTLDDIQYLRFGRYMDNGWLLSVQIPKTEIFDEVEEQNNRYSLLIAFATAIMIGLAYYLISKFVNDPIKRLTEDVSRLALGNLDTRIEINSNDELGMLAQAFNKMTSDLKKSIEESARERAEKERIGAELGVAAAIQASMLPNIFPPFPERTEFDLYASMIPAKEVGGDFYDFYLIDKDNLAVVIADVSGKGVPAALFMMITKTMIKNRLQSGKSLIFDMENINRELCGNNIMDMFVTAWICVLKISSGELAYVNAGHNPPLVMRHGHGFGFLVSPPDLVLAGMDDTSYHARMMRLRPTDVLFLYTDGITEAENDKGEFYGKDRLMTFLNANGGMPPRTLIDKFRDDIRAFAGGAEQSDDITMMALRICGTACTGTSITLKASLEDLEKLIAFIGKELETAACPGKESAQIELAAEEVFVNIANYAYAKEASGQVTVEYGIIPAPDGAAMSVVFCDKRPSFQPSGSR

SEQ ID NO: 29421 - DNA, 1080 bp, Unknown
  Obtained from environmental sample
  misc_feature (1)..(1080): n is a, c, g, or t
gtgttaggcgatactgaggaacagatcaatgtgttcaatgtaaacaacattccaagcgtctacataggcggcggaacgccttccgtgcttggcgcggagcgcataacacgtctgctgtcctcaattaataaactgttaacaaatatgcacatgtcccctgttgaagtcaccgtggaagcaaacccggaatctactgacggggctttcctgcgggcctgcgttgaaggcggcgtcagccggataagccttggcgttcagagcttttatgaagcgtcacgaaaagccgttcacagaacaggcagccgcgctcagatcgaagacgcccttgcccttgtcgcgcggcattaccccaacgctttttccgcggatcttgtcaccggcctccccttccagaccggagccgttataatggaagatatcaaacaattactctctttcccggttacccatgtttccctgtacagccttatccttgagccgcagacgccccttggcaaagccgttaaacaaggcgcaatattcctgccttcgcaagacgaggccgacagcctatggataacgggacgggacttgctggaaagctcaggcttccgccaatacgaggtgtccaatttctgtctgccgaacaagacctgcgcccacaacatacgttactggagaatggaaaactggctgggcgcgggacccgcaggttccggaacgatcatcaacgatgaaacaggcgagggaaagagattcacctatcccgcggacatcgagacttacatcaggatggcaagcccccgcgtcaatcacgctataacggaaaaattaaacaaagaagacctgatcaaggaaacattgctcatgggattcaggtattgcgaaggcccggacaaggcgctttttaaacagcgctttggccgcgagattgaggacttgattccccaaacaatcgccctctggagcaaacgggatttttttcagacagcgttaaagccgtcaaaacagggaatgttgtttgtaaatggattcttgcgcgatgcatttgaagaattggaaatagggactggggactggggactggggactgggtcttga

SEQ ID NO: 29422 - protein, 359 aa, Unknown
  Obtained from environmental sample
  DOMAIN (216)...(333): HemN C-terminal region
  misc_feature (1)..(359): Xaa is any amino acid
MLGDTEEQINVFNVNNIPSVYIGGGTPSVLGAERITRLLSSINKLLTNMHMSPVEVTVEANPESTDGAFLRACVEGGVSRISLGVQSFYEASRKAVHRTGSRAQIEDALALVARHYPNAFSADLVTGLPFQTGAVIMEDIKQLLSFPVTHVSLYSLILEPQTPLGKAVKQGAIFLPSQDEADSLWITGRDLLESSGFRQYEVSNFCLPNKTCAHNIRYWRMENWLGAGPAGSGTIINDETGEGKRFTYPADIETYIRMASPRVNHAITEKLNKEDLIKETLLMGFRYCEGPDKALFKQRFGREIEDLIPQTIALWSKRDFFQTALKPSKQGMLFVNGFLRDAFEELEIGTGDWGLGTGS

SEQ ID NO: 29423 - DNA, 492 bp, Unknown
  Obtained from environmental sample
  misc_feature (1)..(492): n is a, c, g, or t
atggaaccggtgaaaggcggtacgcttgcaaacattccaaaagaagcagaggaaatattcaaagcacataatccaaaaatgtctgttgcttcgtgggctattcgctatgcggcctcgcttaataacgtaataatggtgttaagcggaatgagcaacgatgctcaactcgcagacaacatgaattatatgctggaatttgagccgctttcaaaaaaagaatttgagattataaacagcgtagctcaaataatcaaaaccggcattgcaatcccctgtaccgcttgccgctattgcatagacggctgccccaaaaaaattccaattccagaactattttccatttacaacaaattcaaaaaatccggtactttccaaaatccgccaaaaggtggcaatgtttctgattgcatttcttgcggtaattgcgaggagcattgccctcagcatttaccagtgcgcaagtatttttctatatttccaaggtatgtctga

SEQ ID NO: 29424 - protein, 163 aa, Unknown
  Obtained from environmental sample
  DOMAIN (129)...(152): 4Fe-4S binding domain
  misc_feature (1)..(163): Xaa is any amino acid
MEPVKGGTLANIPKEAEEIFKAHNPKMSVASWAIRYAASLNNVIMVLSGMSNDAQLADNMNYMLEFEPLSKKEFEIINSVAQIIKTGIAIPCTACRYCIDGCPKKIPIPELFSIYNKFKKSGTFQNPPKGGNVSDCISCGNCEEHCPQHLPVRKYFSIFPRYV

SEQ ID NO: 29425 - DNA, 414 bp, Unknown
  Obtained from environmental sample
  misc_feature (1)..(414): n is a, c, g, or t
gtggcaatgtttctgattgcatttcttgcggtaattgcgaggagcattgccctcagcatttaccagtgcgcaagtatttttctatatttccaaggtatgtctgaagataataattatagcggttcaaatataactgttttggaaggtttagaagcggttcgggttcggcctgcgatgtatatcggtagcacggatactagggggcttcatcatcttgtttgggaagttgttgataactctgtggatgaggctctggctggatattgcaataggatagaaatttctataatgcagggcaacggcataaaggttgtggataatgggcgtggaataccaaccgatattcacccaaaagaaaaggtgggaactcttcaaggtgtgatgaccaaactccacgccaggtggcaaatttga

SEQ ID NO: 29426 - protein, 137 aa, Unknown
  Obtained from environmental sample
  SIGNAL (1)...(22)
  DOMAIN (64)...(132): Histidine kinase-, DNA gyrase B-, and HSP90-like ATPase
  misc_feature (1)..(137): Xaa is any amino acid
MAMFLIAFLAVIARSIALSIYQCASIFLYFQGMSEDNNYSGSNITVLEGLEAVRVRPAMYIGSTDTRGLHHLVWEVVDNSVDEALAGYCNRIEISIMQGNGIKVVDNGRGIPTDIHPKEKVGTLQGVMTKLHARWQI

SEQ ID NO: 29427 - DNA, 534 bp, Unknown
  Obtained from environmental sample
  misc_feature (1)..(534): n is a, c, g, or t
atggaaagggttttattttttgaagaaatgaagcagctcagaggagaacttgcgatcatggcggcaagagtggaagaagatttggggaaagcccttgccgtcctccgctcaggcggagatgaactcgcgcaggaaataaaggaaagcggcaagatcgtcgataccctccagcttaaaattgaggatatggctctggttcttatcgccacccaacagcctgtggcaagtgatctgcgcgagcttataactgttttgaaaatcacctcaaaccttgaacgcataggcgattacggaattcatcttgtaaaggcggcgttgcagttgtcaaaatatccgcccttccgttccgttgagcgaattgagcgcatggtcgaaattgccatggaaatgcttaaaaaggcaatcgccgcttactttgagcaggatccggattccgcgagaaaaagcgcggctcttgacgacaagatagataaggaacataaagcccttaccgatgaagtgcttggccttatcaagaaacagccgaatttttaa

SEQ ID NO: 29428 - protein, 177 aa, Unknown
  Obtained from environmental sample
  DOMAIN (17)...(105): PhoU family
  misc_feature (1)..(177): Xaa is any amino acid
MERVLFFEEMKQLRGELAIMAARVEEDLGKALAVLRSGGDELAQEIKESGKIVDTLQLKIEDMALVLIATQQPVASDLRELITVLKITSNLERIGDYGIHLVKAALQLSKYPPFRSVERIERMVEIAMEMLKKAIAAYFEQDPDSARKSAALDDKIDKEHKALTDEVLGLIKKQPNF

SEQ ID NO: 29429 - DNA, 756 bp, Unknown
  Obtained from environmental sample
  misc_feature (1)..(756): n is a, c, g, or t
atgtctgaagaaaagctaaaagtaacgaatctaaacctcttctacggtgagttccaggcccttaaaaacatcttcttcgatttgaataccaacgaggccgcggccctcataggcccgtcgggctgcggaaaatcgacgtttatccgggtgcttaaccggatgaacgatcttattccctcctgccgcattaccggggaagtgatccttgacggcgagaatatttacggccctatggacgtaagcgaactgcggacacgggtgggcatggtgtttcagaaaccgaacccctttaacatgagcgtcttcgacaacgtggcgtatggcaggcgcatgcagggcatgaaggacaaaaagaagctggccgaactggtggaagggtctttaaggaaggcggccctttgggacgaggtaaaggatagactaanaaaatccgcctacagcctttcaggcggccagcagcagcggctgtgcatcgcgcgaagcatctcaatggccccggaaataatactcatggacgagccgaccagcgcccttgacccgattgccaccggaagaatcgaagaacttatcggcgagttaaaacgggatttcagtattatcattgtaacccattccatgaaccaggcggcgcgtatcagcgaccggacagccttcttcctcttgggggaacttatcgagtatgctgaaacaacaaaggtatttacaaaacctgaagataagcgaacagaagattatatttcaggacgcttcggttaa

SEQ ID NO: 29430 - protein, 251 aa, Unknown
  Obtained from environmental sample
  DOMAIN (31)...(222): ABC transporter
  misc_feature (1)..(251): Xaa is any amino acid
MSEEKLKVTNLNLFYGEFQALKNIFFDLNTNEAAALIGPSGCGKSTFIRVLNRMNDLIPSCRITGEVILDGENIYGPMDVSELRTRVGMVFQKPNPFNMSVFDNVAYGRRMQGMKDKKKLAELVEGSLRKAALWDEVKDRLXKSAYSLSGGQQQRLCIARSISMAPEIILMDEPTSALDPIATGRIEELIGELKRDFSIIIVTHSMNQAARISDRTAFFLLGELIEYAETTKVFTKPEDKRTEDYISGRFG

SEQ ID NO: 29431 - DNA, 423 bp, Unknown
  Obtained from environmental sample
  misc_feature (1)..(423): n is a, c, g, or t
atgatccttccggtaatcatcaggacaaccgaggaagcgctcaagaccgtgcctgactcgttccgggaaggttcgctttccttgggggcgaccaagtttcaaaccatagtccacgcggttctgcctccgtccctgccgggtatccttaccgccgcgatcctcgccaccggccgggtggtgggagaatccgctccggtattgttgaccgtaggtatcgcgaaaaaccttcccaagacgatctttgaacccggccgtaccctgaccatacacctctattaccttaccaaggaggccctttccccggatgatttcgcccaggcttttaccgcggcggcggtactgattgttctggtattggttatcaatacaatcgtgaagatcgtaggccgcggctttggatatacaggggagaatgtggattaa

SEQ ID NO: 29432 - protein, 140 aa, Unknown
  Obtained from environmental sample
  misc_feature (1)..(140): Xaa is any amino acid
MILPVIIRTTEEALKTVPDSFREGSLSLGATKFQTIVHAVLPPSLPGILTAAILATGRVVGESAPVLLTVGIAKNLPKTIFEPGRTLTIHLYYLTKEALSPDDFAQAFTAAAVLIVLVLVINTIVKIVGRGFGYTGENVD

SEQ ID NO: 29433 - DNA, 429 bp, Unknown
  Obtained from environmental sample
  misc_feature (1)..(429): n is a, c, g, or t
ttgtctccgtgcaacggtacggtaatggaaattaccgaagaagacggtgaaaaagttgtcagggtgtttctttcgatattcagcgttcatttgcaaagagcgcctgtcagcggcactgtaattgacataacgcacaaagacggaaaatttcttgcggcatgggacccgcgcgctcatatagaaaacgaacagaatatttttaaaatacagaacgaaagcggaatatatacagtacggcaaatagccggattagtagcgcgcaggtgtgtgtcatgggttaaacccggcgacatattgaaaaccggtgataaaatagggatgataaaattcagttctcaggtagacctgtatatgcccaaatcagcggaaataaaaataaaacccggcgataaaacaaaggcaggtattacaataatagcgtcaaaatga

SEQ ID NO: 29434 - protein, 142 aa, Unknown
  Obtained from environmental sample
  DOMAIN (1)...(140): Phosphatidylserine decarboxylase
  misc_feature (1)..(142): Xaa is any amino acid
MSPCNGTVMEITEEDGEKVVRVFLSIFSVHLQRAPVSGTVIDITHKDGKFLAAWDPRAHIENEQNIFKIQNESGIYTVRQIAGLVARRCVSWVKPGDILKTGDKIGMIKFSSQVDLYMPKSAEIKIKPGDKTKAGITIIASK

SEQ ID NO: 29435 - DNA, 891 bp, Unknown
  Obtained from environmental sample
  misc_feature (1)..(891): n is a, c, g, or t
atgaaaaaaaacatttttaacagaacaaaactaagaagaacatcgcttaaaaaagcgcgggtaattaaagcgccgattcgtgtatcaattaagaaagaagaattgagaaaaggaatatatatcttaccttcgctgtttacatgcggaaacacaagcttcggcgtactttcaattattgcttcaatcagcggaaattttattggggcggcatggtttttggtagcggcattgggatgtgatattttagacggcagaatcgcgagaatgaccaagacaaccagcatgttcggcatggaacttgattccctaagcgatcttgtttcgttcggaatagctcccgcgatgatgatgtatatgctggtgttacacaccatgggaaaaataggaatcgccatcgccgttctttacgttttgtgctgcgccctccgccttgcccgttttaatgttcttgcccgctcaggcgaggttcacaagcactttgtggggcttcctacccccgcttccgccggcgtaattatttcatttgtgttaagttactcgcttttggttccggaagggttttcccttaactccaaaacaatccccgtattgatggagtttatgccggcgtttttcaaggcaatgcccattgttatcgtcgtgctttcgttcctgatggtttccaatatcccgtacctgtcgtttaagaaaataaaattgtccaaaatacacacaatagaacttctggccgtattaatcgtgcttgtaatattaattgttatttttccgcagaatacaatatttattattttttcaatttacgccgtatcgggactgttaatttatgtgcccagccttattataaaaaagaaaaaattaccggataaacaggcggatgaaaatgaagtgtga

SEQ ID NO: 29436 - protein, 296 aa, Unknown
  Obtained from environmental sample
  DOMAIN (70)...(226): CDP-alcohol phosphatidyltransferase
  misc_feature (1)..(296): Xaa is any amino acid
MKKNIFNRTKLRRTSLKKARVIKAPIRVSIKKEELRKGIYILPSLFTCGNTSFGVLSIIASISGNFIGAAWFLVAALGCDILDGRIARMTKTTSMFGMELDSLSDLVSFGIAPAMMMYMLVLHTMGKIGIAIAVLYVLCCALRLARFNVLARSGEVHKHFVGLPTPASAGVIISFVLSYSLLVPEGFSLNSKTIPVLMEFMPAFFKAMPIVIVVLSFLMVSNIPYLSFKKIKLSKIHTIELLAVLIVLVILIVIFPQNTIFIIFSIYAVSGLLIYVPSLIIKKKKLPDKQADENEV

SEQ ID NO: 29437 - DNA, 783 bp, Unknown
  Obtained from environmental sample
  misc_feature (1)..(783): n is a, c, g, or t
atgtatatccctaacctaagaatggttaccgatgaaggttacgatttaattattgtaaatggttatacatgggacgaatctttaactgtggtttccaatgataaccctgctcaaaaatatcttattgtcgatgtcgattgggtcgaggcgggcaatgtaatgcaggcggtttatgcggaacatgaaggctcttatcttgtcggcgtcgccgcggcgttaaaagcgcttgaggatggcataacttctccgcgttttggttttatcggcggagaaccttcttcaactattaccaagtttgaagttggttatgtgcagggtattctttcaattattcccgacgcggaatttgtggattattatgtaaacagttggaatgaaccgggactcgcgaaaacccagtcgatgaattggtttgattcaggcgtctacgcgatattctccgcagcgggaaacagcggcaacggaactatcgctcaggcgaaggaataccgcgtagcgggaaaaaatgtatgggcaataggagtggattccgatcaatatgaagacggactttacaataaaaaggattccgccgttcttacatcgatgattaaacgcgtagagaacagcgttattttcgcgcttaacgcggttaaaaataatacttttgcccccagcgttatagtttttgatttanaagccgatggcgttggatattccgacaagaattcagctttaagcaaaaatataatcgaaagattggaacttgtaaaaaacaaattgcaagcggaaatattaaagtag

SEQ ID NO: 29438 - protein, 260 aa, Unknown
  Obtained from environmental sample
  DOMAIN (1)...(253): Basic membrane protein
  misc_feature (1)..(260): Xaa is any amino acid
MYIPNLRMVTDEGYDLIIVNGYTWDESLTVVSNDNPAQKYLIVDVDWVEAGNVMQAVYAEHEGSYLVGVAAALKALEDGITSPRFGFIGGEPSSTITKFEVGYVQGILSIIPDAEFVDYYVNSWNEPGLAKTQSMNWFDSGVYAIFSAAGNSGNGTIAQAKEYRVAGKNVWAIGVDSDQYEDGLYNKKDSAVLTSMIKRVENSVIFALNAVKNNTFAPSVIVFDLXADGVGYSDKNSALSKNIIERLELVKNKLQAEILK

SEQ ID NO: 29439 - DNA, 870 bp, Unknown
  Obtained from environmental sample
  misc_feature (1)..(870): n is a, c, g, or t
ttgacgactaaaattaaaagattagaagacaaacttcttgaaattttttcaggctctaatgccgtaatctctgttttagttgtacttcttggtttttttgtcgctacgttactcattctgataatcgggaaaaatccgtctgtcatgtatcaggctatgctgcaggttgtcagcggatttgattcacggcgcggcacttggaatatacgctatgtaggggaatggatagtaatttccatgccgcttattttatgcggtttaagcatggggttttccgtccgcgtgggattattcaacatcggagcggaaggacagtacattgccggattaacggcggctcaattaatcgccgtaggttttacaaatgccgccggggaacggttacctgttcatttttcgtttgctgtgttaggtgcaatgtttttcggggcgttgtggggcggcatatcgggttttttcaaagccagatacaaagtgtcggaagttgtctccacaatcatgatgaactacatcgctttttttatgcacaggtttatatctttaaacatttcgggaagcaacacttttaaaacacccaatttccctgaaagcgcgtctctttctaatcctgttttaatggcaattacaaacagatcaggactgaacaatggtctttggtttacaatagcggctgtagtaatttactggcttatcatggaaaaaagcgcgtttggtttttctcttaaagcgaccggcttttacagagaaagcgctttatacgcgggtatgcgcgtaaaaacaaatatcactgncgcaatggcgatctcaagcgcttttgcgggtcttgccgcgcggttgttcgctggaagttttcagtaccgacgatactaa

SEQ ID NO: 29440 - protein, 289 aa, Unknown
  Obtained from environmental sample
  DOMAIN (71)...(289): Branched-chain amino acid transport system / permease component
  misc_feature (1)..(289): Xaa is any amino acid
MTTKIKRLEDKLLEIFSGSNAVISVLVVLLGFFVATLLILIIGKNPSVMYQAMLQVVSGFDSRRGTWNIRYVGEWIVISMPLILCGLSMGFSVRVGLFNIGAEGQYIAGLTAAQLIAVGFTNAAGERLPVHFSFAVLGAMFFGALWGGISGFFKARYKVSEVVSTIMMNYIAFFMHRFISLNISGSNTFKTPNFPESASLSNPVLMAITNRSGLNNGLWFTIAAVVIYWLIMEKSAFGFSLKATGFYRESALYAGMRVKTNITXAMAISSAFAGLAARLFAGSFQYRRY

SEQ ID NO: 29441 - DNA, 846 bp, Unknown
  Obtained from environmental sample
  misc_feature (1)..(846): n is a, c, g, or t
ttgccattgatcagatcggccgagatcgggctggtggattttgacgtggttgatgaatcgaatcttcagcggcaaattattcacagcacgcgcgacgtgggcagacccaaagtagcttcggcaaaggacagaatcaaagggataaatccgctggtgaatgtggtaatgcataacgaaatgcttaccagcaaaaacgcgctggagcttttcgccgattacgacattatcgccgatggaacggataatttccaaacgcgctaccttgtaaacgacgcctgcgtatttttgggcaagctgaacgcctacggttccgtgtttcagttcgacggacaggcgactgttttcggcgcaaaagacggtccgtgttaccgctgtttgtacccttccccgccgcctccgggacttgttccttcctgcgcggaaggcggagttatgggcgtactgcccggaattatcggaaccattcaagcggcggagacgattaagctgattgtaggcggagcaaagccgcttatcgggagactgcttttatttgacgcgtggcgtatgtcgttccgcgaattaaaattagataaaaaccccgaatgtcccgtatgcgggaagaatcccactattcacgaattaattgactacgaacaattttgcggtttgaaaaaaaataccgacagcaaaccgatagacactataaccgctcttgatttaaaaaaacggcttgataacggagacaaaattcaatttatagatatacgcgagcctcatgaacgcgccattgtaaaatttcccgacgcaaaagtaatacctcttggccaacttgaagacgcatggatgaactggacccgtccatag

SEQ ID NO: 29442 - protein, 281 aa, Unknown
  Obtained from environmental sample
  DOMAIN (5)...(115): ThiF family
  misc_feature (1)..(281): Xaa is any amino acid
MPLIRSAEIGLVDFDVVDESNLQRQIIHSTRDVGRPKVASAKDRIKGINPLVNVVMHNEMLTSKNALELFADYDIIADGTDNFQTRYLVNDACVFLGKLNAYGSVFQFDGQATVFGAKDGPCYRCLYPSPPPPGLVPSCAEGGVMGVLPGIIGTIQAAETIKLIVGGAKPLIGRLLLFDAWRMSFRELKLDKNPECPVCGKNPTIHELIDYEQFCGLKKNTDSKPIDTITALDLKKRLDNGDKIQFIDIREPHERAIVKFPDAKVIPLGQLEDAWMNWTRP

SEQ ID NO: 29443 - DNA, 915 bp, Unknown
  Obtained from environmental sample
  misc_feature (1)..(915): n is a, c, g, or t
ttgaccggcggcggagatttatcggcgaaccgaacgcttgccatttcagcggcgacgtcggcgaccgcatcggcggacggctctgccggttcggttgtttacgcaggaagtaatgatgtttcctcttataataaagcagttgttccggcaactttgaacgctgtttctaccacgctgcaaacaacgataaataataaggccgatacgaccgcccttaacgcgcataccggcgacactaccgtacatataacggcaacagaacggactacgtggaacgcaaaacagaacgcgctaaaccgcacggtaggcggtaatgacaacgcgacgggcacggtaacagacaccggcggcgctttgtcagtacctgtacctgttaccacaacggcgggcgcaagcaacgcagcacaactggcggcgggcacaaacccgctgcgtaccgcgtttcagagggttctggacaatcttgcgaatctgttttcacgcattggtacggcggaaactaatatcaccaatgttactaccacggcaaatgccgccgcacctaccacccgcacaataaacacaaccgcgccgttgaccggcggcggagatttatcggcgaaccgaacgcttgccatttcagcggcgacgtcggcgaccgcatcggcggacggctctgccggttcggttgtttacgcaggaagtaatgatgtttcctcttataataaagcagttgttccggcaactttgaacgctgtttctaccacgctgcaaacaacgataaataataaggccgatacgaccgcccttaacgcgcataccggcgacactaccgtacatataacggcaacagaacggactacgtggaacgcaaaacaaaatgctattcctcttgtaactattccctcatcagaccctccatctgcttgggcctaa

SEQ ID NO: 29444 - protein, 304 aa, Unknown
  Obtained from environmental sample
  SIGNAL (1)...(25)
  misc_feature (1)..(304): Xaa is any amino acid
MTGGGDLSANRTLAISAATSATASADGSAGSVVYAGSNDVSSYNKAVVPATLNAVSTTLQTTINNKADTTALNAHTGDTTVHITATERTTWNAKQNALNRTVGGNDNATGTVTDTGGALSVPVPVTTTAGASNAAQLAAGTNPLRTAFQRVLDNLANLFSRIGTAETNITNVTTTANAAAPTTRTINTTAPLTGGGDLSANRTLAISAATSATASADGSAGSVVYAGSNDVSSYNKAVVPATLNAVSTTLQTTINNKADTTALNAHTGDTTVHITATERTTWNAKQNAIPLVTIPSSDPPSAWA

SEQ ID NO: 29445 - DNA, 468 bp, Unknown
  Obtained from environmental sample
  misc_feature (1)..(468): n is a, c, g, or t
ttgcgggttatggaggggggggaactcagacgccgcgatcttgaccgggcgacgctggcttttttcctgcagaacatcggcatggccaagataccggccttcatcatcaacaaacccggcagcctgaaagcggaagaattcgacaaagtgatcctgcatcccgccttaagctacaaaatcatgcaaaaactcgaactggcctttgacgagcttgcccaagccagcatggaacaccacgaacgcctggacggaacggggtatccgcaaaaaagcaaggggcagcagatcagccgcatcggacgtatcgccgccgttgcggattccttctcggcgatgatcaccaaacgcccctacgcggaagccaaagaacccgtgcaggcggcccaggaactcgccgcggatcaaaagcgctatgacggacagctgaccagctaccttgcgaccgccttcctggcaggatctatttga

SEQ ID NO: 29446 - protein, 155 aa, Unknown
  Obtained from environmental sample
  DOMAIN (3)...(112): HD domain
  misc_feature (1)..(155): Xaa is any amino acid
MRVMEGGELRRRDLDRATLAFFLQNIGMAKIPAFIINKPGSLKAEEFDKVILHPALSYKIMQKLELAFDELAQASMEHHERLDGTGYPQKSKGQQISRIGRIAAVADSFSAMITKRPYAEAKEPVQAAQELAADQKRYDGQLTSYLATAFLAGSI

SEQ ID NO: 29447 - DNA, 996 bp, Unknown
  Obtained from environmental sample
  misc_feature (1)..(996): n is a, c, g, or t
ttgcgaatacaatccggcaaacggcacggaagcgggcctcggctggttcgcgccctacaggaacaaataatcacgccaaaatttacggagggtacgggaatgaaaatcggatttatcggtctgggcatcatgggcaaacctatggcgaaaaatctgctcaaagccgggcacgaagtcttgtgctttgacatcaacaaggccgctgttgacgaatgctccgccgccggggccaaggccgcctcttccgtggccgatgtcgctgcctcatgcgcgtttcttatcaccatgctgcccaactcgccccaggtttccgccgtggccctaggcaaggacggcatcgcggacaacgcgaagacggggacgctcctcgtggatatgtcttccatcgcgcctctggccgcgcgtgagatccacaacagcctcaaggccaagggcatccgcatgcttgacgccccggtatccggcggcgaacccaaggccatcgaaggcacgctgtccgtgatgatcggcggcacacagaaggattttgacgaagccaagcccgtgttgcacgctatggctgcttccgtggtccgtgtgggtgaaatcggcgcgggcaacattgccaagcttgccaaccagatcgtggtggccgtcaacatcgccggccttgccgaagccatggccctgtccgccaaggcgggcgtcgatcctgagctggttttccaggccatccgcggcggtcttgccggttccacggtcatggaggccaaggcgcccatgatgttggatcgcaacatcaagcccggcttcaaaattgacctgcacatcaaggatatgggcaacatcatggacacgggccacggcgtgggcgtgcccctgccgctgtccgcgacggtcatggaaatgatgcaggccctgaaggtggacaatatgggaggagcggatcacagcgcgctggttcgctactatgaaaagattgccaacatggaagtcaaacgcggcgtggtcaaatag

SEQ ID NO: 29448 - protein, 331 aa, Unknown
  Obtained from environmental sample
  DOMAIN (34)...(188): UDP-glucose/GDP-mannose dehydrogenase family, NAD binding domain
  misc_feature (1)..(331): Xaa is any amino acid
MRIQSGKRHGSGPRLVRALQEQIITPKFTEGTGMKIGFIGLGIMGKPMAKNLLKAGHEVLCFDINKAAVDECSAAGAKAASSVADVAASCAFLITMLPNSPQVSAVALGKDGIADNAKTGTLLVDMSSIAPLAAREIHNSLKAKGIRMLDAPVSGGEPKAIEGTLSVMIGGTQKDFDEAKPVLHAMAASVVRVGEIGAGNIAKLANQIVVAVNIAGLAEAMALSAKAGVDPELVFQAIRGGLAGSTVMEAKAPMMLDRNIKPGFKIDLHIKDMGNIMDTGHGVGVPLPLSATVMEMMQALKVDNMGGADHSALVRYYEKIANMEVKRGVVK

SEQ ID NO: 29449 - DNA, 624 bp, Unknown
  Obtained from environmental sample
  misc_feature (1)..(624): n is a, c, g, or t
gtggaggtatctatgaaataccgccccatactattcactacggatatggttcgtgccatattggacagtcgcaaaacgcagacaaggcggattaaatacaactgcgaggttggcgatgtgctttggatacgggagacgtggcgtgtttctgaggtgtttggcaaaactacggaaggaaattttcaaatttctgtaaaattcaaagacggaacaacaggatacgttacatttacgcccgatagatataagaagtttaaaaaattcatagatgcacccaaaaagtggcatactgtcaggcgtaaatggatttcctctatatttatgccccgtgaagcctgccgcttgtatctgcaagtggaaaatgtatgggaagagaaaatacaagatatttcgccaatctgtatttgcatggaaggtattaaggatatatttgaagaaaaatatagaaaggaagggcggtttctatcaaacggagttcatacaatccttttaacgggtgtatttgctgagctatggaacagcatcaacgccaaacgtggattcggttgggataaaaaccctattgtgaaagtgattgaatttaggagggtggagagattaaccaaaggaggcaaccaatggtaa

SEQ ID NO: 29450 - protein, 207 aa, Unknown
  Obtained from environmental sample
  misc_feature (1)..(207): Xaa is any amino acid
MEVSMKYRPILFTTDMVRAILDSRKTQTRRIKYNCEVGDVLWIRETWRVSEVFGKTTEGNFQISVKFKDGTTGYVTFTPDRYKKFKKFIDAPKKWHTVRRKWISSIFMPREACRLYLQVENVWEEKIQDISPICICMEGIKDIFEEKYRKEGRFLSNGVHTILLTGVFAELWNSINAKRGFGWDKNPIVKVIEFRRVERLTKGGNQW

SEQ ID NO: 29451 - DNA, 867 bp, Unknown
  Obtained from environmental sample
  misc_feature (1)..(867): n is a, c, g, or t
atggacagacggagcgatggttgcgaaacgggaaggggcgcgtggacgcccgccgccgagcctgtaatgcgcaatatctcgctttcttccgaccgcttccgaatttttctggaacctcaagcatcagggccgtttacaaatatccctatgatacgcaataccctttccgtcggcacaacctcgcttgtatcgggacataccgccaacggcgcttacaaacagggacgcaatatccgcgtcgccgtctgctttgatctttacgacgatgaaacagggctttctcaggtgcttaactcccttcgctgttttaacataaaagccactttctttttgaacggcgattttatccgcagatgccctaacgcggcggcggctataatcgcggcgggccacgaaacggcttccctcttctacgcccctatagacctttcggacgcgcgttacacggtgacgccgcagtttatagcgcaaggtcttgcgcgtaacgaagatgaatttttccgcgccacgggaaaagaactttccctgctttggcatccgccgtttttccgcacttccggcatgataaactcggccgcctccgttgtgggatactctaccgccgtaagggacattgatcccggcgactggctttccaaagaagaagcgttaaggctgggcatacgccagctttccgcctcgcaattaattgaacaaataaccgaaaaaagaaaaaacggctctataattcccatcaggcttggaacaaatccgggcggcagagacgattatcttttccagagaatcgacgtactgcttgacgcgcttatccgttcaggctgtgatattgtcccgtttccgctatcatcaggtaatgcgcggcattga

SEQ ID NO: 29452 - protein, 288 aa, Unknown
  Obtained from environmental sample
  DOMAIN (73)...(201): Polysaccharide deacetylase
  misc_feature (1)..(288): Xaa is any amino acid
MDRRSDGCETGRGAWTPAAEPVMRNISLSSDRFRIFLEPQASGPFTNIPMIRNTLSVGTTSLVSGHTANGAYKQGRNIRVAVCFDLYDDETGLSQVLNSLRCFNIKATFFLNGDFIRRCPNAAAAIIAAGHETASLFYAPIDLSDARYTVTPQFIAQGLARNEDEFFRATGKELSLLWHPPFFRTSGMINSAASVVGYSTAVRDIDPGDWLSKEEALRLGIRQLSASQLIEQITEKRKNGSIIPIRLGTNPGGRDDYLFQRIDVLLDALIRSGCDIVPFPLSSGNARH

SEQ ID NO: 29453 - DNA, 378 bp, Unknown
  Obtained from environmental sample
  misc_feature (1)..(378): n is a, c, g, or t
atgggtatgactatctcgagcattgcttccggcacgagtttcgccccgcagccggaacttccaaaattacagcaggctagggtttcagaacagaaggccgctattgataaatttgtcgcttccctgcccggaaacggcgaaaatttgaacaccgcacagcttgatatacaccgcgtagcggcggatatcgaacaagtaagccagactttcaacagaaaactccaattcgtggtggatcataagtcacaggaggttatcgtcaaggtaattgacagaaataccgataaggtgatcaaggtgctcccgcctgaggagttgcagcggctgcacaggaaacttaaagaaaccattggcttgctgtttaacgagaaagtgtaa

SEQ ID NO: 29454 - protein, 125 aa, Unknown
  Obtained from environmental sample
  DOMAIN (18)...(124): FlaG protein
  misc_feature (1)..(125): Xaa is any amino acid
MGMTISSIASGTSFAPQPELPKLQQARVSEQKAAIDKFVASLPGNGENLNTAQLDIHRVAADIEQVSQTFNRKLQFVVDHKSQEVIVKVIDRNTDKVIKVLPPEELQRLHRKLKETIGLLFNEKV

SEQ ID NO: 29455 - DNA, 1143 bp, Unknown
  Obtained from environmental sample
  misc_feature (1)..(1143): n is a, c, g, or t
gtgaagagccggtttaattcagaaaagctcgtcgaagacctgatgaagcttgagcgcatccccaaagaaagaaccgaaaaaaatatagaaacccaggaaacccgcaagacttattggcaggatcttggcaggcgagtcacgtctctgcgcgaaagcgcccgttttcttttttccttccaaaacccttttaatgaccgcgtagccatttcctcggatgaaaactcaatcaccgccacagcgacaagggaagccgtcgagcaggaataccgtttcagcgtcaaacagatcgcccaggcggaccgtttcctctccccctcccttgatgaaaaaacaaaaatcgacgcgggaaattatgtgtttagcgtgggcaatgatgagatctcccttaatttcaggggaggttctttacgggaatttgccgacgcgctgaaccgccggagccgcgacaaactcggcgccagtctgataacggtgcagcccggcacaaaatcactgttgattgaatccaaagtaaccggcgcggaaaaccggcttggtttttccggcgactcggagcttttagcgataaaactgggaattttggaacaggtaaacgattcccgcagggaaatcgtaatttcagaaggcactgtcagggaaacgcccctgccggacggcatagaacctacaggcccgctttccataaacgacggcgttttaggattcccccctctcgcttcagcctcaatccctttcgctctggaagtggagcggggatctcctttagtgcttaaactggaaacccagacaaaggtaaaccctgaaattacgcgttcaatcccgcagccgccgccgggcccaagcgtcccctcgtcaggctccgtctcatacggcggcattacaatagaaaataacccgtcaacggcgcctatgccggaatggaaacccccgcccgtgccgaagaggatggacaaccttgccgttctttctttaagtttttcagatggcactaaagcaaatctgcggcctattacagactcaggcgattttatcccccgggaattcagccttgccgaatatgccggaggcaaaaccattaccgccctgaatatagaaaacgccaacacccacagggaaatttcaatcaggggcgctatgttttga

SEQ ID NO: 29456 - protein, 380 aa, Unknown
  Obtained from environmental sample
  DOMAIN (2)...(101): Flagellar hook-associated protein 2 C-terminus
  misc_feature (1)..(380): Xaa is any amino acid
MKSRFNSEKLVEDLMKLERIPKERTEKNIETQETRKTYWQDLGRRVTSLRESARFLFSFQNPFNDRVAISSDENSITATATREAVEQEYRFSVKQIAQADRFLSPSLDEKTKIDAGNYVFSVGNDEISLNFRGGSLREFADALNRRSRDKLGASLITVQPGTKSLLIESKVTGAENRLGFSGDSELLAIKLGILEQVNDSRREIVISEGTVRETPLPDGIEPTGPLSINDGVLGFPPLASASIPFALEVERGSPLVLKLETQTKVNPEITRSIPQPPPGPSVPSSGSVSYGGITIENNPSTAPMPEWKPPPVPKRMDNLAVLSLSFSDGTKANLRPITDSGDFIPREFSLAEYAGGKTITALNIENANTHREISIRGAMF

SEQ ID NO: 29457 - DNA, 885 bp, Unknown
  Obtained from environmental sample
  misc_feature (1)..(885): n is a, c, g, or t
atgacaaaggccgtgtcacagacctttgccgcgcagggcgtatccattgtggagaaagcggtttctgtaattgacggcgatgccttcgagactctggccaaatcgctggatgctgatgatcccttttatgaaaaaaccagagttcagcttctgaatatcaagaaattgtcaggctgtgtatatttgtacaccatgacgcaggtagacgggaatacctggcagtatatcattgacggcagcggtgagcctgacgaccctgaaaatttttccgcaataggagacaaagaagataccggatcttatgatgacgcgttcaagcgggtattaatttcaaataaaaccgaaagcggtaatctggtatatcaggaaggatggggttggctggtttcgatttacgcccctataaaaaattccgccggaaaattcgtgggaattgtcggctgcgattttaacggggagtatcttcatgacaccattgttacgaacatacggcggcagataattatcggcggaacttccgtcctgctcggtcttgcgctgatcctgtttttactgcggcagattttttcacccctcggcagaatcaacgctattctgaaagaaatctcaatgggcgaagggaacttgaccggaaggatcaaagcggacaaggatgatgaaattggggaactggcgggttacttcaatcttaccatggaaaaaataaaaaatcttgtagtgaccataaaatataaaatcaacgggcttaaccttacccagtttgaactttcctttatatgggtaaaacttctactgccgttcagcagattacatcgaatcttgacaatatggaaaacattatggntcagcaggaaaacggcgcgaccgaagcgggncaggcggtag

SEQ ID NO: 29458 - protein, 294 aa, Unknown
  Obtained from environmental sample
  DOMAIN (166)...(237): HAMP domain
  misc_feature (1)..(294): Xaa is any amino acid
MTKAVSQTFAAQGVSIVEKAVSVIDGDAFETLAKSLDADDPFYEKTRVQLLNIKKLSGCVYLYTMTQVDGNTWQYIIDGSGEPDDPENFSAIGDKEDTGSYDDAFKRVLISNKTESGNLVYQEGWGWLVSIYAPIKNSAGKFVGIVGCDFNGEYLHDTIVTNIRRQIIIGGTSVLLGLALILFLLRQIFSPLGRINAILKEISMGEGNLTGRIKADKDDEIGELAGYFNLTMEKIKNLVVTIKYKINGLNLTQFELSFIWVKLLLPFSRLHRILTIWKTLWXSRKTARPKRXRR

SEQ ID NO: 29459 - DNA, 672 bp, Unknown
  Obtained from environmental sample
  misc_feature (1)..(672): n is a, c, g, or t
atgggtgaagtaatatccaataacgacagggcggcggttttaatccacgcgctgccctatattcagagtttcctggggaaaaccatcgtcgtcaagtacggcggcaacgccatgataaatggggaactcaaggccgccgtgatacaggacgtggttttgatgtcctgcataggcatacgcgccgtgcttgtccacggcggcggccccgagatcgactccatgctgaaaaaaaccggcaaggaaagccgttttgtaaacggcctccgctacaccgacgccgaaacaatggaaattgtccagatggtgctgtgcggcaaaatcaacaaggacattgtcggcctgatacagcaacaggggggcagggctatcggcctttgcggcattgacggcgccatgctcaaggcccgtaaaataaaaagcgaggatctggggctggtaggcgagatagaagaggttgattctacggtattaaactccgcgcttgacgcgggttttatccccgtcgtttcctccgtcgcctccggtattgacgacggccagcccctgaatatcaacgccgacaccgccgcggcaaaaatcgccgccgcgcttcgcgcggaaaaacttatgcttatgaccgacgtgcggggcatcatgcgggatatgcaggaccccgactctcggccgatctga

SEQ ID NO: 29460 - protein, 223 aa, Unknown
  Obtained from environmental sample
  DOMAIN (27)...(222): Amino acid kinase family
  misc_feature (1)..(223): Xaa is any amino acid
MGEVISNNDRAAVLIHALPYIQSFLGKTIVVKYGGNAMINGELKAAVIQDVVLMSCIGIRAVLVHGGGPEIDSMLKKTGKESRFVNGLRYTDAETMEIVQMVLCGKINKDIVGLIQQQGGRAIGLCGIDGAMLKARKIKSEDLGLVGEIEEVDSTVLNSALDAGFIPVVSSVASGIDDGQPLNINADTAAAKIAAALRAEKLMLMTDVRGIMRDMQDPDSRPI

SEQ ID NO: 29461 - DNA, 369 bp, Unknown
  Obtained from environmental sample
  misc_feature (1)..(369): n is a, c, g, or t
atgatgccccgcacgtcggtcataagcataagtttttccgcgcgaagcgcggcggcgatttttgccgcggcggtgtcggcgttgatattcaggggctggccgtcgtcaataccggaggcgacggaggaaacgacggggataaaacccgcgtcaagcgcggagtttaataccgtagaatcaacctcttctatctcgcctaccagccccagatcctcgctttttattttacgggccttgagcatggcgccgtcaatgccgcaaaggccgatagccctgcccccctgttgctgtatcaggccgacaatgtccttgttgattttgccgcacagcaccatctggacaatttccattgtttcggcgtcggtgtag

SEQ ID NO: 29462 - protein, 122 aa, Unknown
  Obtained from environmental sample
  SIGNAL (1)...(27)
  misc_feature (1)..(122): Xaa is any amino acid
MMPRTSVISISFSARSAAAIFAAAVSALIFRGWPSSIPEATEETTGIKPASSAEFNTVESTSSISPTSPRSSLFILRALSMAPSMPQRPIALPPCCCIRPTMSLLILPHSTIWTISIVSASV

SEQ ID NO: 29463 - DNA, 333 bp, Unknown
  Obtained from environmental sample
  misc_feature (1)..(333): n is a, c, g, or t
gtgtccctggcgagggcgatggcccgcgacggcgagggcgcgacaaaactggttaccgtcaccgtaaacggcgcggttgacgaaaaaaccgccgtgaagctggcaaagtccgtagcggcctcgagcctggttaaggcagcctgtttcggcgcggacgccaactggggcaggatactctgcgccatgggctattccggcgcggaattcgatccgggcaggacgagcgtgagtttcaaaagcagggcgggggaaaatcgccgtatgttaaaacggcgggccggttccgttttccgaggacaaggcgaaagctatactgtcagaagaagaaattga

SEQ ID NO: 29464 - protein, 110 aa, Unknown
  Obtained from environmental sample
  misc_feature (1)..(110): Xaa is any amino acid
MSLARAMARDGEGATKLVTVTVNGAVDEKTAVKLAKSVAASSLVKAACFGADANWGRILCAMGYSGAEFDPGRTSVSFKSRAGENRRMLKRRAGSVFRGQGESYTVRRRN

SEQ ID NO: 29465 - DNA, 507 bp, Unknown
  Obtained from environmental sample
  misc_feature (1)..(507): n is a, c, g, or t
atgaatacgataatctactggacaagaaaactcggggcgtcgtgcttctttatcggctacttcccgttcgcgtcgggaacggtgggttccgcaatcaccatagccgttctgtttttcggcaaagatcacctctcttttatgctcggcccggagaacgcgctcaactattggtgggcgatcgtgacgctcaccgtaataagtttttttctgaccgacaaggggaaagagatcttcgggcaggacgaccccaagcagacggtattcgacgaggtggtcgggcagttcatcacgttcttcatgattcctataaacatccgcacattggttctgggtttcgtcctcttccgtttttacgacatcgtaaagccttatccggtataccgcttagaggagatagagggcggcgtgggcgtgacgatggacgacgtggcggccggggtgctggcgaacgtcacgcttatattttcgatatgggcctacaagtgggttatggtctttttgacgtag

SEQ ID NO: 29466 - protein, 168 aa, Unknown
  Obtained from environmental sample
  SIGNAL (1)...(26)
  DOMAIN (8)...(158): Phosphatidylglycerophosphatase A
  misc_feature (1)..(168): Xaa is any amino acid
MNTIIYWTRKLGASCFFIGYFPFASGTVGSAITIAVLFFGKDHLSFMLGPENALNYWWAIVTLTVISFFLTDKGKEIFGQDDPKQTVFDEVVGQFITFFMIPINIRTLVLGFVLFRFYDIVKPYPVYRLEEIEGGVGVTMDDVAAGVLANVTLIFSIWAYKWVMVFLT

SEQ ID NO: 29467 - DNA, 597 bp, Unknown
  Obtained from environmental sample
  misc_feature (1)..(597): n is a, c, g, or t
atgcttgagagtttggaggagctggtcgccgcgctgagcaggctgcccacgataggccgcaagagcgcgtggcgtctcgcgctctacctaatggaaaggccggaggcggaggctaagcacttggccgatacggtgctctccgtccgaaggaaaatcaggcgttgcggcgtttgtttcaactacagcgaggatgaggtgtgcgaggtgtgcgcctccgcgtcgcgagacaaatcattgatatgcgtggtggagaagccgacggatgtctttacgatagagaacgccgggcgctataggggaatgtaccacgtgttgggcgggctgctgtcgccgcttaacggcataaccgcggagaagttgcagatagcgcggctgcgcgagcgcctgggcggcgacgatattaaagttagagaggtaattataggcctcggcggcagcggggacgccgagacgacggcgctctacttagcgaaggtgcttaaaggcgacggggtgcggataacgcgcttcgcgaggggtctgccggcgggtctggagatagagcacgtggaccagctcacgcttacccaggcgttgaacgagcgggttgacgtgtga

SEQ ID NO: 29468 - protein, 198 aa, Unknown
  Obtained from environmental sample
  DOMAIN (78)...(171): Toprim domain
  misc_feature (1)..(198): Xaa is any amino acid
MLESLEELVAALSRLPTIGRKSAWRLALYLMERPEAEAKHLADTVLSVRRKIRRCGVCFNYSEDEVCEVCASASRDKSLICVVEKPTDVFTIENAGRYRGMYHVLGGLLSPLNGITAEKLQIARLRERLGGDDIKVREVIIGLGGSGDAETTALYLAKVLKGDGVRITRFARGLPAGLEIEHVDQLTLTQALNERVDV

SEQ ID NO: 29469 - DNA, 312 bp, Unknown
  Obtained from environmental sample
  misc_feature (1)..(312): n is a, c, g, or t
atgaaaaacatgaacaagcttctgaaacaagcgcagaagatgcagacccaggttgtaaaggcccaggaggagttgcagcgcaagcagtacgagggtgtcgccggcggcggcatggttaaggtcgtcctaaacgggaagaatgagttggtgtcgatcaagatcaacccggaggtggttgacccgcaggatgtggagatgcttgaggacctgatcgtcgccgcccacacgagcgcccttgaggcggccaagggcgattcggagtcggttttcgggtctatccagagcggccttgggctgccggggctctcttag

SEQ ID NO: 29470 - protein, 103 aa, Unknown
  Obtained from environmental sample
  DOMAIN (8)...(100): Uncharacterised BCR, YbaB family COG0718
  misc_feature (1)..(103): Xaa is any amino acid
MKNMNKLLKQAQKMQTQVVKAQEELQRKQYEGVAGGGMVKVVLNGKNELVSIKINPEVVDPQDVEMLEDLIVAAHTSALEAAKGDSESVFGSIQSGLGLPGLS

SEQ ID NO: 29471 - DNA, 711 bp, Unknown
  Obtained from environmental sample
  misc_feature (1)..(711): n is a, c, g, or t
atgtcccaaaagatcagccggattggaaatccgtctaaggaacttggattgatggcggacgggcaggacaatctctgcaaatgtacgatagcgggccttgttttatttggttatcagccgcgtaaaaacctgtaccagtccggcttgcattggatgtccttttccggaattgatatggattataaggctgatgatgacgtgttcattgacgcccctttggtaccgcttggcaggggaaggcccggagaaggaagaaatattgttgatcccggacttgtcgaaaaaattgcggacaggatgatcccgtttatctctaaagaaaatgattccgtcaatgagcagtttcgcaggggaaagcagtatttttatccttttgaggcaatccgggaagcggtattgaacagcttttcacacagggattggacccgcgctcttgaaattacggtaattaattattccgacagaatagaaatcaacagcccgggaacgcttcaaaattacatgactttggaaaaaatgctggccggacagcggtcaattcgcaatcccattattgttgagactttacgcgattatgaatatgttgacatgcggggtatgggcgtccgccgtaaaattgtccctttgacaaaggaatataccggaaaggacgtgcaatttgaagtaacggatgattatgtaaaggtgatcattccgtccattccaaggtga

SEQ ID NO: 29472 - protein, 236 aa, Unknown
  Obtained from environmental sample
  misc_feature (1)..(236): Xaa is any amino acid
MSQKISRIGNPSKELGLMADGQDNLCKCTIAGLVLFGYQPRKNLYQSGLHWMSFSGIDMDYKADDDVFIDAPLVPLGRGRPGEGRNIVDPGLVEKIADRMIPFISKENDSVNEQFRRGKQYFYPFEAIREAVLNSFSHRDWTRALEITVINYSDRIEINSPGTLQNYMTLEKMLAGQRSIRNPIIVETLRDYEYVDMRGMGVRRKIVPLTKEYTGKDVQFEVTDDYVKVIIPSIPR

SEQ ID NO: 29473 - DNA, 975 bp, Unknown
  Obtained from environmental sample
  misc_feature (1)..(975): n is a, c, g, or t
gtgggcggagtcatcggctcgaagttgtttgttttcaggggaaaaacaggagcgggcaaaactcttgttgcgaagcactttatagaagaacttcgccgggaagactgtctttcttcggacaggattaccagtaaggaggcgcgggaactttcaaaaatttacggcgacgaatacgccatcgctaaatttctttctgagacaaaacccgcggctctggttgtagacaatgccactgaaaagccggaatatatccatgagttgatcctcgccgcaagcaagtctacggaggagtgcgtctgcgttatcatcggtaatagcgaaggctttgacgagtttttcagcaagaacaccgaagaccgccagcgtgttacccaggattttaatttccaggatctttcgcttgatgatctttccctgatactgatgaagaagcttcgtgagcgcggacttgtttttgatcctgcgctgagaaaacatttttcttcctatatacaagagcacaagaacgatccttcctgcgaatataaaaacggctggctgattgagaaagacgttattccttcaatagacaagaatcaacaggcaaggcttgaacgtagtacgtcagtctcggacgaagactttaagactatcaagatcgaagatctgccgcttaaaaacaagcccaaaacagtcgatgagattctcgcggaacttgacgcgatgatagggcttgccaaagttaagaatgcagtccgcgaggtagcccaggaaatcaaaaggccaaaagaactggaagaaaaagggggcgcaaaggcgggaggtcttgaattcatcttgtgttttacggaaatcccggtacgggaaagacaacagtcgcccgtaaactcggagctttgtttcaggcgatggaactccttccaagcgatcatattatcgaaaccgaccgtaccggtcttgtcgcgggttatgtcggtcagactgcccctatggtaa

SEQ ID NO: 29474 - protein, 324 aa, Unknown
  Obtained from environmental sample
  misc_feature (1)..(324): Xaa is any amino acid
MGGVIGSKLFVFRGKTGAGKTLVAKHFIEELRREDCLSSDRITSKEARELSKIYGDEYAIAKFLSETKPAALVVDNATEKPEYIHELILAASKSTEECVCVIIGNSEGFDEFFSKNTEDRQRVTQDFNFQDLSLDDLSLILMKKLRERGLVFDPALRKHFSSYIQEHKNDPSCEYKNGWLIEKDVIPSIDKNQQARLERSTSVSDEDFKTIKIEDLPLKNKPKTVDEILAELDAMIGLAKVKNAVREVAQEIKRPKELEEKGGAKAGGLEFILCFTEIPVRERQQSPVNSELCFRRWNSFQAIILSKPTVPVLSRVMSVRLPLW

SEQ ID NO: 29475 - DNA, 903 bp, Unknown
  Obtained from environmental sample
  misc_feature (1)..(903): n is a, c, g, or t
gtgttttacggaaatcccggtacgggaaagacaacagtcgcccgtaaactcggagctttgtttcaggcgatggaactccttccaagcgatcatattatcgaaaccgaccgtaccggtcttgtcgcgggttatgtcggtcagactgcccctatggtaaaagaaatgtgcgacaaggctatgggcggcatcctatttatcgacgaggcttatactcttagttcaggcggcggcggtgatttcggcaaagaggcgatagacgctcttcttaaacgcatggaagacgaccggggcaattttgtggtaatcgccgcgggatataaaaacgaaatgcagaattttatccagtcgaatccgggccttaaaagccgttttacccatgaacttgaacttgaggattacaatcctgatgagttaaacgccatatttatgtccatggcaaaagacaggggcaataaattgtcgaaagacgcggaaattgccgcgaaagaagccatagcggacattcacagaaaaaaaggcaaggattttgccaacggccgcactatgcgcaacctgcttgacgatacggttagaaaaatggccgcccgtaccgcaaaactgcccgaagctcagcgcaccgtcgaagcgctttctaccataaccgcagaagatattccctatgaaaaaccaaagatcaagacaacggaagaaattcttgcggaacttgacggtatgatagggcttgcgaaagttaagactgccgtacggcagcttattgaaacgataagtatgcaaaaagaacgcgaggagaaaggcggcgccgcggcaaagatacaggctattcatctgtgtttctacggcaaccccggcaccggaaaaacaactgtcgcaagaaaactcggagcctcggccgctcggccataa

SEQ ID NO: 29476 - protein, 300 aa, Unknown
  Obtained from environmental sample
  DOMAIN (1)...(191): ATPase family associated with various cellular activities (AAA)
  misc_feature (1)..(300): Xaa is any amino acid
MFYGNPGTGKTTVARKLGALFQAMELLPSDHIIETDRTGLVAGYVGQTAPMVKEMCDKAMGGILFIDEAYTLSSGGGGDFGKEAIDALLKRMEDDRGNFVVIAAGYKNEMQNFIQSNPGLKSRFTHELELEDYNPDELNAIFMSMAKDRGNKLSKDAEIAAKEAIADIHRKKGKDFANGRTMRNLLDDTVRKMAARTAKLPEAQRTVEALSTITAEDIPYEKPKIKTTEEILAELDGMIGLAKVKTAVRQLIETISMQKEREEKGGAAAKIQAIHLCFYGNPGTGKTTVARKLGASAARP

SEQ ID NO: 29477 - DNA, 735 bp, Unknown
  Obtained from environmental sample
  misc_feature (1)..(735): n is a, c, g, or t
ttgctttccgacggaaaaattaataatcttgcctctgttgaagctattgtcataagcggaaacggccccagtcttgttcctgtttttaatgagcctgtcttttcagataatggcgtcagcgttcccgcggaaaacgcaaggctttggcttgaccgccgcgccgtcaggtatcaggaagaagtttcacatttgatggggggctttgtggacgcggggtttttccttccaaaaatactgggcattaaaaatgaagaaaataaattgtataaagaaacaaaatattttctcggctgcccggaataccttgcctacgctcttactggaaacgcgtgcaatgttttcccgtgcgacggattcgagcgctggttttgggataacgacgttcttgataaacttgatctggacgcgggtaaatttcccgctttcatccgtcccggcgaaccgtttggtacaattctcgcgaaagcggcggcgcagtttggtttttcaaaaaatattccggttatttcaggcgggccggacttttatgccgctattttgggaagcggagtcacagaaatcggtcaggcttgcgaccgcaccggctcatcagaaggagtcaatctctgtacacaaaaccgtattcttgataaccggctgatgtcttacggtcatcccgttaaaccgtactggaatttatcccggattttttacaccaccggaaaagccaatagattgggcatgcgattttgttag

SEQ ID NO: 29478 - protein, 244 aa, Unknown
  Obtained from environmental sample
  DOMAIN (1)...(181): FGGY family of carbohydrate kinases, N-terminal domain
  misc_feature (1)..(244): Xaa is any amino acid
MLSDGKINNLASVEAIVISGNGPSLVPVFNEPVFSDNGVSVPAENARLWLDRRAVRYQEEVSHLMGGFVDAGFFLPKILGIKNEENKLYKETKYFLGCPEYLAYALTGNACNVFPCDGFERWFWDNDVLDKLDLDAGKFPAFIRPGEPFGTILAKAAAQFGFSKNIPVISGGPDFYAAILGSGVTEIGQACDRTGSSEGVNLCTQNRILDNRLMSYGHPVKPYWNLSRIFYTTGKANRLGMRFC

SEQ ID NO: 29479 - DNA, 924 bp, Unknown
  Obtained from environmental sample
  misc_feature (1)..(924): n is a, c, g, or t
gtggagcttgaaacagagctctgcaagtatcccgcgatttcgccggattctggcggcgaaggggaactggacaagtgcgaatttcttgcgtcctggttaaaggcccagggcataagcaagctggagcgttatgacgcccccgacccacgcgcaaaaggcggcgttaggccgaaccttgtggcaaccattcccggaaaagacgatccggctggtaaaagcccgcgcttttgggtgatgagccacatcgacgtggttcctcccggcgaggcttctttttggaacagcgatccctggaaggcagtggttgccgatgagggcaaaagaagcgacggaactccgctgggcaagcggatcattggccggggtgtggaagataaccagcaggggcttgtctcatcggtaatagcgactctggcttttgtaaagcaggggattacaccgagccggacagtgaagctccttttcgcatcggacgaagaaaacggcagcgtctacggcgtggactggctcataaaaaaccatccggaacttttcaataaagacgacatggtcatcgttccggattcgggcagcatatcgggagcggagattgaaatcgcggaaaaaagccatgtctgggcaaagttcgtcaccaagggaattcagacccacgccgcccatccggataagggcgccaatgcctatcttgccggcgcagatctgactgtgcggctccactacgggctttcagaaaaattctccgacagaaacccgctcttcgatcctgactattcaacttttcagccctacaaaaaagagcccaacatacccaacatcaacactgttcctggcgatgacgttttctactacgatatgcggatacttccttctggttctattgacgatgtatttaagggaagtgatcgcatcaaggcccgagtttga

SEQ ID NO: 29480 - protein, 307 aa, Unknown
  Obtained from environmental sample
  DOMAIN (77)...(245): Peptidase family M20/M25/M40
  misc_feature (1)..(307): Xaa is any amino acid
MELETELCKYPAISPDSGGEGELDKCEFLASWLKAQGISKLERYDAPDPRAKGGVRPNLVATIPGKDDPAGKSPRFWVMSHIDVVPPGEASFWNSDPWKAVVADEGKRSDGTPLGKRIIGRGVEDNQQGLVSSVIATLAFVKQGITPSRTVKLLFASDEENGSVYGVDWLIKNHPELFNKDDMVIVPDSGSISGAEIEIAEKSHVWAKFVTKGIQTHAAHPDKGANAYLAGADLTVRLHYGLSEKFSDRNPLFDPDYSTFQPYKKEPNIPNINTVPGDDVFYYDMRILPSGSIDDVFKGSDRIKARV

SEQ ID NO: 29481 - DNA, 555 bp, Unknown
  Obtained from environmental sample
  misc_feature (1)..(555): n is a, c, g, or t
ttgagtggttcaggcgggcaggggcttatactggcaggtgtaattctggctgaatccgccctgcttgacggtaagcaggcgatccagtcccaatcatacggcccggaagcaaggggcggttcaagcaaggccgaggtcataataagcgacagcgagattgattttgtgaaggttcagaaatgcgatatgctcctgtgcctgacccaggacgcctacgacaagtacggcaaggattttaccagagtccttgttttggatgaaaggatagaaatgaaataccctgagcctgaaaaagttttaaggctccccattctggacactgcctcggaaaaaatcggcaagcccatggtcgccaacataattgcccttggcgcgattaacgggctgctcagcattgtcactcaggaatcgcttttaaaggcaattatagatcgagtgcccaagggaacagaggagctgaataagctggcccttgagtcggggtacaaactggcagaggaagcttctctgatttcaactcggatatttccacaacttcccatcatgcccctttaa

SEQ ID NO: 29482 - protein, 184 aa, Unknown
  Obtained from environmental sample
  DOMAIN (5)...(163): Pyruvate ferredoxin/flavodoxin oxidoreductase
  misc_feature (1)..(184): Xaa is any amino acid
MSGSGGQGLILAGVILAESALLDGKQAIQSQSYGPEARGGSSKAEVIISDSEIDFVKVQKCDMLLCLTQDAYDKYGKDFTRVLVLDERIEMKYPEPEKVLRLPILDTASEKIGKPMVANIIALGAINGLLSIVTQESLLKAIIDRVPKGTEELNKLALESGYKLAEEASLISTRIFPQLPIMPL

SEQ ID NO: 29483 - DNA, 336 bp, Unknown
  Obtained from environmental sample
  misc_feature (1)..(336): n is a, c, g, or t
gtgcagactgtgctgcttaagggaatcaacgacaacgccgaaacccttgctctgttgttccgcgagtgtgttaacctgggcctttcgccttattacctttttcagcttgatcttgcccccggtgccgcccatttcagggttcccctgagaaagggccttgccatctatcgggaactggaacgccatgtctccggccttgccttgccgacatacgctgttgatctgccgggcggcggcggaaaaatccgcctaagtgaagatgtgattgcgggggaaacggatggaattctgcttttaaaggggcatgatgggaagttgtggaaatatccgagttga

SEQ ID NO: 29484 - protein, 111 aa, Unknown
  Obtained from environmental sample
  misc_feature (1)..(111): Xaa is any amino acid
MQTVLLKGINDNAETLALLFRECVNLGLSPYYLFQLDLAPGAAHFRVPLRKGLAIYRELERHVSGLALPTYAVDLPGGGGKIRLSEDVIAGETDGILLLKGHDGKLWKYPS

SEQ ID NO: 29485 - DNA, 408 bp, Unknown
  Obtained from environmental sample
  misc_feature (1)..(408): n is a, c, g, or t
atgaaaagaatttttagatggatatttgccgggatagtcgctattccggtgatggccgctttattcagcgtggtagtaatgctgctgtggaacgcgcttatgccgcagattttcgcactgcctgttttaaattactggcaggcagtcggactgctcatcctggcgcgagttttaatcggcagcatgggacacggtatcgggtacagaggagcctttggctccggggaagaccgtctgtttcatcacggcaacagattccgtgaaaaatggatgaacatgagcgcgaatgaacgcaaagagttcatcgagaaagaaagggattttttcagaacttacagaggcttctcgcgttttcatgatttttttaatgacgaagcggatcaccataaggacgaggggaatgagtaa

SEQ ID NO: 29486 - protein, 135 aa, Unknown
  Obtained from environmental sample
  SIGNAL (1)...(19)
  misc_feature (1)..(135): Xaa is any amino acid
MKRIFRWIFAGIVAIPVMAALFSVVVMLLWNALMPQIFALPVLNYWQAVGLLILARVLIGSMGHGIGYRGAFGSGEDRLFHHGNRFREKWMNMSANERKEFIEKERDFFRTYRGFSRFHDFFNDEADHHKDEGNE

SEQ ID NO: 29487 - DNA, 549 bp, Unknown
  Obtained from environmental sample
  misc_feature (1)..(549): n is a, c, g, or t
ttgagggctttcatcgtagtgggcgccaccacgttcggcggcggttacgcggcagttccggtgcttgagcgcgaaatgataaagaaacgcggctggctgaccatggacgaagtgctggactattacaccatcgcccagataacgcccggtatcatcctgattaatatcgctaccttcgtcggctgtaaacggaaaggcataatcggcggcattatcgccacaatcggccttgtgttgcccggcgtgagcctgatgttgttaatatcgttgttcatacgacatttcgccgaatatgccgtggtacagcgcgccttcagcggcatacgccttgccgtctgcgcaatcattctggatacgattattaaacttttcaaaggattctggaaggactataaggcgatgattatcagtattgtcgtttttgttctttcggcggttttcagcgtgtctcccgtgtatatcatccccgtcgcgggccttgcgggttttctgctttattcgccgaaaaacaaaggtaaaattacggctgacacggggaaggacgagtga

SEQ ID NO: 29488 - protein, 182 aa, Unknown
  Obtained from environmental sample
  SIGNAL (1)...(17)
  DOMAIN (1)...(173): Chromate transporter
  misc_feature (1)..(182): Xaa is any amino acid
MRAFIVVGATTFGGGYAAVPVLEREMIKKRGWLTMDEVLDYYTIAQITPGIILINIATFVGCKRKGIIGGIIATIGLVLPGVSLMLLISLFIRHFAEYAVVQRAFSGIRLAVCAIILDTIIKLFKGFWKDYKAMIISIVVFVLSAVFSVSPVYIIPVAGLAGFLLYSPKNKGKITADTGKDE

SEQ ID NO: 29489 - DNA, 882 bp, Unknown
  Obtained from environmental sample
  misc_feature (1)..(882): n is a, c, g, or t
atgcccttactcaaggcgaacttgatcggcagcaggcggcggcaaaaggcgtttcccattgcgggcgacggggtaaaggcgctgtgggtaaaaggcaaggcggactattcccgcaaacaaattgaagaattggaatcccacgccaaaatttacaaagcncgcggcatggcatggatgaaagttaccgagagcggcggtctggaaggtggcgttgccaaattctttactgacaacgcagcccagatcatcagcggactgggcgccgcgccgggcgaccttatccttatagtggcggattcccggcgcaatgtcgccaataccgctctgggcgcggtacgttccaaactgggcaaagacctgggcctttgtaatacaggcagccgttttgaatttgtgtggatcgtcgattttcccctctttgaatttaacgaggaagaaaaccactgggaagcggcgcatcatctgttcagttggccgcaggaacaataccatgcaacgctggaaagcgatcccggcgcggtaaagggcgacctgtacgatctggtgttaaacggctatgaactcgcgtccggctccattcgtatccatgatccggttttgcagcagcggattttcagcatcgccggctttgatcccgccgaagcggaaaaaagattcggctttttaaccggcgcgtttaaattcggcgctccgccccacggcggcatcgcgccggggcttgaccggctggttatgctcatggccgggcagacttcaataaaagaagttatcgcttttccgaaaaattcatttgccgaaagtccgatggacgacagccccggcgaaatcgaccaaaagcagcttgatgaattgcgcataacgatcaaaaaagaaaacaagtag

SEQ ID NO: 29490 - protein, 293 aa, Unknown
  Obtained from environmental sample
  DOMAIN (42)...(264): tRNA synthetases class II (D, K and N)
  misc_feature (1)..(293): Xaa is any amino acid
MPLLKANLIGSRRRQKAFPIAGDGVKALWVKGKADYSRKQIEELESHAKIYKARGMAWMKVTESGGLEGGVAKFFTDNAAQIISGLGAAPGDLILIVADSRRNVANTALGAVRSKLGKDLGLCNTGSRFEFVWIVDFPLFEFNEEENHWEAAHHLFSWPQEQYHATLESDPGAVKGDLYDLVLNGYELASGSIRIHDPVLQQRIFSIAGFDPAEAEKRFGFLTGAFKFGAPPHGGIAPGLDRLVMLMAGQTSIKEVIAFPKNSFAESPMDDSPGEIDQKQLDELRITIKKENK

SEQ ID NO: 29491 - DNA, 888 bp, Unknown
  Obtained from environmental sample
  misc_feature (1)..(888): n is a, c, g, or t
ttgcatggatccattatagccaaaaacgtaaaaaacgcatactattttttaaggaagtattatatggaaaattttaaacgtaccgttaactgcggtgaattgcggaaagcagccgcgggcaagaccgttattctgaacggatgggttcaccgcaaacgcgaccacggcggcattttttttatcaatctgcgcgaccgctacggcgttacccaggtcacggttgatacaaccggatcgcaggctggtttggccgccggcatggccgccgtctgcgccgatcttcgcaatgaattctgcgtcgccgtcgagggaacggtgcgcacccggcctgatgacatggtaaacccttctatggctacgggcgaaatcgaggtgcttgcctcaaatatcgtaatactcagccgctgcgaggttctgcctttccagattgacgaggaaagcaacgcgggtgaagacctccggctaaaataccgctatctggacctccgctcaacggccatgcagaccaggctccgcctgcgcagcgaggtggcatacgccgtgcgtgagtggatgacggctaacggcttttatgaaatcgaaacgccgacatttatccgctcgacgcccgaaggcgcccgggattaccttgtgccatcgcgcctgtacccgggaaaattctacgccctgccccagtcgccccagctttacaagcagcttttgatggtgtcaggcttcgacaagtatttccagatcgcccgctgttaccgcgatgaggacgcgagaggcgaccgtcagcccgagttcacccagatcgacattgagatgtcatttgtaggccgcgatgatattctgagggttaccgagggaatgcttgtccaccgttttcaaaaaaaccattggcgttga

SEQ ID NO: 29492 - protein, 295 aa, Unknown
  Obtained from environmental sample
  DOMAIN (150)...(293): tRNA synthetases class II (D, K and N)
  misc_feature (1)..(295): Xaa is any amino acid
MHGSIIAKNVKNAYYFLRKYYMENFKRTVNCGELRKAAAGKTVILNGWVHRKRDHGGIFFINLRDRYGVTQVTVDTTGSQAGLAAGMAAVCADLRNEFCVAVEGTVRTRPDDMVNPSMATGEIEVLASNIVILSRCEVLPFQIDEESNAGEDLRLKYRYLDLRSTAMQTRLRLRSEVAYAVREWMTANGFYEIETPTFIRSTPEGARDYLVPSRLYPGKFYALPQSPQLYKQLLMVSGFDKYFQIARCYRDEDARGDRQPEFTQIDIEMSFVGRDDILRVTEGMLVHRFQKNHWR

SEQ ID NO: 29493 - DNA, 672 bp, Unknown
  Obtained from environmental sample
  misc_feature (1)..(672): n is a, c, g, or t
atgaaaacaacagaaaaaacattccgtccttccgccgtaatctttgacatggacggccttatgttcgacactgaaaatctgaccatccccctatgggatgttgcaggtaaaccgtttggttataacatcacctatgacatcgttcttcgcatggttggtataagcgcagaaaaagcgcgtttggtcatgtatgaagaattcggcactgattttccctacgacacgattcgcgctgaatttagaaaacttgtacaagaagaagttgataaaaacggagtacccttaaaacccggtcttatgtacctgcttgaccatctttccgccgcaaagataccttttggcgttgcaacttcttcccgtaccgccacggcaactaatatgcttagcaaagccggtataatcgatcgttttgcggcaatcacctgcggcgaggaagtcacaaacggcaaacccgcaccagacattttccttcttgctgcaaaaaaattaggacagccccctagcacctgcgtcggttttgaagactctcccccgggtcttctaggactacacaccgccggaatacgctcaatctttataaaagaccttatcgaaccgcccccggaagtacttgccaccgtctggcaccgctgtaacgatttgacggaggctgcggcattattcggtctgtaa

SEQ ID NO: 29494 - protein, 223 aa, Unknown
  Obtained from environmental sample
  DOMAIN (10)...(196): haloacid dehalogenase-like hydrolase
  misc_feature (1)..(223): Xaa is any amino acid
MKTTEKTFRPSAVIFDMDGLMFDTENLTIPLWDVAGKPFGYNITYDIVLRMVGISAEKARLVMYEEFGTDFPYDTIRAEFRKLVQEEVDKNGVPLKPGLMYLLDHLSAAKIPFGVATSSRTATATNMLSKAGIIDRFAAITCGEEVTNGKPAPDIFLLAAKKLGQPPSTCVGFEDSPPGLLGLHTAGIRSIFIKDLIEPPPEVLATVWHRCNDLTEAAALFGL

SEQ ID NO: 29495 - DNA, 1038 bp, Unknown
  Obtained from environmental sample
  misc_feature (1)..(1038): n is a, c, g, or t
atggcaggtacaaacgtaaaaaacagaccgttgccgatagacaagtctttttttgaccgcgtaattgaaggaggttcatactatgtcgataagacgctgtttattagagaccttatagataaagacgcgacggccgtcctctgtacccgcccgcgccggttcggcaagacgctgaaccagacaatgctcaaatgtttttttgaggatacggcgccgattgacggcaaggatacacggaggctttttaatggattgaagataggggaagcaggagaacggtacatggagtatcaggggaagtatccggtgatatttttgagtttcaaagacgcaaaactagatagctttgatatgtcgtataatcgcttgaaagactacatcgccgaagaatttgagcggcacgcttacgctatggaaaaaatatccggtgaccgcaacttagagaggtttaaacgattatcaaccggtaccggttctataggtgattactctcacgcgctcagattcttgtgtgaatgcttggctaattaccacggcagaaaagtcgttattttaattgacgagtacgacgtcccgctggaaaattcttggtctcgcggtttttatcaggagatgattgatttcatccgaccgctacttagcagcgcgctcaaggacaacccgcacctgcaattggccgtgatgaccggatgtctgcgggtttccagagaaagcatattcacagggctaaacaatttggcggtagtatcaatcctcagcgatttttacagcgagtacttcggatttacacaaaacgaaatggacaccatgcttgaatactacggattagagagcaaaacacaaattatcaaggattggtacaacggttatctgtttggaaataccgtggtatacaatccattgagctccatctgcgtagttaatgcgtggacaaaaaacataaacagaaatccggaaccatattgggcaaacaccagcggtaacgatattgtccgcaaattggtagacaccgccaatgccgaaatgaaaacggattag

SEQ ID NO: 29496 - protein, 345 aa, Unknown
  Obtained from environmental sample
  DOMAIN (1)...(345): Protein of unknown function (DUF1703)
  misc_feature (1)..(345): Xaa is any amino acid
MAGTNVKNRPLPIDKSFFDRVIEGGSYYVDKTLFIRDLIDKDATAVLCTRPRRFGKTLNQTMLKCFFEDTAPIDGKDTRRLFNGLKIGEAGERYMEYQGKYPVIFLSFKDAKLDSFDMSYNRLKDYIAEEFERHAYAMEKISGDRNLERFKRLSTGTGSIGDYSHALRFLCECLANYHGRKVVILIDEYDVPLENSWSRGFYQEMIDFIRPLLSSALKDNPHLQLAVMTGCLRVSRESIFTGLNNLAVVSILSDFYSEYFGFTQNEMDTMLEYYGLESKTQIIKDWYNGYLFGNTVVYNPLSSICVVNAWTKNINRNPEPYWANTSGNDIVRKLVDTANAEMKTD

SEQ ID NO: 29497 - DNA, 837 bp, Unknown
  Obtained from environmental sample
  misc_feature (1)..(837): n is a, c, g, or t
atggcggatcgtttcaaccctcacgggcagaacaaaacgcccatcgggactgttaccgtaaaaaaaaatatcgtccaacgccgtatgtcggacagggtaatatgggacaggctgattagagaaacgcccgtatattccaatgacatgatccgcgtgggagataattccgagatcgaccttcatgtgggtgacaataagcttacgataaatgaaaatacgcttctccgcctcagccacgacaaagatacaggcgaatttcgcattgatcttacatcgggcagtatagggcttgttacgtctcccgaaggcggcggcgttgttttgaatatcatgggtaaacagatgaaggcgaatccgggaaccgcccttaacgccgtctcgggaaacgacggcgttgccctgcaagtcagcaaaggctcggctatcattgcggaagggggagaaacccgcgaaattggcgcgggaactgcggttacgatggacagcgaaggcgcaatccgctctgaacccgccgtgtttgttattcagcctaaacctaacgccctttaccgtaaaagcgccgatgagacgcttaatataattttttcatggaacagaatcaactttcagcctgacgaaaagctgcggcttgaaatagccgaagatcaatattttatccgttctgtccgtacccttaacgtctttaacgattcggcgcgggcagaccttcccgcaggtctttggaactggcggctgtcttataacggcgcgaccattgcttcgggacgtttcaccgtaacggatgctgaggggcttgaattggtaagccccgcgagaaaccggcagttttgtttatga

SEQ ID NO: 29498 - protein, 278 aa, Unknown
  Obtained from environmental sample
  misc_feature (1)..(278): Xaa is any amino acid
MADRFNPHGQNKTPIGTVTVKKNIVQRRMSDRVIWDRLIRETPVYSNDMIRVGDNSEIDLHVGDNKLTINENTLLRLSHDKDTGEFRIDLTSGSIGLVTSPEGGGVVLNIMGKQMKANPGTALNAVSGNDGVALQVSKGSAIIAEGGETREIGAGTAVTMDSEGAIRSEPAVFVIQPKPNALYRKSADETLNIIFSWNRINFQPDEKLRLEIAEDQYFIRSVRTLNVFNDSARADLPAGLWNWRLSYNGATIASGRFTVTDAEGLELVSPARNRQFCL

SEQ ID NO: 29499 - DNA, 594 bp, Unknown
  Obtained from environmental sample
  misc_feature (1)..(594): n is a, c, g, or t
gtgtatttccagtggtcgcaaatggaagatgtttcacattacatgcgggaagtggacgttacgcctgaattcagaaaccccattatcaaaaggcagataacggctgcgtccttttccgattcaagccttggggaaggaatctggtactggcgcgtaacgccagttttttctcaaaccaatgaaaatggcagtgccataggcggctttattccgcgcccgtccgcttttcgtatagttaaaaacgatgaaacgcaaactccgtctctcacttttaccgaagaacccgcgccggttcttgcgcccgctcccgcacctcctcctccgcctgcgcctgttcccgctccaacaccggctcccgctccaaggcccgcgcctccgccaaggcccgcgccaagacccgcgcccgcgccaaggccagctcctgctccgaggcccgctcccacgcctcctcctccgccgccaaagcgcgtaacgctggaatcgccgtccaatgagacaacactgccgggtttgaccgcccttcgccagcaaacggtattccgctggagcagcgatgaagcggtggcaaaagcgaaggttcgttctttcgcgtaa

SEQ ID NO: 29500 - protein, 197 aa, Unknown
  Obtained from environmental sample
  misc_feature (1)..(197): Xaa is any amino acid
MYFQWSQMEDVSHYMREVDVTPEFRNPIIKRQITAASFSDSSLGEGIWYWRVTPVFSQTNENGSAIGGFIPRPSAFRIVKNDETQTPSLTFTEEPAPVLAPAPAPPPPPAPVPAPTPAPAPRPAPPPRPAPRPAPAPRPAPAPRPAPTPPPPPPKRVTLESPSNETTLPGLTALRQQTVFRWSSDEAVAKAKVRSFA

SEQ ID NO: 29501 - DNA, 321 bp, Unknown
  Obtained from environmental sample
  misc_feature (1)..(321): n is a, c, g, or t
ttggacggcgattccagcgttacgcgctttggcggcggaggaggaggcgtgggagcgggcctcggagcaggagctggccttggcgcgggcgcgggtcttggcgcgggccttggcggaggcgcgggccttggagcgggagccggtgttggagcgggaacaggcgcaggcggaggaggaggtgcgggagcgggcgcaagaaccggcgcgggttcttcggtaaaagtgagagacggagtttgcgtttcatcgtttttaactatacgaaaagcggacgggcgcggaataaagccgcctatggcactgccattttcattggtttga

SEQ ID NO: 29502 - protein, 106 aa, Unknown
  Obtained from environmental sample
  misc_feature (1)..(106): Xaa is any amino acid
MDGDSSVTRFGGGGGGVGAGLGAGAGLGAGAGLGAGLGGGAGLGAGAGVGAGTGAGGGGGAGAGARTGAGSSVKVRDGVCVSSFLTIRKADGRGIKPPMALPFSLV

SEQ ID NO: 29503 - DNA, 642 bp, Unknown
  Obtained from environmental sample
  misc_feature (1)..(642): n is a, c, g, or t
ttgtttcaggcgctgctgttacgcacaaaggggatacgctttgtcaaattctggcgcggcatttttatactgccgtgggcggttcccggcattgtgtccatgatgatattccgcgttatgttcaatcaggaaggcgcgcttaaccagataatgcttgagtcgggcctgataaagaccgcgattcccttcctgtcggatccgacatgggcaaaggtggcgctgtttattgtcaatatatggcttgctttcccgtattttatggcgcttatctcgggtattatgacaacggttcccgatgaactgtacgaagcggcgcagatcgacggcgcgaacacaattcagcaattcagatcgataacgctgccgtttgtgctagcttcgacggcccctcaaattcttatgagccttacttttaattttaacaactttaacctaatctatttcctgacaggcggcgggccgcccagttctacgcttcaaatggctggctctacggacattttaatctcatggattttcaagcttactctggatcagcgtatgtacaattacgcggcggccatgagcatctttatttttgtgattgtcgcctcggtttcaggctggaatcttatgcgtacccgcgcttttaaggaggattaa

SEQ ID NO: 29504 - protein, 213 aa, Unknown
  Obtained from environmental sample
  misc_feature (1)..(213): Xaa is any amino acid
MFQALLLRTKGIRFVKFWRGIFILPWAVPGIVSMMIFRVMFNQEGALNQIMLESGLIKTAIPFLSDPTWAKVALFIVNIWLAFPYFMALISGIMTTVPDELYEAAQIDGANTIQQFRSITLPFVLASTAPQILMSLTFNFNNFNLIYFLTGGGPPSSTLQMAGSTDILISWIFKLTLDQRMYNYAAAMSIFIFVIVASVSGWNLMRTRAFKED

SEQ ID NO: 29505 - DNA, 1074 bp, Unknown
  Obtained from environmental sample
  misc_feature (1)..(1074): n is a, c, g, or t
atgccaaaatggttaagtaacgcggttttttacgagatttatccccaatcgttttacgattcgaacggcgacggaattggcgacattcaggggataatacataagcttgattatgttaaggagcttggctgcaacgcgctttggctcaatccctgttttgactcgccttttaaagacgctggttacgacgtgcgggattacaaaaaagtcgcgcctcggtacggcacaaacgaagaccttttcaggctttttgacgaagcgcacaaaaaaggtatacgggtactgcttgatttggttcccggacacacctccgaagaacacgaatggtttatagaaagcaaaaaaattgcgcctaacgatgagatgaaaaaccgctacatttggacggataactgggttttttgggggttggaaggcattaaatttatcgcgggtgaagctgaaagagacggctgttacattacaaattttttcaagtgccagcctgcccttaattacggctttcataaacacagcgaaaaatggcagcttcctccgaatcatccagactgtattgccacgcgcgaggcccttaaagacataatgcggttttggctgcgcggagacggtcggggctgcgacggtttccgcgtggacatggccgattcccttgttaaatttgacgataccgaaagaagcgccacaagcgcaatttggcggaatatccgtaaaatgctggacagcgaatttcctgacgcggcaatggtgtccgaatgggggtcgcccggcctgtcgcttaaagcgggttttcacatggactttctccttgatcacccaaacagcggttaccgttcactggttcgcgattacgaggatgacaagaagaacaacagctattttaagaaaaagggcggcggcgacatcaagcgctttcttaaacagtatctgccctggtacaaatcttccaaaaaaaacggctatatcagcataattaccggcaaccacgatactccgcgcataagccgcaacatggatacccgcgagcttgcccttgcgtatgcggtaatttttaccatgccgctcgtgccgatctga

SEQ ID NO: 29506 - protein, 357 aa, Unknown
  Obtained from environmental sample
  DOMAIN (12)...(357): Alpha amylase, catalytic domain
  misc_feature (1)..(357): Xaa is any amino acid
MPKWLSNAVFYEIYPQSFYDSNGDGIGDIQGIIHKLDYVKELGCNALWLNPCFDSPFKDAGYDVRDYKKVAPRYGTNEDLFRLFDEAHKKGIRVLLDLVPGHTSEEHEWFIESKKIAPNDEMKNRYIWTDNWVFWGLEGIKFIAGEAERDGCYITNFFKCQPALNYGFHKHSEKWQLPPNHPDCIATREALKDIMRFWLRGDGRGCDGFRVDMADSLVKFDDTERSATSAIWRNIRKMLDSEFPDAAMVSEWGSPGLSLKAGFHMDFLLDHPNSGYRSLVRDYEDDKKNNSYFKKKGGGDIKRFLKQYLPWYKSSKKNGYISIITGNHDTPRISRNMDTRELALAYAVIFTMPLVPI

SEQ ID NO: 29507 - DNA, 378 bp, Unknown
  Obtained from environmental sample
  misc_feature (1)..(378): n is a, c, g, or t
atgcctatgactttttttgagtttttagcaaaatttcctaccgaaatagcagtaattgactacttctataatgcccgcttccataataacctgacttgcccccattgcggagcccaagtaaaagtatatagggacaaaaaaagggtaaaggtttgccattgccgctgttgtgacaattcattttcgcccttttcaaatactatttttaacaaatccagaaccgatatgcgtaaatggttttatacgattcaccttattttaaacgccaaaaagaaggtttcaggttgccaactacagcgagaacttggcgttacctacaaaactgcatggcgaatgctcaggttaattcgcaaggcgatgagcaatgatgaaatgtga

SEQ ID NO: 29508 - protein, 125 aa, Unknown
  Obtained from environmental sample
  misc_feature (1)..(125): Xaa is any amino acid
MPMTFFEFLAKFPTEIAVIDYFYNARFHNNLTCPHCGAQVKVYRDKKRVKVCHCRCCDNSFSPFSNTIFNKSRTDMRKWFYTIHLILNAKKKVSGCQLQRELGVTYKTAWRMLRLIRKAMSNDEM

SEQ ID NO: 29509 - DNA, 381 bp, Unknown
  Obtained from environmental sample
  misc_feature (1)..(381): n is a, c, g, or t
atggatggatcaaaaagctatcttgctagtactatttcaactaataaaattaatttcagttttccttatgatggaggctctagctttaatttaattgttagaaataagaaaaaacaaaatgaagtacttttaaaagtatctaaagggcaattcggcggtacaaaaacttgtcgcgtaaaatttgatgatgatcctcctgttttttacgattacgaaggtacaactgattacagcagtgatgttatctttttcaacaatccaaaaaaatttattaccggtctgaaaaaagctaaaaaactaatgataggatgtacattttttcaagagggagtaagaataatagagtttgatgatgtacagggtttggaatgggataggtag

SEQ ID NO: 29510 - protein, 126 aa, Unknown
  Obtained from environmental sample
  misc_feature (1)..(126): Xaa is any amino acid
MDGSKSYLASTISTNKINFSFPYDGGSSFNLIVRNKKKQNEVLLKVSKGQFGGTKTCRVKFDDDPPVFYDYEGTTDYSSDVIFFNNPKKFITGLKKAKKLMIGCTFFQEGVRIIEFDDVQGLEWDR

SEQ ID NO: 29511 - DNA, 918 bp, Unknown
  Obtained from environmental sample
  misc_feature (1)..(918): n is a, c, g, or t
ttgaggaataatatgcaattagaaggtcaaacaagaataccgtccggctgtgccatatctggggttataaacaagtccagaaagcgcatgagcggcgaggctattataaaatccattgcagttatgcacgatcgctcaaatggtttgggtggcgggtttgcggcttatggaatttatccagaatacaaaaactattatgccttgcacatgttttacgattccattctcgcaaaaaaggaatgcgaggaatttttggaaaggcattttgatattatcaacctttcaaagataccaactagaaaaattaaggaaattaccgatgagccgcttatttggcgttattttgtggcacccctgcacaccaaacttgagagtagccagttagatgaacgcgaatttaccagcaaatgcgtatttcgcataaataccaaaataaatggtgcctatgtgttttcaagcggcaaaaatatgggtgtattcaaagcggttggctttccagaagatgtgggtcgtttttaccgcttggaagaatacagtggctggtgtttcacggcgcacgggcgttatccaaccaataccccaggctggtggggcggtgcgcatccatttaccttattggattattctgtggtgcacaatggcgaaatatcctcttacgatgcaaatcgcagagctattgaaatgtatggctacaaatgcacgcttcaaacagataccgaggttatcacttacataatagattatttgcacagaaaaaaagggctttcgctcaaagaaatagcttctgttatagcggctcccttttggcaaaccatagatagaatgacccctgaagaaaaagaaactcacgaatatttgcgcataaaattttcttcacacgcttatcaatggtcctttttcaattctcgagggttttga

SEQ ID NO: 29512 - protein, 305 aa, Unknown
  Obtained from environmental sample
  misc_feature (1)..(305): Xaa is any amino acid
MRNNMQLEGQTRIPSGCAISGVINKSRKRMSGEAIIKSIAVMHDRSNGLGGGFAAYGIYPEYKNYYALHMFYDSILAKKECEEFLERHFDIINLSKIPTRKIKEITDEPLIWRYFVAPLHTKLESSQLDEREFTSKCVFRINTKINGAYVFSSGKNMGVFKAVGFPEDVGRFYRLEEYSGWCFTAHGRYPTNTPGWWGGAHPFTLLDYSVVHNGEISSYDANRRAIEMYGYKCTLQTDTEVITYIIDYLHRKKGLSLKEIASVIAAPFWQTIDRMTPEEKETHEYLRIKFSSHAYQWSFFNSRGF

SEQ ID NO: 29513 - DNA, 915 bp, Unknown
  Obtained from environmental sample
  misc_feature (1)..(915): n is a, c, g, or t
atgcgcccggccggggggagtcccgcccagantaggagccccgccgaatccgctgatgcgcctttttatggcggtggagctgttcccaaaacgatcaatctgcagcgtcgcccccacaaacgcgtcaatcgcgtacaatcccgcgatatgcgccgcgcagcggttggagcgcatatntccgtcgggaccgatcgcgaatacgtcggggcgcgccctcgtgtagtcctccatgccgggctcgccgccaaaggcgtagacgcggcgcgcgatgccggtctcgatagcggggatgagcgtggggtgcgggttcagtacccaatcggtgcaggcgcggccttcgatgcccagttctttgccgtaggtcggcagcaggagttccacggcagccgtcgggaagccgagcccgtgattcagcgacgcgacgctgtattcgtcgtagatgcccttgatcgtcatcatggccatcagaacctgctgatcgctgacgcgcgccggatcgcgcgtaaagagcgcctgcatccagaagtcttcgcccgtttcgataacgtaatcgacccagccgcccgggatgtcaacgcgcggcagcgcggaactgcgttttttgacctgcgcgaccaccagccccgaagagaaatgcgtcgcctcggcgatggtgggcgtgtcctcggtggtaaagccggtgtacaaattgccgtcggcatcggcttcttcggcgacgaccagcgcgacgtttgggaagagatcaaggaagtagcgcccgtaaatttcgagataggtgtggatcgcgccgatctttgccttgcgcgagacgacgagttcgtagagctccttcatctgcggcccggagaacgcgaaatccaggttgctcgctatgcccttctcaaaaacctgaatatgctcgggcagcacgattga

SEQ ID NO: 29514 - protein, 304 aa, Unknown
  Obtained from environmental sample
  misc_feature (1)..(304): Xaa is any amino acid
MRPAGGSPAQXRSPAESADAPFYGGGAVPKTINLQRRPHKRVNRVQSRDMRRAAVGAHXSVGTDREYVGARPRVVLHAGLAAKGVDAARDAGLDSGDERGVRVQYPIGAGAAFDAQFFAVGRQQEFHGSRREAEPVIQRRDAVFVVDALDRHHGHQNLLIADARRIARKERLHPEVFARFDNVIDPAARDVNARQRGTAFFDLRDHQPRREMRRLGDGGRVLGGKAGVQIAVGIGFFGDDQRDVWEEIKEVAPVNFEIGVDRADLCLARDDEFVELLHLRPGEREIQVARYALLKNLNMLGQHD

SEQ ID NO: 29515 - DNA, 765 bp, Unknown
  Obtained from environmental sample
  misc_feature (1)..(765): n is a, c, g, or t
atggcggcctgtaattccgaaagcgatccggtgaccggcaatactgccactttgggccaggttgtatatacaggcaagcacagcagcaatgaccttacgcttaccataaccgagcaaaaaattggcaaagctgcctatgcccccaaaattaatgattcctatacgctggctgtcggcaagaatcttagcagcggcacggttacgcttatagagaccaatgatactgccataaagtatacacttaaagcttcaaaagacggcagtacctttaccgttactgtagccataagcaacaacaagatcaccaacgtaagcggaaccgtagcttttgatggcgaaggaacctggaaagggcctggcaacgtcaacaacggaaccggcggcggaggcggcggcggcggtggaggaggtggcagcgggggcgggggaagctccggtagcagcggaagcgggataacgtcaacgggaaacaatcttatcgtaatggatacggttacggtaaattcaaacctggcgagtataagccaagacaaaacgctgacgttcaataacctgccagcaaaggatatgcctgtagcaggcgatattatttgctctgcgccctcaaaggctgccccgtatggttttctttataaagtaaaaacggttaccacaagcggcgggaaaactgtgattgctaccgaaatggcaaccatagaagaagctgtaaatgaagcggaagttaacagtctattgatctgggatttgcagagagcgagcaaatag

SEQ ID NO: 29516 - protein, 254 aa, Unknown
  Obtained from environmental sample
  misc_feature (1)..(254): Xaa is any amino acid
MAACNSESDPVTGNTATLGQVVYTGKHSSNDLTLTITEQKIGKAAYAPKINDSYTLAVGKNLSSGTVTLIETNDTAIKYTLKASKDGSTFTVTVAISNNKITNVSGTVAFDGEGTWKGPGNVNNGTGGGGGGGGGGGGSGGGGSSGSSGSGITSTGNNLIVMDTVTVNSNLASISQDKTLTFNNLPAKDMPVAGDIICSAPSKAAPYGFLYKVKTVTTSGGKTVIATEMATIEEAVNEAEVNSLLIWDLQRASK

SEQ ID NO: 29517 - DNA, 390 bp, Unknown
  Obtained from environmental sample
  misc_feature (1)..(390): n is a, c, g, or t
ttgaacgtcagcgttttgtcttggcttatactcgccaggtttgaatttaccgtaaccgtatccattacgataagattgtttcccgttgacgttatcccgcttccgctgctaccggagcttcccccgcccccgctgccacctcctccaccgccgccgccgcctccgccgccggttccgttgttgacgttgccaggccctttccaggttccttcgccatcaaaagctacggttccgcttacgttggtgatcttgttgttgcttatggctacagtaacggtaaaggtactgccgtcttttgaagctttaagtgtatactttatggcagtatcattggtctctataagcgtaaccgtgccgctgctaagattcttgccgacagccagcgtatag

SEQ ID NO: 29518 - protein, 129 aa, Unknown
  Obtained from environmental sample
  misc_feature (1)..(129): Xaa is any amino acid
MNVSVLSWLILARFEFTVTVSITIRLFPVDVIPLPLLPELPPPPLPPPPPPPPPPPPVPLLTLPGPFQVPSPSKATVPLTLVILLLLMATVTVKVLPSFEALSVYFMAVSLVSISVTVPLLRFLPTASV

SEQ ID NO: 29519 - DNA, 807 bp, Unknown
  Obtained from environmental sample
  misc_feature (1)..(807): n is a, c, g, or t
atgaagaaaatgcccgttttctcaatattttatctcgttttggctgtgtccgcttcggctcaggagaacgggaattatattgtctcgcgggtttcggcggaagccagaaataaccttattaggcttacatgggttgattctcctgacgcgcgggggccggtctatatattccgctcctcaaggcctttttccggctcggttccggctaaccttaggcctgtaaccgtcaagtacggggaacagtactatatcgacgattccgatgacttggaaaccatctattattttgtcgccgcaagcgatatttccgggcggcgctacgatgtaattattcccagagtaaacagtactaatgtaaatatttccgggacgatgcctgaggaagatactgttctaaaggagcaggtaacttctcccattcaagggatttctaatttagcggcaaggctggacggggagaggatattgatcaccttcgacgtgaacggcccgcgtaaaaacgccgttctttaccgcagcactcagcctgtcagggagcctcatgatttattgaacgccgttatggtgcaatccgggcttaggtccccgtttattgattatcctgttcccggtctttcttattattacgcgcttgtttatgaagatgatatatcaggcggcagcctgaaaatttcccccggcattaacgcgacaatctcagccgtaaccgtatacggcggcggtatgacggaaagggcgctacgccctataccgcttcccgccatgacattgaacaacgctttgccgggacggctatttcctgcctga

SEQ ID NO: 29520 - protein, 268 aa, Unknown
  Obtained from environmental sample
  SIGNAL (1)...(20)
  misc_feature (1)..(268): Xaa is any amino acid
MKKMPVFSIFYLVLAVSASAQENGNYIVSRVSAEARNNLIRLTWVDSPDARGPVYIFRSSRPFSGSVPANLRPVTVKYGEQYYIDDSDDLETIYYFVAASDISGRRYDVIIPRVNSTNVNISGTMPEEDTVLKEQVTSPIQGISNLAARLDGERILITFDVNGPRKNAVLYRSTQPVREPHDLLNAVMVQSGLRSPFIDYPVPGLSYYYALVYEDDISGGSLKISPGINATISAVTVYGGGMTERALRPIPLPAMTLNNALPGRLFPA

SEQ ID NO: 29521 - DNA, 915 bp, Unknown
  Obtained from environmental sample
  misc_feature (1)..(915): n is a, c, g, or t
ttgatggacgaattatttaacgaaaaaaacaaatcttccgccagccctcttgctgacagaatgcgtccgcgcactctggaagacattataggccaggatcatatcgtgggccagggaagattactgcgccgcgccattcaagccgaccgtctttcttcaattattctatacggtccgccggggacggggaaaacgtcccttgccgcggttatcgccaatacaacccgcgccgcttttgaaaaattaaacgccgttctttccggcgttaaagacatccgcgaagtaatagaccgttctgacgaccgtttcaggctttacggtaaaagaaccatcctgtttgtagacgaagtccaccgttggaataaggcccaacaggacgcgcttcttccctgggtggaaaacggcaccgtaatactcatcggcgcgacgactgaaaatcccttttttgaggtaaaccgcgcccttgtcagcagaagcagaattttccaactaaaacccatgggacagcctgaattgcttgaaacggcgaggcggacgcttacggacaaagaacgcggttacggaaaatggaatatcagttttgaagaaggcgctttggaacacattgttgaagtcgccggcggggacgcaagaagccttcttaacgcgatagagcttgcggtggaaacaagcgttaccccctggccgcccaaggaagggacggagattcacatttccatggaagcggcggaagaaagcatacaaagacgcgcccttctctacgaccgtgacggggactatcattttgacaccatcagcgcgtttattaaaagncgtaaggggcccagtgatcccagacgcggcttnntatanctggcttgcgaannanatggtancgtgccggagannagacccaaannattacctcggccataa

SEQ ID NO: 29522 - protein, 304 aa, Unknown
  Obtained from environmental sample
  DOMAIN (53)...(223): ATPase family associated with various cellular activities (AAA)
  misc_feature (1)..(304): Xaa is any amino acid
MMDELFNEKNKSSASPLADRMRPRTLEDIIGQDHIVGQGRLLRRAIQADRLSSIILYGPPGTGKTSLAAVIANTTRAAFEKLNAVLSGVKDIREVIDRSDDRFRLYGKRTILFVDEVHRWNKAQQDALLPWVENGTVILIGATTENPFFEVNRALVSRSRIFQLKPMGQPELLETARRTLTDKERGYGKWNISFEEGALEHIVEVAGGDARSLLNAIELAVETSVTPWPPKEGTEIHISMEAAEESIQRRALLYDRDGDYHFDTISAFIKXRKGPSDPRRGXXXLACEXXGXVPEXRPKXLPRP

SEQ ID NO: 29523 - DNA, 582 bp, Unknown
  Obtained from environmental sample
  misc_feature (1)..(582): n is a, c, g, or t
gtgatggtaatactcacctttatactgcctacgccaattatgctcatcccccgtacaatgatggctgtatccgtcagggaagtcttcggttttcaaatgatagggacggtttatccgcaattactgatggcgataacggggcaggggatttattccgcgattcttgtcttgatattttataattttataaggcttatcccccgcgccctggatgaagccgccgccatagacggggccaatccgatacagattttttaccatgttatattgaaattaagcctcagtacgatattgattgtttttcttttttcttttgtatggaactggaacgaaacctatatcaccaatacgtttgtgagggggcagcttcccctgctgccgacccggcttgccatgttcgacagcatatttgaaaattacgcgtcctcaagcggaggtctggatcagggacaacagcgcgtaaacgaagcgtacaaaatgtcggctaccctaatatcaatactgcccctgttaatactgtatatggtagtgcaaaaacagctaatcaagggcattgaaagcgcgggattaacgggagagtaa

SEQ ID NO: 29524 - protein, 193 aa, Unknown
  Obtained from environmental sample
  misc_feature (1)..(193): Xaa is any amino acid
MMVILTFILPTPIMLIPRTMMAVSVREVFGFQMIGTVYPQLLMAITGQGIYSAILVLIFYNFIRLIPRALDEAAAIDGANPIQIFYHVILKLSLSTILIVFLFSFVWNWNETYITNTFVRGQLPLLPTRLAMFDSIFENYASSSGGLDQGQQRVNEAYKMSATLISILPLLILYMVVQKQLIKGIESAGLTGE

SEQ ID NO: 29525 - DNA, 423 bp, Unknown
  Obtained from environmental sample
  misc_feature (1)..(423): n is a, c, g, or t
atgaagttgatgggcatcgattacggacgccgccgtatcggaatcgccgtgtcggacgatgatggaacgctggcgcggagcatcggtatagtagacagaaagtcgcaccctaattatattgacgaattgacaaaaatcatctcccaagagaatcccgccgcgatagtattcggcctcccccttagcgtagacgacgaagagaccgccatgagtagagaagtacgcgaattcgcaacattaatagagcaacgcgtcaaactaccgattcattttgtagacgagagtttcacctcaaaaaaagcggcggaattgatgatgtatcgtaagaagaaatcgcgtagagacaaatcattatcagatcgaatagcctcttgcttgattctacaagaatatatagaaacgtcaaaacattgtctgaactag

SEQ ID NO: 29526 - protein, 140 aa, Unknown
  Obtained from environmental sample
  DOMAIN (1)...(134): Uncharacterised protein family (UPF0081)
  misc_feature (1)..(140): Xaa is any amino acid
MKLMGIDYGRRRIGIAVSDDDGTLARSIGIVDRKSHPNYIDELTKIISQENPAAIVFGLPLSVDDEETAMSREVREFATLIEQRVKLPIHFVDESFTSKKAAELMMYRKKKSRRDKSLSDRIASCLILQEYIETSKHCLN

SEQ ID NO: 29527 - DNA, 576 bp, Unknown
  Obtained from environmental sample
  misc_feature (1)..(576): n is a, c, g, or t
atggaacagcaggcacagcaggtgacggacgacggtcagttgttcgacaagtggctcgggggcgaccccaaggggttctccgagctgtatgggaggtatagcggccgcgtcttcggttttttgttgcgcatgacgggtgatcgcgaggtcgccgaggacatgctgcaggagacgtttttggcggctgtgcgcaatgtcggccaatttgaccgttcccggagctttttgagttggctattcgggatagcccacaagcggactatcgactactaccgtcacgccaaggtcgaggccgaccacgtggacgatacggaggggtcggtcgggagcaagcttgattcgccggaggagagcctgtcgaacaagcgtcttcgcaagatcgtgggcgaggcggtgcagcggcttgagccgtcgcaacgggaagtgttcatgcttagggagcttggcggggtgccttttaaggagatcgccgagatgatgggatgccccataaatacggcgctagggcgtatgcgtctggcgctgataaatatgcgcaaagaactgaaaaaaagggggatcaatggattgcaataa

SEQ ID NO: 29528 - protein, 191 aa, Unknown
  Obtained from environmental sample
  DOMAIN (131)...(180): Sigma-70, region 4
  misc_feature (1)..(191): Xaa is any amino acid
MEQQAQQVTDDGQLFDKWLGGDPKGFSELYGRYSGRVFGFLLRMTGDREVAEDMLQETFLAAVRNVGQFDRSRSFLSWLFGIAHKRTIDYYRHAKVEADHVDDTEGSVGSKLDSPEESLSNKRLRKIVGEAVQRLEPSQREVFMLRELGGVPFKEIAEMMGCPINTALGRMRLALINMRKELKKRGINGLQ

SEQ ID NO: 29529 - DNA, 477 bp, Unknown
  Obtained from environmental sample
  misc_feature (1)..(477): n is a, c, g, or t
atggcgagtcatcgccgggttctggttgttgacgatatgcctaccaatctggaagtagtcagtggcgtgatgagagcatacggaataactgtggactacgccaattcaggccagaaagcggttgacgccgttaaaagcgggaaagtaaaatacaacgcgatttttatggattacatgatgccggaaatggacggtcttgaagctacgcgtatcatacggaacaagatagggactgaatatgcaaggacagtaccgattattgctttcactgcagatgcggctgccggcagcgccgatatatttatgcaaaacggttttcagggctttatttccaagcctgtaaacatgaaggaactgaattcggttatcaatacctttgttcgtgataaagaatatgaagagaaggaaagaagaacaaaggtgttacgcagcgacagcgaaaaagcatacgacagttttcttactattcccgcttag

SEQ ID NO: 29530 - protein, 158 aa, Unknown
  Obtained from environmental sample
  DOMAIN (5)...(124): Response regulator receiver domain
  misc_feature (1)..(158): Xaa is any amino acid
MASHRRVLVVDDMPTNLEVVSGVMRAYGITVDYANSGQKAVDAVKSGKVKYNAIFMDYMMPEMDGLEATRIIRNKIGTEYARTVPIIAFTADAAAGSADIFMQNGFQGFISKPVNMKELNSVINTFVRDKEYEEKERRTKVLRSDSEKAYDSFLTIPA

SEQ ID NO: 29531 - DNA, 891 bp, Unknown
  Obtained from environmental sample
  misc_feature (1)..(891): n is a, c, g, or t
gtggtaggccagaaagcggcggtggaagctgtagcggacgcgataaggcgcaacaaggccgggctttcggacgctagcagaccgctgggctcttttctctttttggggcctaccggtgtagggaaaaccgagcttgccaaaaccctggcggactttctctttaacgacgaaaaggccctcacaagaatcgacatgagcgagtacggggagaaacattcagtcagccgtctgattggtgcgcctccgggctacgttggctatgagcagggcggtcagttgaccgaagccgtgcgccgccggccctacagcgtcattctttttgacgagatcgaaaaagcccacccagaggtcttcaacgtctttctccaaatactggacgacggccggctcaccgacgggcaaggccgcgttgttgattttaaaaatgtcatcataataatgaccagtaatttggggtccgatctaatccttgagacaaaaaaactggacgcgataaaagacgcgctaatggagcttcttaaacaaagcttccgtccggaatttctgaatcgaattgacgagactgtgatctttaaccggcttggcaagggggagatcgccaaaatcgtggacatccagctcgcgctgctaagctcccgcctggccgaacgcaaggtggagctaaaacttaccaaagcggcaaaggaactccttgccgagcgcggttacgatccgcttttcggggcaaggcccctcaagcgcgccattcaggccgacctggaaaatcctctggcaaaggcaatcatctccggaaagataaaggaaggagacacggtaaccgccgacataaattcagaaacgggaggcgaggcgctctcgttcaaaaaaagcgcctcttctaagcgggaatag

SEQ ID NO: 29532 - protein, 296 aa, Unknown
  Obtained from environmental sample
  DOMAIN (31)...(232): ATPase family associated with various cellular activities (AAA)
  misc_feature (1)..(296): Xaa is any amino acid
MVGQKAAVEAVADAIRRNKAGLSDASRPLGSFLFLGPTGVGKTELAKTLADFLFNDEKALTRIDMSEYGEKHSVSRLIGAPPGYVGYEQGGQLTEAVRRRPYSVILFDEIEKAHPEVFNVFLQILDDGRLTDGQGRVVDFKNVIIIMTSNLGSDLILETKKLDAIKDALMELLKQSFRPEFLNRIDETVIFNRLGKGEIAKIVDIQLALLSSRLAERKVELKLTKAAKELLAERGYDPLFGARPLKRAIQADLENPLAKAIISGKIKEGDTVTADINSETGGEALSFKKSASSKRE

SEQ ID NO: 29533 - DNA, 516 bp, Unknown
  Obtained from environmental sample
  misc_feature (1)..(516): n is a, c, g, or t
atgtgcttgcggtactcgtccagggtagtagccccgatgcagcggagttccccgcgcgaaagggccggttttaaaaggttactggcgtcggtcgcgccctcggcggcccccgctccaaccagagtgtgcagttcgtcaataaagagaattattccgccctcggaagcctggacttcgtggatgacggccttcaggcgctcttcgaattcgccccgaaacttggcccccgcgattaaagcgcccaaatccagggcaaggagcttctttccttttagcccctctgggacatcccctgccacaatccgccgggccaggccttccactatggctgtcttgccgacgccgggttcgccaatcagcaccgggttgttcttggtgcgccgggacaaaacctgcatacagcggcgtatctcctcgtcccggcctataaccgggtcgagcttttcctgcctggcaagggcggtaaggtcgcggcaatacttgtccagaaccttgtatttttcctcggggttttga

SEQ ID NO: 29534 - protein, 171 aa, Unknown
  Obtained from environmental sample
  misc_feature (1)..(171): Xaa is any amino acid
MCLRYSSRVVAPMQRSSPRERAGFKRLLASVAPSAAPAPTRVCSSSIKRIIPPSEAWTSWMTAFRRSSNSPRNLAPAIKAPKSRARSFFPFSPSGTSPATIRRARPSTMAVLPTPGSPISTGLFLVRRDKTCIQRRISSSRPITGSSFSCLARAVRSRQYLSRTLYFSSGF

SEQ ID NO: 29535 - DNA, 369 bp, Unknown
  Obtained from environmental sample
  misc_feature (1)..(369): n is a, c, g, or t
ttgaagcagttttcgctcaagcttgtccagctcggtggggcggctgtccagttccattttgaggcggctggcagcttcgtccacaagatcaatagccttgtcgggaaggaagcggcttgtgatatagcggttggaaagcatggcagccgccaccagcgcctcgtccttgatcctaacgccgtggtgaacctcgtagcgttcctgaagtccgcgcagtatcgcgattgtgtcctcgacggaaggttccgccgtgtagatttgctggaaacgccgctcaagggcagcgtccttttcgatgtgcttgcggtactcgtccagggtagtagccccgatgcagcggagttccccgcgcgaaagggccggttttaa

SEQ ID NO: 29536 - protein, 122 aa, Unknown
  Obtained from environmental sample
  misc_feature (1)..(122): Xaa is any amino acid
MKQFSLKLVQLGGAAVQFHFEAAGSFVHKINSLVGKEAACDIAVGKHGSRHQRLVLDPNAVVNLVAFLKSAQYRDCVLDGRFRRVDLLETPLKGSVLFDVLAVLVQGSSPDAAEFPARKGRF

SEQ ID NO: 29537 - DNA, 324 bp, Unknown
  Obtained from environmental sample
  misc_feature (1)..(324): n is a, c, g, or t
gtgctcgcgggtctgcggcatggggccgtcggcggcgctgacgacgaggatagccccgtccatctgggcggcgcccgtgatcatgtttttgacgtagtcggcgtggcccggacagtcgacgtgcgcgtagtggcggttagccgtcgagtactcgacgtgcgacgtggcgatggtgaggatcttcgtggggtcgcgccttccctgcgactccgatgccttcgcgacctcgtcgtaggcgacgtacttggagagccccttggtcgacatgacgcgcgtgatggctgccgtcagggtggtctttccgtggtcaagcgtgtccgatag

SEQ ID NO: 29538 - protein, 107 aa, Unknown
  Obtained from environmental sample
  misc_feature (1)..(107): Xaa is any amino acid
MLAGLRHGAVGGADDEDSPVHLGGARDHVFDVVGVARTVDVRVVAVSRRVLDVRRGDGEDLRGVAPSLRLRCLRDLVVGDVLGEPLGRHDARDGCRQGGLSVVKRVR

SEQ ID NO: 29539 - DNA, 522 bp, Unknown
  Obtained from environmental sample
  misc_feature (1)..(522): n is a, c, g, or t
gtggattttaacgcccaggttacccgcatcagagccgtaaaccccgatgtggtttacctgcccaattattacaacgacgtatcgctccaggcaaaacagcttcgggcccaggggatagactgtgcccttgtcggcggcgacggttgggacagcctcactgacaatgcgggagacgagatgcttaacagtttctggtcttcgggatttgccgcggatacaacagaccccaaaggcgtggcttttgtcagagctttccaggccaagtataaccgggaagcttcacagtttgccgcgcttggctacgatacgatgatgctcgttatcgacggtattaaagctgccggatcttttgatcctactgctgtcaaaaatgccatggcaaaactcagcggttcgtacgttaccgggaatatccgttttgactctgaccgcaaccccataaagggcgcggcgattctggaaatagtcaagcagggcggcaagctcgtcaacgtatataaggcaacggtaaatccgaagtaa

SEQ ID NO: 29540 - protein, 173 aa, Unknown
  Obtained from environmental sample
  misc_feature (1)..(173): Xaa is any amino acid
MDFNAQVTRIRAVNPDVVYLPNYYNDVSLQAKQLRAQGIDCALVGGDGWDSLTDNAGDEMLNSFWSSGFAADTTDPKGVAFVRAFQAKYNREASQFAALGYDTMMLVIDGIKAAGSFDPTAVKNAMAKLSGSYVTGNIRFDSDRNPIKGAAILEIVKQGGKLVNVYKATVNPK

SEQ ID NO: 29541 - DNA, 1212 bp, Unknown
  Obtained from environmental sample
  misc_feature (1)..(1212): n is a, c, g, or t
atggagagggctgccgtttttccttggaaacaagcaaaaccaatttatcctatcgtgagtatcggagaatttgtccgtgaaggaatgttgattggcagagcgtccggggcggggaccgccaacgctcacgccactattcccggcagaattattaaaaaagtctcatgggaggacagaaataatattgttaacgacgcttttgtaatcaaattggaaggcgcgtttgaaaaattaggaaaaaaagaagaagtttattcatggaacggcttaaacggttatgatttacagaggataatttccgattacggaattgtggaaatgtacaatgacgaaagaccgctttccgatattatttccgccgctagaaagaaagataaattgacgcttgtaatccgttgtgtttttgacgatccctggcttgccgccgattatgttctttgccgcgacagattaaacgccgttatagaaggagccgctatcgtggcgaatgcgtgttttaaggtagcgcagattatttttgccgtttcacaccatgaaaaagatttaggagaacagcttttatccgccgctgagaatataaatattccatcttcgcttgttttaaccggctcccgttatcctcagagaaacagcagggaattggagcttgccctgcgtatatatgaaaaaagagaaaacgccgatttaggttcccttttaattctgggtcccgccgttcttgccgcggttaatgacgcggtagtgcttagaaaacctattcttgaccgctatgtcgccgtcggcggttcggctgttaaaaaaccgcagataatgaagatcagaattgggacaagaatcggcgaagttattgagcagtgcggaggctttattgaacatcctgaaagaattttaacaggttctcctctttcgggcagggaagtcaggtaccttgacgaacctgtcggcaagtcatgttacgccattgtcgccatggcaaagtcgcaggcctcaattcacgcccagcagaattgcattaactgcggcgagtgcagggcggtttgccccattggccttgatccccagaatatttacaaacgaattaaatcgcaggaaaatatcaacattgaagcgacaggctgccacgggtgcggatgctgtaaaatagtctgcccttccgccctgccgttagtggaaactattttaaaatacaatcaggaggggataagtgcctga

SEQ ID NO: 29542 - protein, 403 aa, Unknown
  Obtained from environmental sample
  misc_feature (1)..(403): Xaa is any amino acid
MERAAVFPWKQAKPIYPIVSIGEFVREGMLIGRASGAGTANAHATIPGRIIKKVSWEDRNNIVNDAFVIKLEGAFEKLGKKEEVYSWNGLNGYDLQRIISDYGIVEMYNDERPLSDIISAARKKDKLTLVIRCVFDDPWLAADYVLCRDRLNAVIEGAAIVANACFKVAQIIFAVSHHEKDLGEQLLSAAENINIPSSLVLTGSRYPQRNSRELELALRIYEKRENADLGSLLILGPAVLAAVNDAVVLRKPILDRYVAVGGSAVKKPQIMKIRIGTRIGEVIEQCGGFIEHPERILTGSPLSGREVRYLDEPVGKSCYAIVAMAKSQASIHAQQNCINCGECRAVCPIGLDPQNIYKRIKSQENINIEATGCHGCGCCKIVCPSALPLVETILKYNQEGISA

SEQ ID NO: 29543 - DNA, 390 bp, Unknown
  Obtained from environmental sample
  misc_feature (1)..(390): n is a, c, g, or t
atgatcagatggccgagctgcggcattgaaggaatgcaggtttttggcgacgattatgacactcaagacggcacctgcatacgtgattatatccatgtaagcgatcttgctatcgggcacttcatggcgcttgattacatcataaaaaacaataaaagtattaccgttaatcttgggagtgaaaaaggtttttccgtaactgaagttcttgaaaccgcgcgcaaggtaacgggaaagccgatacccgcaaaaatcacaggccgcagagcgggagacccagcctcgcttaccgcgtccgcatcccttgcgaaggaattattgggctggcaggcgcgttattccgatatggaaacattaattaaaacaagctggggcgcatattcaaaatga

SEQ ID NO: 29544 - protein, 129 aa, Unknown
  Obtained from environmental sample
  misc_feature (1)..(129): Xaa is any amino acid
MIRWPSCGIEGMQVFGDDYDTQDGTCIRDYIHVSDLAIGHFMALDYIIKNNKSITVNLGSEKGFSVTEVLETARKVTGKPIPAKITGRRAGDPASLTASASLAKELLGWQARYSDMETLIKTSWGAYSK

SEQ ID NO: 29545 - DNA, 1245 bp, Unknown
  Obtained from environmental sample
  misc_feature (1)..(1245): n is a, c, g, or t
atgaaagagaaattattttcatatattgataattcctcaggtttagcggttgaacttgagagcgaacttacaaaacgccaagccatttcccccgagtcgggcggagacggcgaattggaaaaatgcctattccttgagtcgtggcttcgcgctcatggcataacaaaccttgagcgttttgacgcgcccgatgacagggtaaaaagtaaaatacgaccgaatttagtcgcgacaatagacggtagcgcggacaataaagacattggaagactatggattttaagccaccttgacgttgtaccgcccggagaagaaaaattatgggaaagcgatccgtggactgttatacgcaaggatgacgcaccggggcccagagttatcggacggggtgttgaggacaatcagcaggggttagtgtcttccgttattacggctctttcttttgtcagtcagggaataaaaccgacccttacaataaaactgctgtttgccgccgacgaagaagtgggttccgcntacggcatcgtatggcttgtaaataatcacggtaatttattcaaaaaagacgacatggttctgattcccgacggcggcgacataaaaggcgagtttatggaaatcgccgaaaaaaacataatgtggatgcgctttgccacaaagggcagacaagcccacggttcaagaccggatttgggtaataacgcctttcttgccggctccgatctcgccctgcgccttcataacgggctttccgccaaattcggcgatcatgacccattatttgatcctgactactctacttttcaacctacaaaaaaagaagccaacgtaccgaacatcaacaccattcccggcgaagatgttttttatgtggatatgcgcgtccttccccgttattcaacagattcagtgttagccgaaatcgagcgcatcaaggcggaagtcgaggcaaaatactccgtgtctattgaatacagccctatacagctaacgcagtccggccccacctctgcggacgctccaatcgtaaaaaaactaagcgccgccgtaagcgaagtttattccgtaaaaccgcgccctgtcggtatcggcggaggcacaatggcggcgtaccttcgcaacatcggaattgactgcgccgtctggacaaagacggacgagacccttcaccagccaaacgagtacgctcttttacagaacattctcggagacgcgaaagtaatggctttgctggcgttaaattaa

SEQ ID NO: 29546 - protein, 414 aa, Unknown
  Obtained from environmental sample
  DOMAIN (207)...(320): Peptidase dimerisation domain
  misc_feature (1)..(414): Xaa is any amino acid
MKEKLFSYIDNSSGLAVELESELTKRQAISPESGGDGELEKCLFLESWLRAHGITNLERFDAPDDRVKSKIRPNLVATIDGSADNKDIGRLWILSHLDVVPPGEEKLWESDPWTVIRKDDAPGPRVIGRGVEDNQQGLVSSVITALSFVSQGIKPTLTIKLLFAADEEVGSAYGIVWLVNNHGNLFKKDDMVLIPDGGDIKGEFMEIAEKNIMWMRFATKGRQAHGSRPDLGNNAFLAGSDLALRLHNGLSAKFGDHDPLFDPDYSTFQPTKKEANVPNINTIPGEDVFYVDMRVLPRYSTDSVLAEIERIKAEVEAKYSVSIEYSPIQLTQSGPTSADAPIVKKLSAAVSEVYSVKPRPVGIGGGTMAAYLRNIGIDCAVWTKTDETLHQPNEYALLQNILGDAKVMALLALN

SEQ ID NO: 29547 - DNA, 1011 bp, Unknown
  Obtained from environmental sample
  misc_feature (1)..(1011): n is a, c, g, or t
ttggagtataatataagcatggaaaccagaaaacacctgccgagggcggttctttcaaggatttatttcattgacaggcagattgcctcagggaaataccctaacgtcaatactttggcgagggaatacgaagtcggaacggctaccatttatagagatatagagtatatgagggatatgctcaatgcgcctattttatacagcgcaaaaaataggggttggtactacgagaaaaaatcgttccggcttcccgcccgattcgccgccgctgatgatatgcttgccctgggtatggctaaaaatcttatttctttatacaaagaaactccgctttatgaggcggcgcagcgtcttttgaatgatattacagctccactttcggttgatgatgtttcagacgcaaaacaggcggcatggtatgaaaaaaggattattgttccccctgtcgcctctgttccgataaaacctgaaatatgggaaataataatgaacgcaatgaaggaaaacagggtaataacgtttgagtacaagggggtatgggatactgattataaaacacgccttgtccgaccctatcagcttctttttgataacggagcgtggttcctgtacggctatgcggaagagcgatccgcaatacgtcttttctctttatccagaatgacaaacgtatctttgacaaatgagcgttttaaattgcctaaagattttgaatataaaataaaaaatgacggcagctatttcggtgtttttctcggagaaaaaaagcgttataaaattgcttttgctccaaacgccgcagtcgaaataaaggaaagaaaatgggctgctgaccagaagattaaaagtaacggagacggaattattattgattttaccagtacgcaggatcagaaagttttatcctgggttctttcttatggcggaagcgtacgccctattgagcctcctgaattagtgaaggaatggaaaagtaatattttagctttgtataagaaggttaaggaatga

SEQ ID NO: 29548 - protein, 336 aa, Unknown
  Obtained from environmental sample
  misc_feature (1)..(336): Xaa is any amino acid
MEYNISMETRKHLPRAVLSRIYFIDRQIASGKYPNVNTLAREYEVGTATIYRDIEYMRDMLNAPILYSAKNRGWYYEKKSFRLPARFAAADDMLALGMAKNLISLYKETPLYEAAQRLLNDITAPLSVDDVSDAKQAAWYEKRIIVPPVASVPIKPEIWEIIMNAMKENRVITFEYKGVWDTDYKTRLVRPYQLLFDNGAWFLYGYAEERSAIRLFSLSRMTNVSLTNERFKLPKDFEYKIKNDGSYFGVFLGEKKRYKIAFAPNAAVEIKERKWAADQKIKSNGDGIIIDFTSTQDQKVLSWVLSYGGSVRPIEPPELVKEWKSNILALYKKVKE

SEQ ID NO: 29549 - DNA, 843 bp, Unknown
  Obtained from environmental sample
  misc_feature (1)..(843): n is a, c, g, or t
ttggaagttaaaacagaatcaactaatgttataaaaacaccgagaatatcagcctccgagcgtatttccgctattaaaagtttcgcccttccggtagatagcgcaagttgttcaatatattccgtaaaactgggtaatttaaaatcagagggcggcacacgcggaagaacatatacgattggcggcgcggactgtatgccgttccacttctgggaaggcaaaatgccaaacaagccgttagtcgccatggaagtttttgacagtgtaagcgaaaagtacccagaaatattgcgcaaggcttatggagacgttttaagcaatccggcgcagatggcgaaactctgcgttgaaaagtacggggctgacttaatcagcgttaaacttgacggcactcatcctgagcgtgaaaatcggagcagtaagcaaagtgtcgatcttgtaaaatcaattcttgaagctgttgacgtgcctctgattatcacgggtacaagccactttgaaaaaaataacgaggtgatgaaggcaatcgcccaaagttgcgaaggtgagaacctactctttaactgggtagagcaggataattacagaactatcgcaggggccacaatggcttacggtcacactctggtagcgcaagccccaattgatgtcaatataagtaaacaacttaacattttattgactaatatgggcttggctcccgataaaataatcatagacccaatgacaagtacgattggttacggtattgaatatacatattccgtaatggaacgtattcgcctaacaggtcttggcggggacaatatgctcttaagcccgatgatgtctcggccgatctga

SEQ ID NO: 29550 - protein, 280 aa, Unknown
  Obtained from environmental sample
  DOMAIN (41)...(280): CO dehydrogenase/acetyl-CoA synthase delta subunit
  misc_feature (1)..(280): Xaa is any amino acid
MEVKTESTNVIKTPRISASERISAIKSFALPVDSASCSIYSVKLGNLKSEGGTRGRTYTIGGADCMPFHFWEGKMPNKPLVAMEVFDSVSEKYPEILRKAYGDVLSNPAQMAKLCVEKYGADLISVKLDGTHPERENRSSKQSVDLVKSILEAVDVPLIITGTSHFEKNNEVMKAIAQSCEGENLLFNWVEQDNYRTIAGATMAYGHTLVAQAPIDVNISKQLNILLTNMGLAPDKIIIDPMTSTIGYGIEYTYSVMERIRLTGLGGDNMLLSPMMSRPI

SEQ ID NO: 29551 - DNA, 549 bp, Unknown
  Obtained from environmental sample
  misc_feature (1)..(549): n is a, c, g, or t
atgaaaaagttgctttgtgcgtgtttggttttgatttctgtattatcaatatcatgtcaaaaaaaatcggcggtaggttcggttaatgatatgggcgtgactgtccgtcttcttacggacgcttccggcgttgatgataaatcttttaacgcctccgcttggagaggtattcttgaatttttcggcgatacggagaaacaacaaaggcagaagggaaaagcttacgattggattactactcaagatgaaagcatgtatatccccaaccttaaaatggttaccgatgaaggctgcgatcttattatcgtaaacggatatacatggagcgacgcattgcagacggttgccaaagagaaccttaaacaaaaatatcttattgtcgatgttgattgggtggaaggcggcaatgtaatgcaggcggtttatgcggaacatgaaggttcttatcttgtcggcgtcgccgccgcgttaaggcgcttgagacggcgtcgtttctccgaaatttggttttatcggcggaatggtttcctcaactattacaaagtttga

SEQ ID NO: 29552 - protein, 182 aa, Unknown
  Obtained from environmental sample
  SIGNAL (1)...(21)
  misc_feature (1)..(182): Xaa is any amino acid
MKKLLCACLVLISVLSISCQKKSAVGSVNDMGVTVRLLTDASGVDDKSFNASAWRGILEFFGDTEKQQRQKGKAYDWITTQDESMYIPNLKMVTDEGCDLIIVNGYTWSDALQTVAKENLKQKYLIVDVDWVEGGNVMQAVYAEHEGSYLVGVAAALRRLRRRRFSEIWFYRRNGFLNYYKV

SEQ ID NO: 29553 - DNA, 582 bp, Unknown
  Obtained from environmental sample
  misc_feature (1)..(582): n is a, c, g, or t
atggtttcctcaactattacaaagtttgaagtcggttatgtgcaaggtattctttcaattattcccaatgcggaaattgttgattattatgtaggtagttgggaccaaccagggtttgcgaaaaatcaggcaatgatatggtatgactcgggcgtctatgcgatcttctccgccgcaggaaacagcggtaacggaactatcgctcaggcgaaggaataccgcattgcgaaaaaaaatgtttgggcgattggcgtagattccgatcaatttgaagacgggctttacaatgaaaaaaattccgctgttcttacatcaatggtgaaacgagtggatagcgccgttattttcgctcttaaagaggttaaaaataaaacctttgccccaaacgttatagtttttgatttgaaagccaacggcgttgcctattccgacagtaatcctgcgttaagcaaaaatataaacgaaagattggagcttataaaaaagcagatcataaacggaaatattgttgttgcggcaacccttaaagattctttgaaactgccgggtttcccgaaaaatttaagggcgaaagacgactaa

SEQ ID NO: 29554 - protein, 193 aa, Unknown
  Obtained from environmental sample
  misc_feature (1)..(193): Xaa is any amino acid
MVSSTITKFEVGYVQGILSIIPNAEIVDYYVGSWDQPGFAKNQAMIWYDSGVYAIFSAAGNSGNGTIAQAKEYRIAKKNVWAIGVDSDQFEDGLYNEKNSAVLTSMVKRVDSAVIFALKEVKNKTFAPNVIVFDLKANGVAYSDSNPALSKNINERLELIKKQIINGNIVVAATLKDSLKLPGFPKNLRAKDD

SEQ ID NO: 29555 - DNA, 840 bp, Unknown
  Obtained from environmental sample
  misc_feature (1)..(840): n is a, c, g, or t
ttgtcttctagtttaaaatctgtttcggagcaattgcctactgtaattaccaatttttcaggattggttgataataaaatgagcggtattcagggatttgtggattccagcttaaaatccaaccgcgaagaactttcggcatccctaaaagaatttgaagagaaattttcagcaaaaattgaagccttggcaaaagacatgaacgatgggcttggaaaaacttatgattctgtaagtaaaataactgatacacagcaaggcaatggaaaaaagttggatgaaattgcacaagctatggattccggcttaaaatcccaccacgatgaactcttggaatccttaaagacattggaagtaaaatctttgacaaaaattgaattattagcaaaaaacacgaatgatgggcttgaaaaaactcgtgattcatttgataagaaattaactgagatacagcaaggcaatgaaaaaaagttggatgaaattatgcaaaccatggattccagcttaaaattccatcgtgaagggctttcaatatctctaaaaggatttgaagatagattttcggcaagaattgaaacgatagttaatactgttgaaaagaaattaaatgaaatgggccaaattgtaggtgaaaatttgcatgcaacacttgaaactcagcttggcgaatcatttaaacatgtgactgagaaacttgagcttgtacaaaaaggtcttggagaaaagcaaacattgacaaatgaagttgttaacataaaaaatgtactattgaaaacaaaagaaaaattgaatactgcactcagtgaaattgaaatgcaggtacgcaagcaagagaaatag

SEQ ID NO: 29556 - protein, 279 aa, Unknown
  Obtained from environmental sample
  misc_feature (1)..(279): Xaa is any amino acid
MSSSLKSVSEQLPTVITNFSGLVDNKMSGIQGFVDSSLKSNREELSASLKEFEEKFSAKIEALAKDMNDGLGKTYDSVSKITDTQQGNGKKLDEIAQAMDSGLKSHHDELLESLKTLEVKSLTKIELLAKNTNDGLEKTRDSFDKKLTEIQQGNEKKLDEIMQTMDSSLKFHREGLSISLKGFEDRFSARIETIVNTVEKKLNEMGQIVGENLHATLETQLGESFKHVTEKLELVQKGLGEKQTLTNEVVNIKNVLLKTKEKLNTALSEIEMQVRKQEK

SEQ ID NO: 29557 - DNA, 747 bp, Unknown
  Obtained from environmental sample
  misc_feature (1)..(747): n is a, c, g, or t
atgcaggttgaaacacttgatgccacagtccgcgattacatcaatgagctggaaccgaaatatcaacaaacagaaataagaaatcgggaattgcaaaataaagtcattgagattgaaacaaaccataaacaaatattaattgaatacttaattttaaaagaacagtacgacctactggtatacaaacggtttgtgcgaagcgccgagcaattgcttgccgatgaaaagcagcagcctttatttaccgaggaaacagaacagcctgaaacaaatgaagaaaagcctttagagcttcaaacggttaaatcgtttacacgcaagaagaatggcgggcgcaagccgattggcgcaaaccttgaacgaaggccgagggtcatagacataccggaaagcgaaaaaacatgcgcttgcggggcgaatttgacccgaattggcgaagaaaccagcgaaaaactggttataacacccccgcacatttatgtggaccagatantcttgaagttttgcgcctgccggctatgcgaagggacggaagacgaagacaaccctgcggtgcgcatcgcgcctgtggagcctgcaattattccaaagagcatagcgagccccagcttgctggcagccgtcttcacgcaaaagtttgaaatgcaccttccctattacaggcaggagaaacagtttgagcagataggggctgcgataagccgccaggatatgagcaactggcagcagcaggcgtatgaaaactaa

SEQ ID NO: 29558 - protein, 248 aa, Unknown
  Obtained from environmental sample
  misc_feature (1)..(248): Xaa is any amino acid
MQVETLDATVRDYINELEPKYQQTEIRNRELQNKVIEIETNHKQILIEYLILKEQYDLLVYKRFVRSAEQLLADEKQQPLFTEETEQPETNEEKPLELQTVKSFTRKKNGGRKPIGANLERRPRVIDIPESEKTCACGANLTRIGEETSEKLVITPPHIYVDQIXLKFCACRLCEGTEDEDNPAVRIAPVEPAIIPKSIASPSLLAAVFTQKFEMHLPYYRQEKQFEQIGAAISRQDMSNWQQQAYEN

SEQ ID NO: 29559 - DNA, 408 bp, Unknown
  Obtained from environmental sample
  misc_feature (1)..(408): n is a, c, g, or t
atggctggggcgtgcgatatgacatttgacatcagcaaagcaaggatctttatccgccccggttacacggatttacggaaagcggcaaacgggctttcagtaatggtagaacaacaaatggcaggggaaccttttagcgggaacatttatttattttgcaactggggacggaagctgctgaaggcgctgtggtgggacaggaacgggttttggctgagccagaagcggcttgagaaagacaagttcccctggcctgagactgatgaggaagcgagggaattaagcgcggaagaactgtcaatgcttttaagggggatagatttttttaaaagcgcacaaatctctttattacaaatatgtttcataaaaaagcaaaaaaacattgacaagaagatcgttaggagctag

SEQ ID NO: 29560 - protein, 135 aa, Unknown
  Obtained from environmental sample
  DOMAIN (12)...(120): IS66 Orf2 like protein
  misc_feature (1)..(135): Xaa is any amino acid
MAGACDMTFDISKARIFIRPGYTDLRKAANGLSVMVEQQMAGEPFSGNIYLFCNWGRKLLKALWWDRNGFWLSQKRLEKDKFPWPETDEEARELSAEELSMLLRGIDFFKSAQISLLQICFIKKQKNIDKKIVRS

SEQ ID NO: 29561 - DNA, 366 bp, Unknown
  Obtained from environmental sample
  misc_feature (1)..(366): n is a, c, g, or t
atgagcatctctatgaaaaacttaatgggaattatctggaacagaagaatatttcacgtctcagatttgcaacagtgtatagcggatatgtgcacgctggaaaaaaaaccagtgctaaacgtagttgatgcttataggattctcaaaacaagcggtccgcgtggaaaatctgtagaagacacggttctctccaaagccttgttcatgtcgcaagacatggtagcagtggacacggcggctgcgaaatttttcaaccaaatccgcgaaatgcctttaagcgatgtgcaatacctatcgctggggcaagcgttgaaggttgggactatggatattgataaattgaatgttaagaggataaagatgtaa

SEQ ID NO: 29562 - protein, 121 aa, Unknown
  Obtained from environmental sample
  misc_feature (1)..(121): Xaa is any amino acid
MSISMKNLMGIIWNRRIFHVSDLQQCIADMCTLEKKPVLNVVDAYRILKTSGPRGKSVEDTVLSKALFMSQDMVAVDTAAAKFFNQIREMPLSDVQYLSLGQALKVGTMDIDKLNVKRIKM

SEQ ID NO: 29563 - DNA, 621 bp, Unknown
  Obtained from environmental sample
  misc_feature (1)..(621): n is a, c, g, or t
ttgaaaaatctgtctcaaaagcataaaagcgacattgacggagtacctgtatctggcggtcagagcagttcaagcacagttgcatcgtcaagcagcaacggtagcagcagtagtgcggtaagcagtagtagtacaaatagtagttctgttactctaagttgcactggtctccaagaaagtgttgaaaaaggcggcactattgctcaacctactttaacttgtagcaatggaagccaagcaactaatataaattggactggtcgcccaggaggtaacggttcttggacacaaaatgcatcctctaccaccaccgcctataccataggtgctaacgctacttgtggctcagtttcgggtttaacgaccatatgtggtacggtgactgttgtaggcgtgactattcctacatcaagcagttctagcgacggaagtaacgctggcacaagcagttccagcgaagaagactcaacaccaataatcaaccactcaccactagctaattctcactccccaacctactactccctgaaaggcgaaccgcttgggaatgcaaaaccgcaaaaagcagggatttatatagttaagcagggaaattcaattagaaaaatcgcagttaggtga

SEQ ID NO: 29564 - protein, 206 aa, Unknown
  Obtained from environmental sample
  misc_feature (1)..(206): Xaa is any amino acid
MKNLSQKHKSDIDGVPVSGGQSSSSTVASSSSNGSSSSAVSSSSTNSSSVTLSCTGLQESVEKGGTIAQPTLTCSNGSQATNINWTGRPGGNGSWTQNASSTTTAYTIGANATCGSVSGLTTICGTVTVVGVTIPTSSSSSDGSNAGTSSSSEEDSTPIINHSPLANSHSPTYYSLKGEPLGNAKPQKAGIYIVKQGNSIRKIAVR

SEQ ID NO: 29565 - DNA, 537 bp, Unknown
  Obtained from environmental sample
  misc_feature (1)..(537): n is a, c, g, or t
ttgcgccccgacaatttgaacccgcaggcaccgggaacaggctcgcggatttacaagactaacggccaaaaggttgcggtagtcgtgatgctggggcaaaacggttttaacaggctccattcagcaagcccctttattatgctgccggtgcttctggaacgtctgcgccaggaaacgccttacatcattattgattttcacgcccaggcaactgccgaaaagaaaacattattcttcactgcggacggcggttgttccgcggttatcggttcgcataccagggtgcagacatccgacgaggcggtactccccctggggacggccgtaataagcgacgcggggcgcaccggctcaagcgaatcagtcggcggctgcgacaccagttcccgcatacaggaataccttagcggcatccccgaatggacaaaagacgcatgggacaagccggaactgcagggagtgtacatcgacattgcccccgacggcaaggcaaaatccattgaaagggtaaaaatacaagtgaagagtgaagagtga

SEQ ID NO: 29566 - protein, 178 aa, Unknown
  Obtained from environmental sample
  misc_feature (1)..(178): Xaa is any amino acid
MRPDNLNPQAPGTGSRIYKTNGQKVAVVVMLGQNGFNRLHSASPFIMLPVLLERLRQETPYIIIDFHAQATAEKKTLFFTADGGCSAVIGSHTRVQTSDEAVLPLGTAVISDAGRTGSSESVGGCDTSSRIQEYLSGIPEWTKDAWDKPELQGVYIDIAPDGKAKSIERVKIQVKSEE

SEQ ID NO: 29567 - DNA, 462 bp, Unknown
  Obtained from environmental sample
  misc_feature (1)..(462): n is a, c, g, or t
gtgaggctgtcacgcatagcttgcgtaccaaaacacttttcacttttcactcttcacttcttcatggctctcatcgcgttcaaaacggcaatcagcgcgacgcctacgtcgccgaataccgcttcccacatagtggcgattccaagcgcgccaagaacaagaataacggccttaaccaacagggcgaagattatgttctgccatactatgcttttggtttttttggctatcttcatggcgttaaccaatttgagcggctcgtcggtcatcagcactatgtcggcggcttcaatggcggcgtcgctgccaaggccgcccatcgctatgccgatgtcgcttaacgcaagggccggcgcgtcgttgatgccgtcgccgacaaaggcaagcttttttccccccctggtcgcagcgcgtaatatctcaagctgttggactttctggtgggggagcaattccgggtaa

SEQ ID NO: 29568 - protein, 153 aa, Unknown
  Obtained from environmental sample
  misc_feature (1)..(153): Xaa is any amino acid
MRLSRIACVPKHFSLFTLHFFMALIAFKTAISATPTSPNTASHIVAIPSAPRTRITALTNRAKIMFCHTMLLVFLAIFMALTNLSGSSVISTMSAASMAASLPRPPIAMPMSLNARAGASLMPSPTKASFFPPLVAARNISSCWTFWWGSNSG

SEQ ID NO: 29569 - DNA, 777 bp, Unknown
  Obtained from environmental sample
  misc_feature (1)..(777): n is a, c, g, or t
atggccgaggtctgttctgacgcttcgaaggggagattgcacncttctgacattactgactatgaggaaatccccggcaaggggataagcgcctgtataaaaggaagaaccgtgctggcggggaacgcccggtttttggagggcaagggcatcgcgttacgcgctattagctcggcgggaactgccgtatatatcgcgctggacggcctgtactcaggctgtctggtcattgccgatgaagtcaagccggacgcaaaacaagctatgaatgaactgagaaagacgggggcgcgccggcttgtgatgctttcaggcgacaaccgcgccgccgctgaaaagatcggcaaagaactcggccttgacgcggtttacccggaattgctcccccaccagaaagtccaacagcttgagatattacgcgctgcgaccagggggggaaaaaagcttgcctttgtcggcgacggcatcaacgacgcgccggcccttgcgttaagcgacatcggcatagcgatgggcggccttggcagcgacgccgccattgaagccgccgacatagtgctgatgaccgacgagccgctcaaattggttaacgccatgaagatagccaaaaaaaccaaaagcatagtatggcagaacataatcttcgccctgttggttaaggccgttattcttgttcttggcgcgcttggaatcgccactatgtgggaagcggtattcggcgacgtaggcgtcgcgctgattgccgttttgaacgcgatgagagccatgaagaagtga

SEQ ID NO: 29570 - protein, 258 aa, Unknown
  Obtained from environmental sample
  DOMAIN (18)...(175): haloacid dehalogenase-like hydrolase
  misc_feature (1)..(258): Xaa is any amino acid
MAEVCSDASKGRLHXSDITDYEEIPGKGISACIKGRTVLAGNARFLEGKGIALRAISSAGTAVYIALDGLYSGCLVIADEVKPDAKQAMNELRKTGARRLVMLSGDNRAAAEKIGKELGLDAVYPELLPHQKVQQLEILRAATRGGKKLAFVGDGINDAPALALSDIGIAMGGLGSDAAIEAADIVLMTDEPLKLVNAMKIAKKTKSIVWQNIIFALLVKAVILVLGALGIATMWEAVFGDVGVALIAVLNAMRAMKK

SEQ ID NO: 29571 - DNA, 762 bp, Unknown
  Obtained from environmental sample
  misc_feature (1)..(762): n is a, c, g, or t
gtgaaaaaccagtttatacaaaacattgtctcacggatgagtaaagaacagaaaataggcgcgctattgaccctgggctttgccggaacaatggtcaggccgcacatttacgacgcgattctgaaataccacgccggaggcctaaggctttctcccggttcccgcctttttggcagctatgtggatccaaagtcaggtcaaacggtgctggatgttaccgacggcaaaggctataaaaagggactgcccccacccgctcttagcccttcgcagtacgcgcttatgctggatgagctttcggcggcggccgcctcccgtccgttgggactgcccctgcatttctcttttgatcaggaggggggaaccagtgcggatttcaatttcggcggagtcaacatttttcccaagcctatggggctgcgggctacgggcgataaaaacctcgcctatgccgccgccagggcaatcgcccgtcaatcaaaagcggcaggctttagctggattcattcgccggttctcgatgtcaacaccaatcccgagaatcctgaagtttacacccgcgcatattctgacatcgcggaggaagtggcggaatacgcggtaaagacctgcgaaggttttaaggaagggaaaatgatcgccaccggaaaacactttccgggacggggagattcggcggtggacgcgcactttgaaatgcccgtgatcaaagccgacatggaaaacatgatgaacaggggactcccctgcctacgtgaatga

SEQ ID NO: 29572 - protein, 253 aa, Unknown
  Obtained from environmental sample
  DOMAIN (102)...(249): Glycosyl hydrolase family 3 N terminal domain
  misc_feature (1)..(253): Xaa is any amino acid
MKNQFIQNIVSRMSKEQKIGALLTLGFAGTMVRPHIYDAILKYHAGGLRLSPGSRLFGSYVDPKSGQTVLDVTDGKGYKKGLPPPALSPSQYALMLDELSAAAASRPLGLPLHFSFDQEGGTSADFNFGGVNIFPKPMGLRATGDKNLAYAAARAIARQSKAAGFSWIHSPVLDVNTNPENPEVYTRAYSDIAEEVAEYAVKTCEGFKEGKMIATGKHFPGRGDSAVDAHFEMPVIKADMENMMNRGLPCLRE

SEQ ID NO: 29573 - DNA, 357 bp, Unknown
  Obtained from environmental sample
  misc_feature (1)..(357): n is a, c, g, or t
gtgggaaatccagcagcattccatccgggggatggagatcatcgcccgctggaaagaaggcggcggggacagcgccttttgcgctacgccaagattttcgccggctaccatcacgaaaagtgggacggcacgggctacccttacgggctttccggcgagtccataccgctcctgggccgcctcatggccgtggttgacgtgtatgaggcgctgaccgctgaacgggcttacaagacggccttaagccatgaccaggcggcgcgcataatcattgaaggcaagggcacgcattttgacccggagctggtcgagctgtttgaagaaaacgcggagatgttcaggcaggccgggaaatga

SEQ ID NO: 29574 - protein, 118 aa, Unknown
  Obtained from environmental sample
  misc_feature (1)..(118): Xaa is any amino acid
MGNPAAFHPGDGDHRPLERRRRGQRLLRYAKIFAGYHHEKWDGTGYPYGLSGESIPLLGRLMAVVDVYEALTAERAYKTALSHDQAARIIIEGKGTHFDPELVELFEENAEMFRQAGK

SEQ ID NO: 29575 - DNA, 909 bp, Unknown
  Obtained from environmental sample
  misc_feature (1)..(909): n is a, c, g, or t
atgaccgctcgcgctgttgtcaaatccgattttcggaacataaacatcaatgaaatattgtatgtgaaggtcggcctggccaatggttacgcccagaccgaactgttcaacaaatggttcccgaaccatcttaacacgaccctttacgagaccttcgacctggccttcgaagccttgatccgcggcgaggttgacctggtcatgtccagccttacccagctcctggtcttgaccaatttccgggaactgccgggttacaaggccaatatcgtcttcggcgtcccctatgactcgactttcgggttcaacaagggtgaggcggtcctgtgttccatcgtcgataaggccctcggcttgatcgacatcgaggaaatcgccggccagtggatgcgccggacctatgattaccgggataagatggcccgggcgcagcggccttggctggtcggcgcgattgccatgctcctgtccataataacccttttattcgtcatgttccagcggaaccgccgggaaggccggcggctgagcgccctgcaaaacgtggtcatgggagccatagcggaattggtggaattccgtgacgacgcgaccggcgggcatatcagccgcaccagcgaactcctgcgcgccttgctcaccgaaatgaccgcccggggcctcttcaaggaacagacctcgtcctggaacatcagtcaaatggttctctcgtcgcagcttcacgatgtcgggaagatcgccatcgccgacagcatcctgcggaaacagggggaactgacgcgggatgaattcaaggaaatggaaaggcataccctgatcggcggcgagataatcgaaagaatccagaaaaagaccagcgagagggagtttttggattacgccccgggttttcgcgctgtatcatcatga

SEQ ID NO: 29576 - protein, 302 aa, Unknown
  Obtained from environmental sample
  misc_feature (1)..(302): Xaa is any amino acid
MTARAVVKSDFRNININEILYVKVGLANGYAQTELFNKWFPNHLNTTLYETFDLAFEALIRGEVDLVMSSLTQLLVLTNFRELPGYKANIVFGVPYDSTFGFNKGEAVLCSIVDKALGLIDIEEIAGQWMRRTYDYRDKMARAQRPWLVGAIAMLLSIITLLFVMFQRNRREGRRLSALQNVVMGAIAELVEFRDDATGGHISRTSELLRALLTEMTARGLFKEQTSSWNISQMVLSSQLHDVGKIAIADSILRKQGELTRDEFKEMERHTLIGGEIIERIQKKTSEREFLDYAPGFRAVSS

SEQ ID NO: 29577 - DNA, 906 bp, Unknown
  Obtained from environmental sample
  misc_feature (1)..(906): n is a, c, g, or t
atgggattattttctgcaataaaagcggggctttcaaaaacacgtgagaccctaatgggcgaattcaagtccatagctggggttggaaaaattacagatgaaatgcttgagcatttggaagagcatttgataaaagccgatgttggagtggaagcagcgtttttattgaccgatgctttaagggaacacgggcttggaaaaagtttaacgcaaaacgaaataaattcaattttgcgaaacgaagcacagcgtttgctgatagaccctcccgaactcaaatgggaaaataaaccgcacgttgttttgattataggcgtgaatggagctggcaaaaccaccaccattggcaaactggcgcaccgcttaaagcaagaggaaaaatccgttttgctcgccgcaggcgatacattcagagcagccgccattgagcaactggaaacttgggcacagcgttccggcgcagactttgtgcggcaccaagaaaactccgacccaagtgcagtagcctacgatgcctgcaaagctgccattgcaagggagagcgatattgtatttatagatactgccggaaggttgcacaacaaagagcatttaatggaggaactgcataaaacggtaagagttgtaaaaaaaataaatgaaaatttcccgcacgatatttggctcgttatagacggaaattctggacaaaatgttattaagcaagttcaaacttttcaccaaaattttaagctcaccggtttgatagtgacaaaattagacggcaccgcaaaaggtggttctgtgctttccatagcgagcgaactgaaaatcccgattatttggattggagttggagaaaaaattgagcaacttgttccctttgacaaagcagaatatatcaatggtttatttgaggagggataa

SEQ ID NO: 29578 - protein, 301 aa, Unknown
  Obtained from environmental sample
  DOMAIN (7)...(87): SRP54-type protein, helical bundle domain
  misc_feature (1)..(301): Xaa is any amino acid
MGLFSAIKAGLSKTRETLMGEFKSIAGVGKITDEMLEHLEEHLIKADVGVEAAFLLTDALREHGLGKSLTQNEINSILRNEAQRLLIDPPELKWENKPHVVLIIGVNGAGKTTTIGKLAHRLKQEEKSVLLAAGDTFRAAAIEQLETWAQRSGADFVRHQENSDPSAVAYDACKAAIARESDIVFIDTAGRLHNKEHLMEELHKTVRVVKKINENFPHDIWLVIDGNSGQNVIKQVQTFHQNFKLTGLIVTKLDGTAKGGSVLSIASELKIPIIWIGVGEKIEQLVPFDKAEYINGLFEEG

SEQ ID NO: 29579 - DNA, 510 bp, Unknown
  Obtained from environmental sample
  misc_feature (1)..(510): n is a, c, g, or t
atgaaaaccattgttgttaaaataggtggctcgctggctatagatgatagcaaattactggactttgctcgtgcttcagcagagatgtctaaaagttgcaaattgattattgttcacggtggtggaaaagatataaatgcaaacctcgctttgctaaacgaagaaccaaaattcttaaacgggctaagggtaacaactccggcgataatggatatggtggagatgactttgagcggcaaggttggcaaaaaacttgttagaatgttgctaacagagggtgcaaacgtagcgggaatttccggtgtggatgcaaaactccttgaagcgaaaaaattggaaggcaaaggggatttgggagcagttggcgatattttcagggtgaatacaaaaattttggaagttcttttggaagcaggcataactcccgttgtttctcctgtgtcttatggcgatggaatttcttacaatgtgaatgcagatacagcagcatctgaaattgcggttgcttga

SEQ ID NO: 29580 - protein, 169 aa, Unknown
  Obtained from environmental sample
  DOMAIN (2)...(168): Amino acid kinase family
  misc_feature (1)..(169): Xaa is any amino acid
MKTIVVKIGGSLAIDDSKLLDFARASAEMSKSCKLIIVHGGGKDINANLALLNEEPKFLNGLRVTTPAIMDMVEMTLSGKVGKKLVRMLLTEGANVAGISGVDAKLLEAKKLEGKGDLGAVGDIFRVNTKILEVLLEAGITPVVSPVSYGDGISYNVNADTAASEIAVA

SEQ ID NO: 29581 - DNA, 906 bp, Unknown
  Obtained from environmental sample
  misc_feature (1)..(906): n is a, c, g, or t
gtgctttccattgcgagcgacttcaaaataccaattatttggattggagttggtgaaaaaatgnagcagcttgttcctttgacaaaacagaatatatcaatggattgtttgaggagggataaagatgaaaaccattgtgttaaaataggtggctcgcttgcggtagatgattgcaagttgctggattttgctcacgctgcggcagagatgtcaaaaatttgcaaattgattattgttcacggcggtggaaaagatataaatgcgaacattgccttgctaaacgaagaaccaaaattcctaaacgggctaagagtgacaactccggcaataatggatatggtggagatgacactcagcggcaaggttggcaaaaaacttgttagaatgttgctaacagagggtgcaaatgcagcaggaatttccggtgtggattcaaaactgcttgaagcaaaaaaattggaaggcaaaggagatttgggagcagttggcgatattttcagggtgaatacgaaaattttggaagttcttttggaagctggcataacgcctgttgtttctcctgtgtcttatggagatggaatttcttacaatgtgaatgcagataccgcagcatctgaaatagcggttgctttaaaagcggattgctttattttaataagcgatataagtggggttttagatgaaaacaaaaaaataattccgcatttaaataaagaacttgcaaacgagctaattaagagcgaagttatatctggcggtatgataccaaaagttcagggtgctttggaatctttggatagaggcttgaaatccattcacattgttgggtgggaaggcgcagaggcattcaaaaagcagattgaaggcacggctaacagcgggacgatttttagaaaaagcatctaa

SEQ ID NO: 29582 - protein, 301 aa, Unknown
  Obtained from environmental sample
  DOMAIN (47)...(276): Amino acid kinase family
  misc_feature (1)..(301): Xaa is any amino acid
MLSIASDFKIPIIWIGVGEKMXQLVPLTKQNISMDCLRRDKDENHCVKIGGSLAVDDCKLLDFAHAAAEMSKICKLIIVHGGGKDINANIALLNEEPKFLNGLRVTTPAIMDMVEMTLSGKVGKKLVRMLLTEGANAAGISGVDSKLLEAKKLEGKGDLGAVGDIFRVNTKILEVLLEAGITPVVSPVSYGDGISYNVNADTAASEIAVALKADCFILISDISGVLDENKKIIPHLNKELANELIKSEVISGGMIPKVQGALESLDRGLKSIHIVGWEGAEAFKKQIEGTANSGTIFRKSI

SEQ ID NO: 29583 - DNA, 864 bp, Unknown
  Obtained from environmental sample
  misc_feature (1)..(864): n is a, c, g, or t
atgcgtttttcccatcttcgcagttttggcaaggccgtatttgcgtatccatcaatacgcgatacgcagttacttagagggattatccgtgatgaagggcatcttatcgaatctctgcttgctttttccccgtcatcccgcgtgctgcatattcccaccaaggttgtcgccatgagaagttttttggtggctaagttccacgccttctccctgctttcctttttgaccagcgaccacgaaacttttcaggctgagctgaggacggtgatcttttccgtagtcagcaccttaatctcggaagaagtttatttttcctgccttgaagattcggggttttcacataaaaccaaggcaagcattgccgatgatttgatcgccttatgggacagcgggatggatttacggggcattcgccatctggccgcactttcttccctctggcttgcccgtgaagccgcccctcccagctttgggacaatggacggcaacacggaactattgaggatcacaatagaccttgacgatgactggcgggatttcctgatggtggaagccagcaataacgaagccagatgggctttggaagaatttctttttggcctttcatgggaagaaatcaaagaggttcgtttaacattgacccgctttggcattaccgctgttaactacgatcaaatacgctcatatctggattccaaacccgcctactctgtggtggatgaaaaggatacaaaggcgttttacgattttttcatcgaacggagggatgcctgcgcttttcgcaagaagatgtcagctccgggccccaggcacacacttgaagaaatctacctgaaataccggatcattacggaacttcgatga

SEQ ID NO: 29584 - protein, 287 aa, Unknown
  Obtained from environmental sample
  misc_feature (1)..(287): Xaa is any amino acid
MRFSHLRSFGKAVFAYPSIRDTQLLRGIIRDEGHLIESLLAFSPSSRVLHIPTKVVAMRSFLVAKFHAFSLLSFLTSDHETFQAELRTVIFSVVSTLISEEVYFSCLEDSGFSHKTKASIADDLIALWDSGMDLRGIRHLAALSSLWLAREAAPPSFGTMDGNTELLRITIDLDDDWRDFLMVEASNNEARWALEEFLFGLSWEEIKEVRLTLTRFGITAVNYDQIRSYLDSKPAYSVVDEKDTKAFYDFFIERRDACAFRKKMSAPGPRHTLEEIYLKYRIITELR

SEQ ID NO: 29585 - DNA, 813 bp, Unknown
  Obtained from environmental sample
  misc_feature (1)..(813): n is a, c, g, or t
atggacagggtgggcaaggacggggtcatcaccgttgaagagtccaaaacaatggacaccacaatcgactttgtggaaggtatgcagtttgaccgcggctatatttccgcgtattttgttaccgaccgcgacaccatgaccaccgtgtacgaggacgtgtacattcttatccacgacaagaaaatctccggcatgagggaaatgcttcccctgctggaaaaagtagcccagagcggcaagcccctgctcatcatcgccgaggacgtggacggcgaggccctctccaccctggtgctaaacagcctgcggcagaccctcaaaaccgtggcggtaaaggcccccggtttcggcgaccgccgcaaagccatgctggaggacatagctatccttaccggcgggcaggttatcaccgaagagcttggcatgaagctggaaaacaccgagctttcccaccttggcaaagccaagaccattaagatcgacaaggacaataccacgatcatcaacggcggcgggaaagccaaggatatcaaggaccgcatcgcccagatcaaagtccagatagaagacacgacaagcagctacgacaaagagaagcttcaggaacggcttgccaaactcgccggcggcgtcgcggttatcaatgtcggcgcggccaccgaggtcgagctgaaagagaagaagcaccgcgtggaggacgccctgtccgccacccgcgccgcatcgaagaggtattgtctcaggcggcgggatcgccctcattcaggcttctcttgctctggacaaggccgataccaatggcctcaccgatga

SEQ ID NO: 29586 - protein, 270 aa, Unknown
  Obtained from environmental sample
  DOMAIN (1)...(270): TCP-1/cpn60 chaperonin family
  misc_feature (1)..(270): Xaa is any amino acid
MDRVGKDGVITVEESKTMDTTIDFVEGMQFDRGYISAYFVTDRDTMTTVYEDVYILIHDKKISGMREMLPLLEKVAQSGKPLLIIAEDVDGEALSTLVLNSLRQTLKTVAVKAPGFGDRRKAMLEDIAILTGGQVITEELGMKLENTELSHLGKAKTIKIDKDNTTIINGGGKAKDIKDRIAQIKVQIEDTTSSYDKEKLQERLAKLAGGVAVINVGAATEVELKEKKHRVEDALSATRAASKRYCLRRRDRPHSGFSCSGQGRYQWPHR

SEQ ID NO: 29587 - DNA, 474 bp, Unknown
  Obtained from environmental sample
  misc_feature (1)..(474): n is a, c, g, or t
gtgtcttctatctggactttgatctgggcgatgcggtccttgatatccttggctttcccgccgccgttgatgatcgtggtattgtccttgtcgatcttaatggtcttggctttgccaaggtgggaaagctcggtgttttccagcttcatgccaagctcttcggtgataacctgcccgccggtaaggatagctatgtcctccagcatggctttgcggcggtcgccgaaaccgggggcctttaccgccacggttttgagggtctgccgcaggctgtttagcaccagggtggagagggcctcgccgtccacgtcctcggcgatgatgagcaggggcttgccgctctgggctactttttccagcaggggaagcatttccctcatgccggagattttcttgtcgtggataagaatgtacacgtcctcgtacacggtggtcatggtgtcgcggtcggtaacaaaatacgcggaaatatag

SEQ ID NO: 29588 - protein, 157 aa, Unknown
  Obtained from environmental sample
  SIGNAL (1)...(18)
  misc_feature (1)..(157): Xaa is any amino acid
MSSIWTLIWAMRSLISLAFPPPLMIVVLSLSILMVLALPRWESSVFSSFMPSSSVITCPPVRIAMSSSMALRRSPKPGAFTATVLRVCRRLFSTRVERASPSTSSAMMSRGLPLWATFSSRGSISLMPEIFLSWIRMYTSSYTVVMVSRSVTKYAEI

SEQ ID NO: 29589 - DNA, 468 bp, Unknown
  Obtained from environmental sample
  misc_feature (1)..(468): n is a, c, g, or t
atgagggcgatcccgccgcctgagacaatacctcttcgatgcggcgcgggtggcggacagggcgtcctccacgcggtgcttcttctctttcagctcgacctcggtggccgcgccgacattgataaccgcgacgccgccggcgagtttggcaagccgttcctgaagcttctctttgtcgtagctgcttgtcgtgtcttctatctggactttgatctgggcgatgcggtccttgatatccttggctttcccgccgccgttgatgatcgtggtattgtccttgtcgatcttaatggtcttggctttgccaaggtgggaaagctcggtgttttccagcttcatgccaagctcttcggtgataacctgcccgccggtaaggatagctatgtcctccagcatggctttgcggcggtcgccgaaaccgggggcctttaccgccacggttttgagggtctgccgcaggctgtttag

SEQ ID NO: 29590 - protein, 155 aa, Unknown
  Obtained from environmental sample
  misc_feature (1)..(155): Xaa is any amino acid
MRAIPPPETIPLRCGAGGGQGVLHAVLLLFQLDLGGRADIDNRDAAGEFGKPFLKLLFVVAACRVFYLDFDLGDAVLDILGFPAAVDDRGIVLVDLNGLGFAKVGKLGVFQLHAKLFGDNLPAGKDSYVLQHGFAAVAETGGLYRHGFEGLPQAV

SEQ ID NO: 29591 - DNA, 798 bp, Unknown
  Obtained from environmental sample
  misc_feature (1)..(798): n is a, c, g, or t
atgaactcctttaaggctattggccgcgccattgaatacgagacggtgcgccagatcgagatactggaagacggcgggcagattgttcaggaaacgcgccgctgggacgatgagaaacttgaatcttacggtatgcgttcaaaggagaacgctcaggattaccgttactttccggagcctgaccttttgcctatggagatcgatgatcaatggcttgcgcacgttaaggcaaacctgccggaactggcgtatcaaaaaagggaacggtactgccgtgatttcaagatacccgaatccgaggcgatgattcttacagtgcataaaaaaatctgcgatcttttcgagaccattgcgcggcaaagcggacagcccgttgaaacggcgcaccttctcaccggtgaaatcatgcggcttatgaacaacgccaatgtgttaccggaagatttgtctattgatgcaaataaactttcgactctcattagccttgttacgaacgggaaaatcaaccgaagcgcgtataaagaaacccttgaagcggtatttacgcgggatgtggatcctgaactttatattgccgaaaaagggctgatgatgatcaatgatgacaacgcggtcatcgaagcggtacacgcggttatgcttgataatcaggactcggtagctgagtaccgcgcgggaaaagaaaaagtgttcggatttttaatgggccaggttatgaaaaagctgggcggaaaaggaaatcccgacatggcaaagaaaacattaacagagatactaagaaaggggaatggcgcatga

SEQ ID NO: 29592 - protein, 265 aa, Unknown
  Obtained from environmental sample
  DOMAIN (42)...(110): PET112 family, C terminal region
  misc_feature (1)..(265): Xaa is any amino acid
MNSFKAIGRAIEYETVRQIEILEDGGQIVQETRRWDDEKLESYGMRSKENAQDYRYFPEPDLLPMEIDDQWLAHVKANLPELAYQKRERYCRDFKIPESEAMILTVHKKICDLFETIARQSGQPVETAHLLTGEIMRLMNNANVLPEDLSIDANKLSTLISLVTNGKINRSAYKETLEAVFTRDVDPELYIAEKGLMMINDDNAVIEAVHAVMLDNQDSVAEYRAGKEKVFGFLMGQVMKKLGGKGNPDMAKKTLTEILRKGNGA

SEQ ID NO: 29593 - DNA, 366 bp, Unknown
  Obtained from environmental sample
  misc_feature (1)..(366): n is a, c, g, or t
gtgccctgggctactcttgagcaggcctcccgcgagcgccgccccctaaggggctctcacccgctcgggcgccgctttccagcgggcttcgagggcgggctcgcaggattgtgcctgcctaccccgcagaatctgcggtttgggctcctcccggttcgctcgccgctactgagggaatctcggttgatttcttttcctccgggtacttggatgtttcggttccccgggttcgccttcccatcgctgggaatcccaggccaacgcctggggggttctcccattcggaatcccatgggtcaagggctggagcgcctcgccatggcgtttcgccgcttcccgcgtccttcatcgccggccggtgcctag

SEQ ID NO: 29594 - protein, 121 aa, Unknown
  Obtained from environmental sample
  misc_feature (1)..(121): Xaa is any amino acid
MPWATLEQASRERRPLRGSHPLGRRFPAGFEGGLAGLCLPTPQNLRFGLLPVRSPLLRESRLISFPPGTWMFRFPGFAFPSLGIPGQRLGGSPIRNPMGQGLERLAMAFRRFPRPSSPAGA

SEQ ID NO: 29595 - DNA, 321 bp, Unknown
  Obtained from environmental sample
  misc_feature (1)..(321): n is a, c, g, or t
ttgttgccatcgggtaatgccgggcactcttggaaaactgcccgcgtcaagcgggaggaaggcggggatgacgtcaagtcatcatggttcttacgggtcgggccacaaacgtactacaatggtgataacaatgggtcgcaatgccgcaaggcaaagccaatccttaaatattgccccagttcagattgccctctgcaactcgaggacatgaagtcggaatcgctagtaatcgctgatcagaatgcagcggtgaattcgttcccgggtcttgtacacaccgcctgtcaaaccatgaaagtcgattccacccgaatccggtag

SEQ ID NO: 29596 - protein, 106 aa, Unknown
  Obtained from environmental sample
  misc_feature (1)..(106): Xaa is any amino acid
MLPSGNAGHSWKTARVKREEGGDDVKSSWFLRVGPQTYYNGDNNGSQCRKAKPILKYCPSSDCPLQLEDMKSESLVIADQNAAVNSFPGLVHTACQTMKVDSTRIR

SEQ ID NO: 29597 - DNA, 1779 bp, Unknown
  Obtained from environmental sample
  misc_feature (1)..(1779): n is a, c, g, or t
gtgaaaggcacctacaacaaagagcaaatgcccagcgcgaatgtaaacctgagtgttgacaatgccatgtttaaatatcctgaccttccaaaatcggtaaacaacgtcaatattgccgtaaaagctttttacgatggcgttacgttcgacaaaacaacgcttgatgtagacaagcttcatttcgagatggccgccaatccgttcgacgctgaagtgcacgtaaagacacctgaaagcgacatgcaagtgacggcaaagcttgcaggaaagatcgatttcaattctctggttgatattgttccgctggacgacattaccctgaagggcttgctggattgcgatcttgtgctggcaggacgaatgtcaactttccaaaacgagcgctacgaagatgttgacgcaagaggtatgctgaaactgagcggcttcaattttgagagccccgatttgccgcaagcggtaaacatcgcaagcacacagctcaattttactccgagaagggtagacctcataagcttcgatgccgttatcggaaaaacagatattgcaatgaacggcacgctggaaaagttcattccctttattttcaaaggcgatacagtgcacggcaatcttaccctgagatcgaacaacatcgatcttaatgagtttatgaccggggaaaaatccgatgaaaccaaagaatccgccccgctcacagtaatcgaagtacctaaaaacatcgacttcttaatgaatgtcaacatcggccatctcctgtttgacaagttgaacataaccaacactaccggtacgttgttggtgagcgatggcaaattgcagatgcgggatctcaacatgaatatgctggaaggcagtgtgacgctctcaggcgaatataatacgcaggatatcaaatttccgtcggttaattttaacgcggacctcagccaggtcgatgtcgcgtcggcgatttcatcttttgaaatactccagaaaatattgccgcaaccgcagaactacgcgggaaaagtgtcggcaaaactgacactgaacagtattcttgacgggcatctcagcccggtattgaacacggtggcttccaaaggccagctgcagacgcataacctgaaaatacaaaactcggaactgttcgctacgatggccaatacgctgaaaaacgaaacgtggcgcacgcccactcttaacaatattattgtcaaattcgagatcaaggacgggcgtttgtcggttgaaccggtaacgatgaacatcgcgcagaccaaactggaactcacaggcagccagggcctggatatgaccctgaattacaagctgaatgcgacagtgcccacttcggcagtcggctccggcgcggcggatattttgagcaaaatacccggaggctcgaagataaaggaattcaaggtgacaggattgataacaggcacggttaccaaacccgttgtaacccttagtatcgccgatatggtgagcaatgttaccgaaaccgttaaggaagccgttaaagaagcagtcaaggaacaggtacaacaggttacacaacaggcgaaagaagaggttgaaaaacagatagccgcaggcatggctgaggccgagagacaggctcagaacatccgtaacaccgctaaacaggccgccgacaaaacacgcgccgacgccaaaacagccgccgacaaaacacgcaccgaaacccaacacaggggccgatcactgggaatcccggcgaaaaatcctcctgaaaggcagccgctaaagtggcgccgaccaaatccgtga

SEQ ID NO: 29598 - protein, 592 aa, Unknown
  Obtained from environmental sample
  misc_feature (1)..(592): Xaa is any amino acid
MKGTYNKEQMPSANVNLSVDNAMFKYPDLPKSVNNVNIAVKAFYDGVTFDKTTLDVDKLHFEMAANPFDAEVHVKTPESDMQVTAKLAGKIDFNSLVDIVPLDDITLKGLLDCDLVLAGRMSTFQNERYEDVDARGMLKLSGFNFESPDLPQAVNIASTQLNFTPRRVDLISFDAVIGKTDIAMNGTLEKFIPFIFKGDTVHGNLTLRSNNIDLNEFMTGEKSDETKESAPLTVIEVPKNIDFLMNVNIGHLLFDKLNITNTTGTLLVSDGKLQMRDLNMNMLEGSVTLSGEYNTQDIKFPSVNFNADLSQVDVASAISSFEILQKILPQPQNYAGKVSAKLTLNSILDGHLSPVLNTVASKGQLQTHNLKIQNSELFATMANTLKNETWRTPTLNNIIVKFEIKDGRLSVEPVTMNIAQTKLELTGSQGLDMTLNYKLNATVPTSAVGSGAADILSKIPGGSKIKEFKVTGLITGTVTKPVVTLSIADMVSNVTETVKEAVKEAVKEQVQQVTQQAKEEVEKQIAAGMAEAERQAQNIRNTAKQAADKTRADAKTAADKTRTETQHRGRSLGIPAKNPPERQPLKWRRPNP

SEQ ID NO: 29599 - DNA, 561 bp, Unknown
  Obtained from environmental sample
  misc_feature (1)..(561): n is a, c, g, or t
gtggaatatgatgaattaacgcccaaaaacatggtgttagtcgatcttgagggaaaggttatagactgcagcctcaagccgtcttccgacacaaaaacccaccttgtcctataccgggaatttaagggtatacgcggcattgcccatactcattcgccttacgcggtcgcctgggcgcaggccgggaaaccggttcccgttttcggaaccacccacgccgatcactgcgcttatgaaatcccgtgtacaaatttcatgaatccgcaggatgtaaaaaacaattacgaactggaaacaggcaatttaattgttaatacttttaaaaacggcaatctggactgttctcaaattacaatgacattggtcgcaggacacggccccttcacctggggaacaagcgccgcgcaatcggtgtaccacagcgttattctggaagaaatttgcaagatggcgttatttaccatagagattgactcaaacgcgaaacccctgcccgaacacatcattaaaaaacattgggaacgcaaacatggggcgaacgcgtattacgggcagaaataa

SEQ ID NO: 29600 - protein, 186 aa, Unknown
  Obtained from environmental sample
  DOMAIN (1)...(172): Class II Aldolase and Adducin N-terminal domain
  misc_feature (1)..(186): Xaa is any amino acid
MEYDELTPKNMVLVDLEGKVIDCSLKPSSDTKTHLVLYREFKGIRGIAHTHSPYAVAWAQAGKPVPVFGTTHADHCAYEIPCTNFMNPQDVKNNYELETGNLIVNTFKNGNLDCSQITMTLVAGHGPFTWGTSAAQSVYHSVILEEICKMALFTIEIDSNAKPLPEHIIKKHWERKHGANAYYGQK

SEQ ID NO: 29601 - DNA, 1002 bp, Unknown
  Obtained from environmental sample
  misc_feature (1)..(1002): n is a, c, g, or t
atggcgcttatccacgttttactacgcgtttttactatgccgcgtggagcatattccccngcttttcatacggcaaatgaaacatggggagccgtttccgtaacggctgtttttcttgttatcgtttttctctgcggcaagaaacaacaggaaatcatcgccggaagcggcgacagcgacggcaaaggttcgggcgttccctttgtcatctgtctgcatattgtgtttttcatgattgtgtgcatggtaaattatattgagtggggggaaaacagcctgtcaggccttgcgtttggggcgggaacttttatatctgtcggcctcgtgattatcgtccaactgctcatcggacgcagcgcgctgtatctctggcttatgtttctggttttttccctgctgggattgggcgctttgttatacgatacgcacataacactcctttccggttctttcgcttacggcctgggggacggcctcggctacattgtcatctgctatatgtgcgccggagctatcaaacggagcaattctttgcggatgttcaggctgtactgccttatgttctttgccgagtattttgttatttcaggcctgttttccctttacttcaattattttgatacgccccacaagcttctcgctttcggcgttgtgctggtgctggtcagcgtcagccttttgctcatgccgtttatgcaaaaaaaattgtttgacgcggactggacggacggactttaccttagggacatgcaggaatattcccttcccttcgcgcggacggaagcgattaacgcgcaaaacaaccttgatctgacgccccgtgaagaggaaatttttaccatgctgcttacgggcagggcgcccaaagaaatcgcttataccctgaaaatcagttactatacggttcttttccaccagaaaaatctttaccgcaagctgggcatacagagcagggctgaactttttgcccggtacagtattccaacggagaaaagtttataa

SEQ ID NO: 29602 - protein, 333 aa, Unknown
  Obtained from environmental sample
  DOMAIN (268)...(325): Bacterial regulatory proteins, luxR family
  misc_feature (1)..(333): Xaa is any amino acid
MALIHVLLRVFTMPRGAYSPAFHTANETWGAVSVTAVFLVIVFLCGKKQQEIIAGSGDSDGKGSGVPFVICLHIVFFMIVCMVNYIEWGENSLSGLAFGAGTFISVGLVIIVQLLIGRSALYLWLMFLVFSLLGLGALLYDTHITLLSGSFAYGLGDGLGYIVICYMCAGAIKRSNSLRMFRLYCLMFFAEYFVISGLFSLYFNYFDTPHKLLAFGVVLVLVSVSLLLMPFMQKKLFDADWTDGLYLRDMQEYSLPFARTEAINAQNNLDLTPREEEIFTMLLTGRAPKEIAYTLKISYYTVLFHQKNLYRKLGIQSRAELFARYSIPTEKSL

SEQ ID NO: 29603 - DNA, 1254 bp, Unknown
  Obtained from environmental sample
  misc_feature (1)..(1254): n is a, c, g, or t
ttggaacaccagacggaaattaagcatctccttgaattaaagacagaagaagtaaaactacgcgaagcggcggaactggaggcggataacacatcccgtgccaagaacgacctcctttcccacattagccatgaaataagatcccagttaaacgccgtcatcggcatgataagcatcgcaaaagaaaaaaaagatattgagagcgtaaaagtttatcttgaaaaagcaggcgatgccgcaaagcacatgctgagcgttatcaacaatattgttgatatacccaaaattgatgtgcccaaaattgattcatataaacttgagctttccaagagtgaatttgattttggaaagatgataacaaaagtcgtagacgtaacaggtatcagcgcccaggaaaagcatatacagattgtatttaatataagtccaaatattccgtctattgtaatcggcgacgaattgcgactcgcgcaggttattattaatctgatgaccaacgcgataaaattcacgccggataacggcaaaattcagttgaacgcggaaaagctggaagaaaaaaacgatgaggttacgataaaaatcgaagttgtggacagtggtatcgggatttcgccggaacagcagaaaaagcttttctcggcttacaaccaggccgaccacacaatcacgaaacaatccgacggctcgggaatggggcttgccatttccaaacggaatatagagcttatgcagggaaaaatatggattgaatcggaacttggcaagggggcaatatttatatttaccataaaagcaaagaaaggaaacgagaacaagatttccgccgaatcagacaagaatgaatttgattttaaaaattattcgatattgatagcggaggacatagagttcagcaggctaatccttgccaaatatttggaaaagaccggcatcgccattgactttgtcaataacggcaaagaggctgtatcaacgtttaaggaaaatcctgataaatacaatttgattctaatggacattaacatgcctgaaatgaacggaatcgatgccacacgcctaatacgcgcctttgaatccgaactaaaagacgcgggaaattcacacaaggaaaccaccatcattgccatgacagctaatgtttttaaggaagatattgaaaaatttctggcggcggggatgaatgatcatgtcgctaagcctattgtaccaaagaaaatatgtgagaagcttaagaaatatcttgactcataa

SEQ ID NO: 29604 - protein, 417 aa, Unknown
  Obtained from environmental sample
  DOMAIN (34)...(99): His Kinase A (phosphoacceptor) domain
  misc_feature (1)..(417): Xaa is any amino acid
MEHQTEIKHLLELKTEEVKLREAAELEADNTSRAKNDLLSHISHEIRSQLNAVIGMISIAKEKKDIESVKVYLEKAGDAAKHMLSVINNIVDIPKIDVPKIDSYKLELSKSEFDFGKMITKVVDVTGISAQEKHIQIVFNISPNIPSIVIGDELRLAQVIINLMTNAIKFTPDNGKIQLNAEKLEEKNDEVTIKIEVVDSGIGISPEQQKKLFSAYNQADHTITKQSDGSGMGLAISKRNIELMQGKIWIESELGKGAIFIFTIKAKKGNENKISAESDKNEFDFKNYSILIAEDIEFSRLILAKYLEKTGIAIDFVNNGKEAVSTFKENPDKYNLILMDINMPEMNGIDATRLIRAFESELKDAGNSHKETTIIAMTANVFKEDIEKFLAAGMNDHVAKPIVPKKICEKLKKYLDS

SEQ ID NO: 29605 - DNA, 558 bp, Unknown
  Obtained from environmental sample
  misc_feature (1)..(558): n is a, c, g, or t
atgaactttgtaagtattgattttgaaacagcgaaatactcgcgggaaagcgcctgctcgttgggcctggtaaaatatcaggctggaaaggtgaccgaaacctattattcgttgattcggccgcccgtgctgtacattcgccctgatttcaccgaaattcacggccttaccgtggacgatgttaaagacgcccccacgttcgcggatttgtgggaaagcgccataaagccttttatcggcagccttccccttgcggcccacaacgccccgttcgatatgggcgtactttgggctgttcttgagcgctatgaacttgagattcccgcgttgccgtatttttgtacttgcagccttgcccgtcatacctggccggaactgaaatctcatgccctcgcgtcattggctgaacatttcggcattgtctatgctgctcataacgccctcgccgatgcggagacttgcgggaaactggtgctaatggctgctgaaaaattccgttctgggagcataaaacgattgctctccgccacaggagtggagatgagcgtgctggggtga

SEQ ID NO: 29606 - protein, 185 aa, Unknown
  Obtained from environmental sample
  DOMAIN (3)...(158): Exonuclease
  misc_feature (1)..(185): Xaa is any amino acid
MNFVSIDFETAKYSRESACSLGLVKYQAGKVTETYYSLIRPPVLYIRPDFTEIHGLTVDDVKDAPTFADLWESAIKPFIGSLPLAAHNAPFDMGVLWAVLERYELEIPALPYFCTCSLARHTWPELKSHALASLAEHFGIVYAAHNALADAETCGKLVLMAAEKFRSGSIKRLLSATGVEMSVLG

SEQ ID NO: 29607 - DNA, 648 bp, Unknown
  Obtained from environmental sample
  misc_feature (1)..(648): n is a, c, g, or t
gtggctactttaaatttagaaaaattgtatattaccttcagaatggttttgaaaaataaattaggtattgcaaaccaggcgaagctagacaaggcagaggaaaaaatcagcaaacaaaaggctaagattctctttgattctgggaaaattgataagataaaagttggaacttatgccgggcttgctcaaatccataaatttctattcggtgatatttatgactttgctggaaaaatgcgtgatgtgaatatcgctaagggaaattttcgttttgctcccttgatgtatttggaacagtcattgaagcatataaataaaatgccacaaaagacctttgatgaaattatcgcaaagtatgtggagatgaatatagctcatccctttcgggaaggcaacggtcgctcaatgagaatttggctggatttaatccttaaaaaggaattgaaggtggttatagattggagcaaggtagataaaagcgactatcttgcggcgatggagcgtagccccgtgaaggatatagagataaaacagctccttaaaagtgctttgaccaaaaaaataaatgagcgtgatatatttattaaaggagttgatgcaagttataattacgaaggctacaatgagttcaaaaccgatgatttatga

SEQ ID NO: 29608 - protein, 215 aa, Unknown
  Obtained from environmental sample
  DOMAIN (61)...(172): Fic protein family
  misc_feature (1)..(215): Xaa is any amino acid
MATLNLEKLYITFRMVLKNKLGIANQAKLDKAEEKISKQKAKILFDSGKIDKIKVGTYAGLAQIHKFLFGDIYDFAGKMRDVNIAKGNFRFAPLMYLEQSLKHINKMPQKTFDEIIAKYVEMNIAHPFREGNGRSMRIWLDLILKKELKVVIDWSKVDKSDYLAAMERSPVKDIEIKQLLKSALTKKINERDIFIKGVDASYNYEGYNEFKTDDL

SEQ ID NO: 29609 - DNA, 342 bp, Unknown
  Obtained from environmental sample
  misc_feature (1)..(342): n is a, c, g, or t
atgagcgtgatatatttattaaaggagttgatgcaagttataattacgaaggctacaatgagttcaaaaccgatgatttatgaatatcacctctccgctccgcgtatggacttttacaacatcacgccaaaagtccgcgaagccattgcagaaagcggtgtgcaagacggaattgccgttgtctattgcccacacaccaccgccggcatcacgataaacgaanacgcagacccagacgtggtgcgtgatttgctctttggcttggacaaagcattccccgacgccccgnatttcgccacgccgaangcaacagcacagcgcatctcaaagcgagtgcggtag

SEQ ID NO: 29610 - protein, 113 aa, Unknown
  Obtained from environmental sample
  DOMAIN (38)...(113): Uncharacterised protein family UPF0047
  misc_feature (1)..(113): Xaa is any amino acid
MSVIYLLKELMQVIITKATMSSKPMIYEYHLSAPRMDFYNITPKVREAIAESGVQDGIAVVYCPHTTAGITINEXADPDVVRDLLFGLDKAFPDAPXFATPXATAQRISKRVR

SEQ ID NO: 29611 - DNA, 468 bp, Unknown
  Obtained from environmental sample
  misc_feature (1)..(468): n is a, c, g, or t
atgcacaaggacgcccttgaagcctttgagcgggcgctgtattacaaagcggacgacccgaccatattttatcttacaggcgagtcggcgtctgtcgcggcggcttcgactcttggttttaattccaattccatcgctgaaagggagcgttatcagaaccttgccgaatcggcgtacctgcgggcgatagaactggatccgacctatgccaagccgagactcggccttggcattttatacgcgtttgacatggacaggcccgccgacgcggcgcttcagttggatcgttatctgcaaattatgcctaacgacataaggggcatgtttgtattggcccgcgcgtattatatgaacggtgaaaatgatcgcgccattgatctttacaacaggatcatcaaccggagcaaggatcctaaagttaaggccgaggcgcaaaataatatagaaattgtaaggaatttgatgtaa

SEQ ID NO: 29612 - protein, 155 aa, Unknown
  Obtained from environmental sample
  misc_feature (1)..(155): Xaa is any amino acid
MHKDALEAFERALYYKADDPTIFYLTGESASVAAASTLGFNSNSIAERERYQNLAESAYLRAIELDPTYAKPRLGLGILYAFDMDRPADAALQLDRYLQIMPNDIRGMFVLARAYYMNGENDRAIDLYNRIINRSKDPKVKAEAQNNIEIVRNLM

SEQ ID NO: 29613 - DNA, 360 bp, Unknown
  Obtained from environmental sample
  misc_feature (1)..(360): n is a, c, g, or t
atggaaccccgaaaagcccttgaagccattttttatgtattgcgtaccggtatccagtggaaggctttgcctgtttcctttggctcttccagcgctgtccaccgctatttcatgttttggtcggagaccggcttctttaaggccatgtgggcttgcggattacgaaagtatgatgaagtaaaaggcataaactggacatggctaagcggggacggttgcatgaccaaggctccattggcccaggaaacagtcggtgcaaatccagccgaccgtgggaaaaaaagggagcaagcggcatatgctcgtagacggcatcggggtacctattgccatggtagtaaccggagcaaacaggcatga

SEQ ID NO: 29614 - protein, 119 aa, Unknown
  Obtained from environmental sample
  misc_feature (1)..(119): Xaa is any amino acid
MEPRKALEAIFYVLRTGIQWKALPVSFGSSSAVHRYFMFWSETGFFKAMWACGLRKYDEVKGINWTWLSGDGCMTKAPLAQETVGANPADRGKKREQAAYARRRHRGTYCHGSNRSKQA

SEQ ID NO: 29615 - DNA, 456 bp, Unknown
  Obtained from environmental sample
  misc_feature (1)..(456): n is a, c, g, or t
gtgcaaatccagccgaccgtgggaaaaaaagggagcaagcggcatatgctcgtagacggcatcggggtacctattgccatggtagtaaccggagcaaacaggcatgatgtttcccagcttgaaacgcttttggattctatagtcatagaaaggcctgacccattcgagcatcctcaaaatctctgccttgacaaagggttttccggcgagccggctttggaaacggttgtattaaagggttttataccacatataaaaagtcgaggagaggaaaaaagcagtaacgaacaaaatccggcatacaaagcccgccgatgggtagttgaagttacccactcgtggatgaatagattccgaaaacttctggttcgatatgagaaattagacaagacatatagaggactgctcatgttatcgtgtgcttttatcgctcttcgtaaggcagaggttatttag

SEQ ID NO: 29616 - protein, 151 aa, Unknown
  Obtained from environmental sample
  DOMAIN (2)...(142): Transposase DDE domain
  misc_feature (1)..(151): Xaa is any amino acid
MQIQPTVGKKGSKRHMLVDGIGVPIAMVVTGANRHDVSQLETLLDSIVIERPDPFEHPQNLCLDKGFSGEPALETVVLKGFIPHIKSRGEEKSSNEQNPAYKARRWVVEVTHSWMNRFRKLLVRYEKLDKTYRGLLMLSCAFIALRKAEVI

SEQ ID NO: 29617 - DNA, 756 bp, Unknown
  Obtained from environmental sample
  misc_feature (1)..(756): n is a, c, g, or t
ttgaaagaaaagggagttaaacgctttgccctgcacacaatggtcgcctcaaacgagctttccgctccatatcacgttgaaaccgcgaggatgctttttgagcttgccgttgagataaataaaaaagcggaagtgcgccttgaatttatcaatctcggaggcggagtgggaatcccttacaaacccgaacaaaccgctgtagattatcagtccttaaccgccgtcattcaaaaagcgtatgatgaaataataaaacctgccgggcttgacccgataaacatacgcacagagtggggtagggtggtaaccggtccttacggctggcttgtcgcgcgggcgattcataaaaaagaaatttaccgcaaatacataggccttgacgcctgcatggccgacttaatgcgccccgccctttacggcgcgtatcatcacataacaattccgggaaaggaaaacgaagcgctcaccgaagtttatgacgtggtgggaagcctgtgcgaaaacaacgacaaattcgcagttcagcgaagcctgcctaagatagaagttgccagcgaaaacggaataggggattttgtcgttatccacgacgccggagctcacggaagggcgatgggctttaactacaacggcaaactgcgctgcggggaactgcttctgcggcaggacggctctattgttcaaatccgccgcccggaaacaacagacgactatntcgccacgctggatcttgccggagtcagggatttcagataa

SEQ ID NO: 29618 - protein, 251 aa, Unknown
  Obtained from environmental sample
  DOMAIN (108)...(220): Pyridoxal-dependent decarboxylase, C-terminal sheet domain
  misc_feature (1)..(251): Xaa is any amino acid
MKEKGVKRFALHTMVASNELSAPYHVETARMLFELAVEINKKAEVRLEFINLGGGVGIPYKPEQTAVDYQSLTAVIQKAYDEIIKPAGLDPINIRTEWGRVVTGPYGWLVARAIHKKEIYRKYIGLDACMADLMRPALYGAYHHITIPGKENEALTEVYDVVGSLCENNDKFAVQRSLPKIEVASENGIGDFVVIHDAGAHGRAMGFNYNGKLRCGELLLRQDGSIVQIRRPETTDDYXATLDLAGVRDFR

SEQ ID NO: 29619 - DNA, 486 bp, Unknown
  Obtained from environmental sample
  misc_feature (1)..(486): n is a, c, g, or t
atggatattaatcttgagaaagcaacaattgaagatgcaaatgaaattcatcaaatgcaattaaaatcatttaaggaattactggataaatatcaggattataatataagccctggaaatgaacccattgacaaagttattgcacgaataaatcaaaaggaaacagattattacattataaaatataataatatttcagttggtgcaattaggattataaacttggaagatggaaagctaaatagaatttctccaatatttattttgccagaatttcaaaataaaggaatagctcaaagtgtatttaaaactattgaagaaatgtataaaccacaaagcggttgggtattggatacaatattacaggaaaaaggtaattgttatctatatgaaaaaatgggatatgtaaaaactggaaaaattgaaaaaataaacgaaaaaatggacattgtgtattacgaaaaaagtaataaaacgattttataa

SEQ ID NO: 29620 - protein, 161 aa, Unknown
  Obtained from environmental sample
  DOMAIN (58)...(136): Acetyltransferase (GNAT) family
  misc_feature (1)..(161): Xaa is any amino acid
MDINLEKATIEDANEIHQMQLKSFKELLDKYQDYNISPGNEPIDKVIARINQKETDYYIIKYNNISVGAIRIINLEDGKLNRISPIFILPEFQNKGIAQSVFKTIEEMYKPQSGWVLDTILQEKGNCYLYEKMGYVKTGKIEKINEKMDIVYYEKSNKTIL

SEQ ID NO: 29621 - DNA, 1077 bp, Unknown
  Obtained from environmental sample
  misc_feature (1)..(1077): n is a, c, g, or t
ttgagggccgtttgtttgtttgagaccaaccagcgctccggtcgggcaaagccctccctgcgcgtaccgctgccgctcggctatctacattacactggagttatgcatagaaacgtcatcatcatcggctccggcccggcgggatacactgcggccatctacactgcacgggcgggtctttcgccgctggtcttcgagggcgcccagccgggcggccaactgaccatcaccaccgaggtggagaactatccgggattcaaggacggcgtcatgggccccgcgctgatggacgaaatgcgggcgcaggccacgcgccttggggccgaaatcaaagcggagtccgtgctgaaggtcggcatgggccagcgccctttcacgctggagacagacggcgggcaacacacctgcgatgcgttgataatcgccacgggcgcatcggccagatggctgggcataggcaaggatgaagaactttcgcgtggcggcggcggcgtgtccgcctgcgccacctgcgacggttttttctacaggggcaaagaggtcgccgtggtgggcggcggcgacacagcgctggaggaggccacgtacctggccaacctggcgtcgaaggtgacgctgatacaccgccgagacgcgctgcgggcatccaaggccatgcagactagggccatgtccaaccccagaatagttttcgcctggaacaaggtggtagcgaagattctgacggaggcaaaggaactgccaagcggtggcagcgtggagcggatttcaaagctgcgcctgaaggacacggctggcggtcaggactctgaccttaaggttgacgggctgttcgtagccattggtcaccgcccgaatacagacctgttcaaagaccaactgccgatggacgctgacggctatctggtggtggaaaaaggctccactaggacatccgtcccaggcgtgttcgcctgtggcgacgtgcaggacaacaagtaccgccaagccatcaccgccgctggcagcggctgcatggctgccatagacgcagagcgctggctgaccgaaaacggacaactggcaactgatatttag

SEQ ID NO: 29622 - protein, 358 aa, Unknown
  Obtained from environmental sample
  DOMAIN (38)...(244): FAD dependent oxidoreductase
  misc_feature (1)..(358): Xaa is any amino acid
MRAVCLFETNQRSGRAKPSLRVPLPLGYLHYTGVMHRNVIIIGSGPAGYTAAIYTARAGLSPLVFEGAQPGGQLTITTEVENYPGFKDGVMGPALMDEMRAQATRLGAEIKAESVLKVGMGQRPFTLETDGGQHTCDALIIATGASARWLGIGKDEELSRGGGGVSACATCDGFFYRGKEVAVVGGGDTALEEATYLANLASKVTLIHRRDALRASKAMQTRAMSNPRIVFAWNKVVAKILTEAKELPSGGSVERISKLRLKDTAGGQDSDLKVDGLFVAIGHRPNTDLFKDQLPMDADGYLVVEKGSTRTSVPGVFACGDVQDNKYRQAITAAGSGCMAAIDAERWLTENGQLATDI

SEQ ID NO: 29623 - DNA, 540 bp, Unknown
  Obtained from environmental sample
  misc_feature (1)..(540): n is a, c, g, or t
gtgtatcagcgtcaccttcgacgccaggttggccaggtacgtggcctcctccagcgctgtgtcgccgccgcccaccacggcgacctctttgcccctgtagaaaaaaccgtcgcaggtggcgcaggcggacacgccgccgccgccacgcgaaagttcttcatccttgcctatgcccagccatctggccgatgcgcccgtggcgattatcaacgcatcgcaggtgtgttgcccgccgtctgtctccagcgtgaaagggcgctggcccatgccgaccttcagcacggactccgctttgatttcggccccaaggcgcgtggcctgcgcccgcatttcgtccatcagcgcggggcccatgacgccgtccttgaatcccggatagttctccacctcggtggtgatggtcagttggccgcccggctgggcgccctcgaagaccagcggcgaaagacccgcccgtgcagtgtagatggccgcagtgtatcccgccgggccggagccgatgatgatgacgtttctatgcataactccagtgtaatgtag

SEQ ID NO: 29624 - protein, 179 aa, Unknown
  Obtained from environmental sample
  misc_feature (1)..(179): Xaa is any amino acid
MYQRHLRRQVGQVRGLLQRCVAAAHHGDLFAPVEKTVAGGAGGHAAAATRKFFILAYAQPSGRCARGDYQRIAGVLPAVCLQRERALAHADLQHGLRFDFGPKARGLRPHFVHQRGAHDAVLESRIVLHLGGDGQLAARLGALEDQRRKTRPCSVDGRSVSRRAGADDDDVSMHNSSVM

SEQ ID NO: 29625 - DNA, 321 bp, Unknown
  Obtained from environmental sample
  misc_feature (1)..(321): n is a, c, g, or t
gtgtgccacactgtttttagtctctggcatgngtcagcgaaccccctctctctttcgcctgggagaagaaaggggcccacccgattatccaggcaacagctatcgcaggatgncaacatggcacaaggcacagtcaagtggttcaacgcggaaaaggggtacggcttcatcacccctgacggaggcggcaccgacctcttcgtccaccacagcgcaatacaggagaagggtttccgcactctacaggaaaaccagagggtcaactttgaagtgaccgaggggcagaagggaccccaggccgccaatgtgacaaaggcctaa

SEQ ID NO: 29626 - protein, 106 aa, Unknown
  Obtained from environmental sample
  DOMAIN (40)...(106): Cold-shock' DNA-binding domain
  misc_feature (1)..(106): Xaa is any amino acid
MCHTVFSLWHXSANPLSLSPGRRKGPTRLSRQQLSQDXNMAQGTVKWFNAEKGYGFITPDGGGTDLFVHHSAIQEKGFRTLQENQRVNFEVTEGQKGPQAANVTKA

SEQ ID NO: 29627 - DNA, 1347 bp, Unknown
  Obtained from environmental sample
  misc_feature (1)..(1347): n is a, c, g, or t
atgatctttcgggtttggtggacgtgcccgcttgtgaaagctgacagggttattgcgacttaccgccgaatgcggaaagagccgctatggagactgcttgcttcagccaatggccccatagtaattgggttattgcaaacgcatctttatgagaatgaacggagcttgcctgcgtctattctgcatgagcgaattggacgcgatctggaagcgcttagggcgcagggggaagaccttcctcaaaccgcccaagcttatatatcagggtggctggcggaaggctgtctggaaaggcgttttcctgccggagcctctgaagaagagtacgagctctccaccgcgactgtcgaagcgattcgttttttgtcaggcattgatcaaccacactcggcagctacggagagtcggctggccctcgtgatacaggcactggtgaagctggcagaggataccgatacggacaaatcccggaggatcgagctgctgaaagccgagcaggcgcgcatagaaaaagaaattgaggctattcaggagggccggatgcgggtaaccccatacccgtcagcgctggaacagacacgggagattatatcgttggcagatgaactgacaggagacttccgccgagtccgcgatcagtttgaccaattgaatcgcgagctgagaggacaacttatggagaacgaaggcagccgcggtgaagtactgaactccgtattttcaggtatagatctgatttccgaaagcgaggccggtaaaacattctatgccttctggcgcttactgaccgatcctgagcagtcggcagtgcttgagcaagcgctggacaatgttatgtcccgcgagtttgtcacacagctggaattaaaagacaggcgctttctaagacgtatgacaggcaacttgcttgaacaaggcgggatagttcataaagtcatgcaggattttgcccgcagcctcaaacactttgtccaaagccgtgaatatcttgaacagcggcggttaaatcaaattctgaaagacgcgcaacgcgccgcgaaggctgtcaaggacgaagttaaaacaacaaatataatcaaagaccttgtgttgaccagcagccgtatccgctcattgtctcaatgggtgctttacgatccatccatacaggctttgccccgcggaatgtatgacggggatatttctaatattgatttgaatactgtcgctgaactggttgtccagtccgagatcgactttagatcactcaaggcgaatgtacgcaaggtgcttgaaaagctctctcaagcatcaatacatgatgtacttgaacagtaccctgcggctcagggatttggcagtgtgtag

SEQ ID NO: 29628 - protein, 448 aa, Unknown
  Obtained from environmental sample
  misc_feature (1)..(448): Xaa is any amino acid
MIFRVWWTCPLVKADRVIATYRRMRKEPLWRLLASANGPIVIGLLQTHLYENERSLPASILHERIGRDLEALRAQGEDLPQTAQAYISGWLAEGCLERRFPAGASEEEYELSTATVEAIRFLSGIDQPHSAATESRLALVIQALVKLAEDTDTDKSRRIELLKAEQARIEKEIEAIQEGRMRVTPYPSALEQTREIISLADELTGDFRRVRDQFDQLNRELRGQLMENEGSRGEVLNSVFSGIDLISESEAGKTFYAFWRLLTDPEQSAVLEQALDNVMSREFVTQLELKDRRFLRRMTGNLLEQGGIVHKVMQDFARSLKHFVQSREYLEQRRLNQILKDAQRAAKAVKDEVKTTNIIKDLVLTSSRIRSLSQWVLYDPSIQALPRGMYDGDISNIDLNTVAELVVQSEIDFRSLKANVRKVLEKLSQASIHDVLEQYPAAQGFGSV

SEQ ID NO: 29629 - DNA, 390 bp, Unknown
  Obtained from environmental sample
  misc_feature (1)..(390): n is a, c, g, or t
atggctttccggaaaggaggaatgggagggcctggcttgtattggggctgtgaacaccaagtttccagcaaaaagggagagacaaacgaatggcattattacatcacaagccgtggcttgacggcggaggaattgctcaggcacgcccgtttggaatggtctgtagaaacaatgcattggctgcttgacgtacatttcgatgaagatttctgccgcgttgaggaccggaacgtccagcaaaatctgaacattgtccgcaagatcgcgctgaacacggttaaaggctacaaaaccaagacggcttccaaacgccctatttccaaacttatgtttgattgtttgcttgaacctgggaatatcctgtcttttttgactgccaatgaaaattga

SEQ ID NO: 29630 - protein, 129 aa, Unknown
  Obtained from environmental sample
  misc_feature (1)..(129): Xaa is any amino acid
MAFRKGGMGGPGLYWGCEHQVSSKKGETNEWHYYITSRGLTAEELLRHARLEWSVETMHWLLDVHFDEDFCRVEDRNVQQNLNIVRKIALNTVKGYKTKTASKRPISKLMFDCLLEPGNILSFLTANEN

SEQ ID NO: 29631 - DNA, 417 bp, Unknown
  Obtained from environmental sample
  misc_feature (1)..(417): n is a, c, g, or t
gtggaatgtgtaagctggtatgatgccatagaatactgtaaccgtttaagccagcgggaaggtttaactccggcgtatacgatagacaagagccggagcgacacgaataacaggaaccactatgacaatgttaaatggctggtaacctggaatcaaaacgccaacggctaccgcttgcccaccgaggcggaatgggaatacgcctaccgtgcgggaacaaccactcctttcagcacggggaacaacattaccacaagccaggctaactacaatgggaattatccctacaataacaacgctgaaggtacttaccgcaaaacgacgacggcagtgggaagttttccgccgaatccctggggcctgtacgacatgcacggaaacgtaagcgaatggtgctgggacatttttggagcctag

SEQ ID NO: 29632 - protein, 138 aa, Unknown
  Obtained from environmental sample
  DOMAIN (1)...(138): Domain of unknown function (DUF323)
  misc_feature (1)..(138): Xaa is any amino acid
MECVSWYDAIEYCNRLSQREGLTPAYTIDKSRSDTNNRNHYDNVKWLVTWNQNANGYRLPTEAEWEYAYRAGTTTPFSTGNNITTSQANYNGNYPYNNNAEGTYRKTTTAVGSFPPNPWGLYDMHGNVSEWCWDIFGA

SEQ ID NO: 29633 - DNA, 357 bp, Unknown
  Obtained from environmental sample
  misc_feature (1)..(357): n is a, c, g, or t
ttgattacgaaagccattctgttctacgatctggtgcggaaagtaccccggctgaaaggggagaccaaggcggaatcccttacccgtattcgtacacagggttcgcatacngccaaggttcttaaagtagccgaccgtatttccaacatggtttccctgggctttgttactaacatggaatttgtcagccgctacaccgacgaaaccgagcgttatatctaccccattgccggggaagttaatcaatacatgcttaaggaattaggaacgctggtcgaatcccggcggaagtttttggccgatttccgaaagattgaagcgccaacaaagactgaggattcgacggattttatatag

SEQ ID NO: 29634 - protein, 118 aa, Unknown
  Obtained from environmental sample
  misc_feature (1)..(118): Xaa is any amino acid
MITKAILFYDLVRKVPRLKGETKAESLTRIRTQGSHTAKVLKVADRISNMVSLGFVTNMEFVSRYTDETERYIYPIAGEVNQYMLKELGTLVESRRKFLADFRKIEAPTKTEDSTDFI

SEQ ID NO: 29635 - DNA, 1773 bp, Unknown
  Obtained from environmental sample
  misc_feature (1)..(1773): n is a, c, g, or t
atggccagcgtgggggccagcgtggactgggaccgggaacgctttaccatggacgatggcttaagccgcgcggtgcgggaggtctttgtttctctgtacgaacgcggcctgttgtacaaaggcaattatctggtgaactggtgtaccacttgtggaacggccctgtcagacgacgaggtggaacacgaggacgctcccggaaagatgtaccacatccgttacccctttgttgactctagcggctttgtggaaattgccaccacccggcccgaaacccttctgggcgatactgcggtggcggtcaaccccgaagacgagcgatacgccggtttaattgggaaaaaacttcgtctgccgctggcggaccgggaaataccccttatagcggacagctatgttgaccgcgcctttggcacgggggccttgaagatcaccccggcccacgatcccaacgactgggaagttggccgccgccacggcctagcggcgattaacgtgctgggtcccgacggcaggctcaacgattcggtcccggaaaagtaccggggcctgagcgtcaaggaaagccgggaaaaggttctggaggacctaaaggcagggggcttttttgccggggaggagaatatcacccacgcgctgggccactgctaccgctgccacaccgtgatagagccgaatttgtccgagcagtggtttgtccgcatgaaaccccttgcagacaaggcgctggcagcctggcggcggggggagatcatcttctatcccaaaaagtgggaaaacacctacgaacactggcttgaaaatatccgggactggtgcgttagccgccagctctggtggggccaccgaattcccgcctggtattgcgaggattgcggcaaaatctcggtttcccgtaccgacctcgcggctgccccccattgcggctccaaaaaaatcgagcaggatcccgacgtgcttgacacatggttttccagctggctttggccattcaccgttatgggctgggaaaacgacaagtgcgacactgaagattttaagcgctattatcctactacggcccttgtaaccggctacgacatcatctttttctgggtggcaaggatgatcatggcaggccttgagttcaccggcaaggttccttacagggacgtgtatattacccagcttatccgcgacaaacaaggccgtaagatgaccaagagccttggaaacggaattgaccctttggaaattattgataaatttggcgctgacgctctaagattcacccttgcctacctttgtgcccagggacaggacattctgatggataaggagtcgtttaagctgggctccaaattcgcgaacaaggtctggaacgcaagccgctatattcttatgaatctggaggggaggaatctgatagaaaaccccggcttgcttcctgttgacaagtggatatatgcaaggcttaacagcacagcgcgcgcaatggaagaagcttttctctcttaccgtttcaatgatgccgccggggctgcctacgaatacttttggagtgatttttgcgactggtatgtggaagccactaaactttcgattaaaggtgaaagcaacgaggagaaagacagggcaagcacggtgctgcttgatgtgctggctggatctttaaggctgcttcaccccctccttccatttgtaaccgaagaaatctacggcaagcttccgaacataaaaaatgagcttctcattacagcgccttatccggttatcaaaaagagctgccaataa

SEQ ID NO: 29636 - protein, 590 aa, Unknown
  Obtained from environmental sample
  DOMAIN (478)...(588): Anticodon-binding domain
  misc_feature (1)..(590): Xaa is any amino acid
MASVGASVDWDRERFTMDDGLSRAVREVFVSLYERGLLYKGNYLVNWCTTCGTALSDDEVEHEDAPGKMYHIRYPFVDSSGFVEIATTRPETLLGDTAVAVNPEDERYAGLIGKKLRLPLADREIPLIADSYVDRAFGTGALKITPAHDPNDWEVGRRHGLAAINVLGPDGRLNDSVPEKYRGLSVKESREKVLEDLKAGGFFAGEENITHALGHCYRCHTVIEPNLSEQWFVRMKPLADKALAAWRRGEIIFYPKKWENTYEHWLENIRDWCVSRQLWWGHRIPAWYCEDCGKISVSRTDLAAAPHCGSKKIEQDPDVLDTWFSSWLWPFTVMGWENDKCDTEDFKRYYPTTALVTGYDIIFFWVARMIMAGLEFTGKVPYRDVYITQLIRDKQGRKMTKSLGNGIDPLEIIDKFGADALRFTLAYLCAQGQDILMDKESFKLGSKFANKVWNASRYILMNLEGRNLIENPGLLPVDKWIYARLNSTARAMEEAFLSYRFNDAAGAAYEYFWSDFCDWYVEATKLSIKGESNEEKDRASTVLLDVLAGSLRLLHPLLPFVTEEIYGKLPNIKNELLITAPYPVIKKSCQ

SEQ ID NO: 29637 - DNA, 1032 bp, Unknown
  Obtained from environmental sample
  misc_feature (1)..(1032): n is a, c, g, or t
atgattggtatagagcttggacccatccgccctccgtcagaatcgcaaagccttttgatacgtgtaactagaggttgccattggaataaatgttttttttgcggtttgtacaaaggcgtgaaacatagcgtcagaccaacaaatgatattttagaagatatttataaaagtgcggaactttatagcaaaaaccacaccatttttaattcttgctttcttcaagatgccgatgccttaaatattccaacagaagacttgctaataatattggacaaaataaaaacctgctttccttcacttcaaacaattacaagttatgcacgctgcgacagcattttaagaaaaagtcaaagtgaattgacagtcttgagggaatcagggcttaagcatttatatcgtggaattgaaactggctctgatacgatattaaaaaacatatgcaagggtataacttcaaaagatataattgattccggtttgatgtgtaaaaacgcgggaataatattatcggattttactttacttggtattggcggcagggaattgtcaaaagaaaacgcaatagaaaccgccagagtaataaacgcggttaatcccgattacataagggtacaccatacggctttcaagcctgatactaaactggggcgcgatgtagaaaagggcattttcagcttacaatcagaggaagaaatagtcagggaacaacgcttgtttattgaaaatttaaatggtattgacagtatttatattaatgaacatattgtaaaccttttaatggaagtacggggtaaattaccttccgccaaatatcatatgcttaaaatcatcgaccattatttgggaatgtcagaagacgataaattaaattttgctattggaaggcgcattgggtattattaccgtttatctgatatacatgacaaatcaaaaaatacggcagtttctcaatatatagacaatctaaaagcaaaacattcaattgttaattttgacaaggtatgtaatttttgcagggctaatatgatatag

SEQ ID NO: 29638 - protein, 343 aa, Unknown
  Obtained from environmental sample
  DOMAIN (20)...(191): Radical SAM superfamily
  misc_feature (1)..(343): Xaa is any amino acid
MIGIELGPIRPPSESQSLLIRVTRGCHWNKCFFCGLYKGVKHSVRPTNDILEDIYKSAELYSKNHTIFNSCFLQDADALNIPTEDLLIILDKIKTCFPSLQTITSYARCDSILRKSQSELTVLRESGLKHLYRGIETGSDTILKNICKGITSKDIIDSGLMCKNAGIILSDFTLLGIGGRELSKENAIETARVINAVNPDYIRVHHTAFKPDTKLGRDVEKGIFSLQSEEEIVREQRLFIENLNGIDSIYINEHIVNLLMEVRGKLPSAKYHMLKIIDHYLGMSEDDKLNFAIGRRIGYYYRLSDIHDKSKNTAVSQYIDNLKAKHSIVNFDKVCNFCRANMI

SEQ ID NO: 29639 - DNA, 1059 bp, Unknown
  Obtained from environmental sample
  misc_feature (1)..(1059): n is a, c, g, or t
gtgccctttagggaattccatggccttgtccagggcaggaggggagggcagcaggcggcaattatccgagggctgccgggggctgccgcggaaatggactcaggcctggcgggccgcctcagctttgaggaaggctctttcggttttgttaaaaagagcgacgcgcttatgggcgccgagcttgcccggcggctgggcatcaaggccggcgacgagattaccctgttttccatcccgtcgctttttaacgcctcagtagatgaggactcttccggtttgcaattttttaccgttaccggaatattcagaaccggtttttatgaatatgacacaagctggatttttattgatattgacagcgcggcggctttttccgaaggcggccctgttctgggaataaagctgaaaaaccgcttccatgaccagcaggcccttgatctggtccggaaaaatctcgggaatatcccggcttttgacggggcggccttttcaagctggcgcgattacaaccgctctttttttggcgcccttcgcacggagaagcttttcatgtttatactggtggggctgatctttatcgtggtggccctgaacatctatcagacccagcggagatcggtgctggaacaccgcgaggaaatagggcttttgcgggccataggcggaggggaacacgccgtgcagtttgtttttgtactggacggcgcgatcatcggcttttccggggcatcggccggccttatttcggggctgcttatcgcttccaatataccgcggtttttttccataatagaatcgattgtaaatttcggcataaatattgttaatatcattgcgagttttttcggcggccttttcggcggcggtgccgccggcataaatgatttcttctttttttcaccggcggtattttacataaaggaaatcccctcgcggataattcccggcgaggttgtcctgatttttctcttcggccttttatccgcgctgctggcggcgtggttcgcgtcgcgcaaggttgcccgcatacggccggctgaagttttaaggtatgagtga

SEQ ID NO: 29640 - protein, 352 aa, Unknown
  Obtained from environmental sample
  DOMAIN (128)...(345): Predicted permease
  misc_feature (1)..(352): Xaa is any amino acid
MPFREFHGLVQGRRGGQQAAIIRGLPGAAAEMDSGLAGRLSFEEGSFGFVKKSDALMGAELARRLGIKAGDEITLFSIPSLFNASVDEDSSGLQFFTVTGIFRTGFYEYDTSWIFIDIDSAAAFSEGGPVLGIKLKNRFHDQQALDLVRKNLGNIPAFDGAAFSSWRDYNRSFFGALRTEKLFMFILVGLIFIVVALNIYQTQRRSVLEHREEIGLLRAIGGGEHAVQFVFVLDGAIIGFSGASAGLISGLLIASNIPRFFSIIESIVNFGINIVNIIASFFGGLFGGGAAGINDFFFFSPAVFYIKEIPSRIIPGEVVLIFLFGLLSALLAAWFASRKVARIRPAEVLRYE

SEQ ID NO: 29641 - DNA, 378 bp, Unknown
  Obtained from environmental sample
  misc_feature (1)..(378): n is a, c, g, or t
atgggtgtttacctcagtacggaatatatcaaaagcattcccaactccctgatcgaatcggcccggctggacggcgcaaagtatctgcgtgttttcggaagcatcatcatgccgatgtcggcccctgtagccgccacggtggcgattctggggataacgggaacatggaacgagttcatgctgataaacatcctggtatcaaggaatgatatgaaatccctgccagtaggcgtaaatatgttttccggagcgttatcgtcggattacggtaaacagttcgcagctctggttatcggcatgacgccaatggtggttttttatctggttttcagaaaacggatcacaaggggggtttccgccggagctgtaaaagattag

SEQ ID NO: 29642 - protein, 125 aa, Unknown
  Obtained from environmental sample
  misc_feature (1)..(125): Xaa is any amino acid
MGVYLSTEYIKSIPNSLIESARLDGAKYLRVFGSIIMPMSAPVAATVAILGITGTWNEFMLINILVSRNDMKSLPVGVNMFSGALSSDYGKQFAALVIGMTPMVVFYLVFRKRITRGVSAGAVKD

SEQ ID NO: 29643 - DNA, 912 bp, Unknown
  Obtained from environmental sample
  misc_feature (1)..(912): n is a, c, g, or t
atgcggtacggctattttaacaatacagaatgcgagtatgtgattgagcgggtcgatacgcccatgagctggaccaattacatcggtaccgagaacatgataggcgttttcaatcagacttgtggcggctacctgttttacaagagcgcggagcatcaccggataacccgttttaggggcaacgccgtgccggctgaccggcccggccattatgtatatctgcgtgatgatgaaaccggcgattactggacaataagctggcagccgacggcaaaacccgttgattgttacagggccaggcacggtctttcttattcggtgtattcatgcgaatattcgggaatttacgcggagcaaaccctgtttatcccgaggggcgcggacgtggaactatgggatgtcaaaatcgaaaaccgttccggcaggcccagaaagataagcgtgttttcctatgccgaactgagctggcatcagatgacgggcgacataaaaattttcaaagcaccctatactgcgccggcgccacgtacagggacggcgttattgagcaggagctccattacgagcaaaacggctgccagttctttaccgccgattttgatcctgacggttttgagattgagcgtgagcgttttaccggcgtctggcaaagcgagaacaaccccgaagcggtggaaaaaggagcgttacaggggcgggccgcgtggcagggcggtaaccagtgcgcggctttgcataaacggctttcgctgcccgaaggcaaagagactaggctttgtttcatgcttggcgagggaaaccgcaaagcgggtttgtcaatacggtcgcaatttatttcagctaacgcgcgtgacgcggcccttgccgcccttgccgcgtactggcgggggaagcagtctaatttgcaggtaa

SEQ ID NO: 29644 - protein, 303 aa, Unknown
  Obtained from environmental sample
  DOMAIN (1)...(63): Putative carbohydrate binding domain
  misc_feature (1)..(303): Xaa is any amino acid
MRYGYFNNTECEYVIERVDTPMSWTNYIGTENMIGVFNQTCGGYLFYKSAEHHRITRFRGNAVPADRPGHYVYLRDDETGDYWTISWQPTAKPVDCYRARHGLSYSVYSCEYSGIYAEQTLFIPRGADVELWDVKIENRSGRPRKISVFSYAELSWHQMTGDIKIFKAPYTAPAPRTGTALLSRSSITSKTAASSLPPILILTVLRLSVSVLPASGKARTTPKRWKKERYRGGPRGRAVTSARLCINGFRCPKAKRLGFVSCLARETAKRVCQYGRNLFQLTRVTRPLPPLPRTGGGSSLICR

SEQ ID NO: 29645 - DNA, 426 bp, Unknown
  Obtained from environmental sample
  misc_feature (1)..(426): n is a, c, g, or t
gtgccggacgacggtctgctttccgccctgacgcttgccgcaaaaagcggcgttgacgtgcggataatcaccccccaccgctgggacaaatggtttgtggcgatagtctcgcgttcctatttccgtcagctcatctcagccggggtaaagatctacgaatacagttccggttttaaccacggcaagacctttgtctgcgatgacgccattgccacggttggtaccacaaacctggacttccgtagtctgtacctgcacttcgagaccggcgtccttatttaccggggtgccgccgtccagtcggtaaaaaaagattttctgcgtactcttcccacttcgcaagagataactctgcgggaatgtacccacaacgcttttcaactggttgccgctgatgtgctaaggattttcgcgccgctgatgtaa

SEQ ID NO: 29646 - protein, 141 aa, Unknown
  Obtained from environmental sample
  DOMAIN (55)...(82): Phospholipase D Active site motif
  misc_feature (1)..(141): Xaa is any amino acid
MPDDGLLSALTLAAKSGVDVRIITPHRWDKWFVAIVSRSYFRQLISAGVKIYEYSSGFNHGKTFVCDDAIATVGTTNLDFRSLYLHFETGVLIYRGAAVQSVKKDFLRTLPTSQEITLRECTHNAFQLVAADVLRIFAPLM

SEQ ID NO: 29647 - DNA, 1068 bp, Unknown
  Obtained from environmental sample
  misc_feature (1)..(1068): n is a, c, g, or t
atgatcctcccatacgccgacgctgaggccaagcntgagtcggtgtacgagcactgcaaaaagatactcaatttctcgcggcgtatgacgggcagccacggtatctgccaggggctaagggcggactggaacgactgccttaacctgggcggcggcgaaagcgtgatggtaagctatctttatctctgggcgctggataatttcgtcaggctggcggaattcctgggtaaaaccgaagatgctgccgcttacagaactatccatgaaaagaccgccgaagtctgccggaagacgctttgggatggcaaatggtatttgcggggctttaccgggaaaggccgtcccatcggcacggacgccgacgctgaaggcaaggtacatctggagagcaacacctgggctgttatcgccggctctgatgatcaccaacggaaaatgcaggcgatggattcggtggaggaatacctgggtacaccctacggactcatgctcaacgcgccggcctatacggttatagatgacgatgtgggctttgtaacccgcgtatatcccggattaaaggaaaacggggcgatcttcagccaccccaatccctgggcctggattgccgaatgtatacttggcaggggcgacagggcgatggatctgtataacagactctgcccagccgcctggaatgacaaatgcgagacccgcaaggccgaaccgtacagcacctgccagtttatcaccggaaaaaaccatccggcgttcggcgaggcgcatcatccctttatgacaggctccggcggctggagctactttgccgccgtccagtatatactgggcatcaggccggattttgacaaacttgtcgttgacccctgcataccggccgggtgggacggatttgacgccgtccgctgtttccggggtgtggaatatcgtataactgtacgaaatcccgaacatttatgcaaaggcgtggctgaaataacggtcaatggcgaaaaacgcgatgtaattcctgttgtagaaaaagggcaggtatgccgggtggaggtggttattggatcaggtaacaggtaa

SEQ ID NO: 29648 - protein, 355 aa, Unknown
  Obtained from environmental sample
  misc_feature (1)..(355): Xaa is any amino acid
MILPYADAEAKXESVYEHCKKILNFSRRMTGSHGICQGLRADWNDCLNLGGGESVMVSYLYLWALDNFVRLAEFLGKTEDAAAYRTIHEKTAEVCRKTLWDGKWYLRGFTGKGRPIGTDADAEGKVHLESNTWAVIAGSDDHQRKMQAMDSVEEYLGTPYGLMLNAPAYTVIDDDVGFVTRVYPGLKENGAIFSHPNPWAWIAECILGRGDRAMDLYNRLCPAAWNDKCETRKAEPYSTCQFITGKNHPAFGEAHHPFMTGSGGWSYFAAVQYILGIRPDFDKLVVDPCIPAGWDGFDAVRCFRGVEYRITVRNPEHLCKGVAEITVNGEKRDVIPVVEKGQVCRVEVVIGSGNR

SEQ ID NO: 29649 - DNA, 942 bp, Unknown
  Obtained from environmental sample
  misc_feature (1)..(942): n is a, c, g, or t
ttgtatctgggacgaacaaggccggcttgtggattgcggggacacctgcaccaccttcttcctgacagcgggcaaggaggacgttctgcaagacttcccgcgcttcatgcccgaacgccagatcaacggacgcctgagtgcggaagaactggaacgccgcctgctgcgtaccttgcagacgggaagcgacagttgcgactggcagttcaaaatgcgcagggactcgccattccctgcgaccttgccttacgccgtctcacgatatgcgggcgccccgcagtactgggctttgcgcgcgacatgcgcctcgccctgcaagctatggagaaaccggcgagcgggcgcagcaatctcaagcaggtgctcgacgcgctgcccgtggcggtaggggtcgtcggccggggaaaactcctctatgccaaccgggagatggaagagttcttcgccctgcacggagaggaacccgccctggcgcccttcacgccgatgcaggacgcctctctcgtcccgaaccgggagtttctgctaaaaatcgacaacaggcgcctgcagcttttcaggcctgacggcacgatgcacgaatataccctctcgtgcttccccacggaatttgacggaacgtccgcgctcatggcctggcttgtggacctgacccatctgaaaaccaatgaacgccgcctccagcaggccaaaaaccaccccgaaaaccttcggaaccccggaggcatttccttgccccgtgaatacggaattccccaaaaccctcacggggttgtggttccactggaaaaaagccgggaaaacccggaggggaaaaaaccctccaaaccccaaaaacccgtaagccttcgggaaaaccttgacaaaaatttttgggcaatattttttatgcggattcgaaaaaccccgcgaaacccccccaaaaaaaaaggggcgtcctaa

SEQ ID NO: 29650 - protein, 313 aa, Unknown
  Obtained from environmental sample
  misc_feature (1)..(313): Xaa is any amino acid
MYLGRTRPACGLRGHLHHLLPDSGQGGRSARLPALHARTPDQRTPECGRTGTPPAAYLADGKRQLRLAVQNAQGLAIPCDLALRRLTICGRPAVLGFARDMRLALQAMEKPASGRSNLKQVLDALPVAVGVVGRGKLLYANREMEEFFALHGEEPALAPFTPMQDASLVPNREFLLKIDNRRLQLFRPDGTMHEYTLSCFPTEFDGTSALMAWLVDLTHLKTNERRLQQAKNHPENLRNPGGISLPREYGIPQNPHGVVVPLEKSRENPEGKKPSKPQKPVSLRENLDKNFWAIFFMRIRKTPRNPPKKKGAS

SEQ ID NO: 29651 - DNA, 735 bp, Unknown
  Obtained from environmental sample
  misc_feature (1)..(735): n is a, c, g, or t
atgaacggggagtccgtattttctactcttggctggccggaggaactgaaggatttggggaaagatattgtagaattttcaatagtaagcgaaaaccccaaagtatttgaaaaaaccaggtatttcagggcgagtatcagccctgtatacgcgagaaacaaagtccaggtggccagggttatccttttggcggatattactgacagcgtaaggttaatgaaagaactggagaacgcagcttacattgacggccttacaggcatctacaaccggaagcatttttccgagcttgcgaacgcggacgtagaaagggcgctaaggttcaatcagacgatttataccgctatgctggatatagattttttcaagaaagttaacgatacctatgggcatgccgcaggggatatggtattaaaggcaatagcgggaattatccagcagacaatcagggcttatgatcttttgtgtcgctacggaggcgaggaatttgctcttctggttttggatattaatgcttcggaagctttttctttgatggaaagaattcgggaaaatattgaatcaataataatcaattacgagggcattgaaataaaaataacctgcagcatcgggcttgcggaattcctgcgaaccgatacccttgaatcttcaattaagaaatccgacgaagctctttatgtcgctaaaaattccggccgtaaccaggtaaaggtttttaattcgggaaattaa

SEQ ID NO: 29652 - protein, 244 aa, Unknown
  Obtained from environmental sample
  DOMAIN (76)...(236): GGDEF domain
  misc_feature (1)..(244): Xaa is any amino acid
MNGESVFSTLGWPEELKDLGKDIVEFSIVSENPKVFEKTRYFRASISPVYARNKVQVARVILLADITDSVRLMKELENAAYIDGLTGIYNRKHFSELANADVERALRFNQTIYTAMLDIDFFKKVNDTYGHAAGDMVLKAIAGIIQQTIRAYDLLCRYGGEEFALLVLDINASEAFSLMERIRENIESIIINYEGIEIKITCSIGLAEFLRTDTLESSIKKSDEALYVAKNSGRNQVKVFNSGN

SEQ ID NO: 29653 - DNA, 978 bp, Unknown
  Obtained from environmental sample
  misc_feature (1)..(978): n is a, c, g, or t
atgccgcatctattaatagcgggagccacaggttcgggaaaatccgtatgcgtaaattccatgatccttacgctcttgtatgaaaaggctccggctgaatgcaggcttatcctgattgatcccaagatcgtggaattaaaactttacaacgacattccgcatcttttaacgcctgttattaccgagcccaagaaagcattccaggccctgcagtactgtatttatgaaatggaacggcgctatagctgcctggactcaatgggagtcagggatatcaggagctacaacaagcgcattgtggaaagggaaatcgccgcggaatacatgccctatatcgtggtggtaattgacgagttcgcggatctgatggcaaccacgggaaaagagctggaaagtaccgtggcgcggcttgcggcgatgagccgggcggtgggcatacacctggtattggccacacagcgcccttccatcgacgtaatcacaggactaataaaggcaaatatacccagtcgcatcgcttttatggtggccagcaaaatggacagcaggatcatcattgacatggtgggagctgaaaaactcctgggaaagggcgatatgctttacgcaggagcggtagatccgttcccgatacgaatgcagggagcctttgtatcggaagaagaagtcgaaagggttgttgattacgtcaagggccttggcgaaccggattacatcgacgatgaaatattttacgacgagggagaagaaaaacgcgatccgtcacttttctccgagggcgatgatccgctttatgaaaaagctctggaaattgtcatgcagcagggaaaagccagcgcaagctatatacagcggcggctgaaaatcggctataacagggcagcgcgccttgtcgaagtaatgaagcgccacggggttgtagggccggcacaggggtctaaaccaagggaacttctgcgcggcacagtgatgaattaa

SEQ ID NO: 29654 - protein, 325 aa, Unknown
  Obtained from environmental sample
  DOMAIN (1)...(157): FtsK/SpoIIIE family
  misc_feature (1)..(325): Xaa is any amino acid
MPHLLIAGATGSGKSVCVNSMILTLLYEKAPAECRLILIDPKIVELKLYNDIPHLLTPVITEPKKAFQALQYCIYEMERRYSCLDSMGVRDIRSYNKRIVEREIAAEYMPYIVVVIDEFADLMATTGKELESTVARLAAMSRAVGIHLVLATQRPSIDVITGLIKANIPSRIAFMVASKMDSRIIIDMVGAEKLLGKGDMLYAGAVDPFPIRMQGAFVSEEEVERVVDYVKGLGEPDYIDDEIFYDEGEEKRDPSLFSEGDDPLYEKALEIVMQQGKASASYIQRRLKIGYNRAARLVEVMKRHGVVGPAQGSKPRELLRGTVMN

SEQ ID NO: 29655 - DNA, 783 bp, Unknown
  Obtained from environmental sample
  misc_feature (1)..(783): n is a, c, g, or t
gtggaaatagaaaaatccaacgttcttttaatcggtcctacgggaaccggcaaaacgttacttgcaaagattctcgcgaaaaaattaaaagttccgtttgccattgtggacgcgacaacccttacggaagccggttatgtcggcgaagacgttgaaaatattcttcttaaattgatacagagcgcgggaggaaatatttccgccgctgaaaggggcatcgtttatatagatgaaatagataaaatcgcgcgtaagggtgaaaatgtttcaatcacgcgcgatgtttcaggcgagggcgttcaacaggcccttttaaaaataattgagggtacaatagcctccgttccgccccaaggcggcagaaaacatcccaatcaggaaatgatacggattgacaccacaaacatcctttttatttgcggtggggcgtttgtaggactggacaaattaatcgcccgccgcgttgttaatcacccgttgggttttgggtccgagggaggcggggaaaaatcattaaaggagctttacgacgcgttgcatcctgacgatttaatccgttttggcatgattcctgaatttatcggaaggcttcccattatcgtcggtcttgaagaattaagactcgaagatttaaagcgtatcatcaccgagccgcgtaacgccatagtgcgacagtatcaggcatccctgtcttatgacaacgtaaaacttgagtttacggaaaaagcgattgacgcgatagcggatatggccataaaacaaaaaacaggagcaagggcttga

SEQ ID NO: 29656 - protein, 260 aa, Unknown
  Obtained from environmental sample
  DOMAIN (7)...(224): ATPase family associated with various cellular activities (AAA)
  misc_feature (1)..(260): Xaa is any amino acid
MEIEKSNVLLIGPTGTGKTLLAKILAKKLKVPFAIVDATTLTEAGYVGEDVENILLKLIQSAGGNISAAERGIVYIDEIDKIARKGENVSITRDVSGEGVQQALLKIIEGTIASVPPQGGRKHPNQEMIRIDTTNILFICGGAFVGLDKLIARRVVNHPLGFGSEGGGEKSLKELYDALHPDDLIRFGMIPEFIGRLPIIVGLEELRLEDLKRIITEPRNAIVRQYQASLSYDNVKLEFTEKAIDAIADMAIKQKTGARA

SEQ ID NO: 29657 - DNA, 501 bp, Unknown
  Obtained from environmental sample
  misc_feature (1)..(501): n is a, c, g, or t
ttgctttcaagaaaagttcgcccaaaaaggaataggataatggatatatctgttttggcttttaataagtcttccgcggagctgaaaaaaatcaactcaattgatgaattaagcatgcctaaaaaaagttcaatgacttattggataaatgtaaacactttggaggatgtcgattccataaaaaaaatcgcagaaatttataatctccatcctcttacgattgaggatatatttgctgtgaaacaacagccaaaggttgagacattcggaaattaccgtctcgtttcttttaaatcaatcagaaaagccaaagattatgatggctggcatgccaaaaaaaagcgtttcttcggtttgaatttttccaaaaagcaggaagaaccggaagaaggagaagaattttttattgaacacatcagcatggtcacaatgaaaaacgttcttgtaacctttcaggaagtacccggagatcctttgacagaatcagaaaaagaattctga

SEQ ID NO: 29658 - protein, 166 aa, Unknown
  Obtained from environmental sample
  misc_feature (1)..(166): Xaa is any amino acid
MLSRKVRPKRNRIMDISVLAFNKSSAELKKINSIDELSMPKKSSMTYWINVNTLEDVDSIKKIAEIYNLHPLTIEDIFAVKQQPKVETFGNYRLVSFKSIRKAKDYDGWHAKKKRFFGLNFSKKQEEPEEGEEFFIEHISMVTMKNVLVTFQEVPGDPLTESEKEF

SEQ ID NO: 29659 - DNA, 450 bp, Unknown
  Obtained from environmental sample
  misc_feature (1)..(450): n is a, c, g, or t
atgaccagcaatcttggttccgatttgatcttaagcgctaaaaagcctgaagccatacacagtatgctcatggatcttctcaagcagagtttcaggccggaattccttaaccgcattgacgagacggtgatctttaacagccttggcagggaagagattggcaaaatcgtggacatacagctcaagtacttaagttcgcgccttgtggatcgaaaggtggaattaaagttcacgaaagcggcgaaggagcttttggcagagcggggttacgacccgcttttcggagcccggccgcttaagcgcgccattcaggcggatctggaaaatcctcttgcaagggccattattgcggggaagatcaaagagggagatactgtaacggtggataagggcgcggacaaagacggagagccgcttgctttcaagaaaagttcgcccaaaaaggaatag

SEQ ID NO: 29660 - protein, 149 aa, Unknown
  Obtained from environmental sample
  misc_feature (1)..(149): Xaa is any amino acid
MTSNLGSDLILSAKKPEAIHSMLMDLLKQSFRPEFLNRIDETVIFNSLGREEIGKIVDIQLKYLSSRLVDRKVELKFTKAAKELLAERGYDPLFGARPLKRAIQADLENPLARAIIAGKIKEGDTVTVDKGADKDGEPLAFKKSSPKKE

SEQ ID NO: 29661 - DNA, 876 bp, Unknown
  Obtained from environmental sample
  misc_feature (1)..(876): n is a, c, g, or t
gtgttaataaatgttacctgccaggccggcggtatttacattgcacaattcaaaggagcgaaagacagcgacggtatgaagcacgccttccgcttcaaggtaatttttgccaccgccattgcgatgctggctttcatagtcagcagaagctttacaagcccgttaatcgccatgatgacaacggctaacacttcccaacaggagattgtttctgtaggctcccgttatcttaagctcatctcctggacttttctgccaacggctatttcttctacaatcggaacaagttttcgtgaaaccgcgcggccaaaaattccgctcataatttccatattcgcaactgtggtaaacaccaccggaaactggattttaatttacggcaacctcggcgccccccgccttgaagtcgaaggcgcggcttacgcgacaatcatcgcccgcgtttttgagctatgcgtctttgtaatatatgccgcctgggatagagcgcctttttttgttgtgcggatttttgatattcacaaaaagcttataaaagagattctttttaagtcttcaatgatattcgcgtcagagctatcatggatatcttcagaaacaataatggttgccatgtataaccgccgtggaggcgcggaagttgtcgccggcatggcggcgggttggactatcgcgaatttatttttcattctctttggcggtgtttggacagcgtcggctatactcgttgggggcactcttggctcaggccggcttgacgaagcgcgccgccggtcaaaatggctcaaatcgggagcggtggttgcaggcataatcatcgccctgcccggcacggctatatccgccttgctcataccactcgtcttttccatctaa

SEQ ID NO: 29662 - protein, 291 aa, Unknown
  Obtained from environmental sample
  DOMAIN (1)...(123): MatE
  misc_feature (1)..(291): Xaa is any amino acid
MLINVTCQAGGIYIAQFKGAKDSDGMKHAFRFKVIFATAIAMLAFIVSRSFTSPLIAMMTTANTSQQEIVSVGSRYLKLISWTFLPTAISSTIGTSFRETARPKIPLIISIFATVVNTTGNWILIYGNLGAPRLEVEGAAYATIIARVFELCVFVIYAAWDRAPFFVVRIFDIHKKLIKEILFKSSMIFASELSWISSETIMVAMYNRRGGAEVVAGMAAGWTIANLFFILFGGVWTASAILVGGTLGSGRLDEARRRSKWLKSGAVVAGIIIALPGTAISALLIPLVFSI

SEQ ID NO: 29663 - DNA, 963 bp, Unknown
  Obtained from environmental sample
  misc_feature (1)..(963): n is a, c, g, or t
ttgatggccgaggtaaagcgacataacaacgttttctttcgtccgtctgttcaagagcgggtaaaggaagcgatcatagccaacacttacgagttgaaacaagtcagccttgcccgctgcaatacggacaagctggacgcggacaagttgtgccggatactcaaagcgcaggtattgtcaggagagttactggtatcgcctgtaacaatgccgtcaaaggaaatccaggatttacgtggactgttcaccacctacaggctttaccagaaacaaaatgtacaacttaagaaccggatacattctcttttgaaagagcaattgtacggttttacccaagaagaaatttttagcaaaagcgaccgggagaagattagaacaatttctactgattccgtattgaatttccaaataaatcagctgttagacaagcttgagcgtggggaaacagatgtggaaacgcttaaagagcaagtattgcttcatgcggctcctttcatggcgcagatagaaatactgaccagcatgaaagggataagcgtattcatagcgatagcgatcatagctgacatcattgatgtgagccgattcaaaaactctaaagcttttacttcctatctgcgatccgctccacgggtgtcaaactcaaatacttctgtaagtattcgtggaataaacaagaagggaagaaaactctccgcgacattgctgactcaatctctcaaccatgtgttgaattccagtcttaagctcaggcgctggtatgacagattatgcgagtataagaaggcaggcttggtacgaactggtctgcgccgacggattttaacagaaatctatcaaatgttaaaaaagggcgagtatcattatgggcgggaagtgaaaaagcatgagtttaagatggctcaatatcggcggtttttagagaaacaaaacaataataaagttttgaaaaaaactgcttga

SEQ ID NO: 29664 - protein, 320 aa, Unknown
  Obtained from environmental sample
  DOMAIN (144)...(253): Transposase IS116/IS110/IS902 family
  misc_feature (1)..(320): Xaa is any amino acid
MMAEVKRHNNVFFRPSVQERVKEAIIANTYELKQVSLARCNTDKLDADKLCRILKAQVLSGELLVSPVTMPSKEIQDLRGLFTTYRLYQKQNVQLKNRIHSLLKEQLYGFTQEEIFSKSDREKIRTISTDSVLNFQINQLLDKLERGETDVETLKEQVLLHAAPFMAQIEILTSMKGISVFIAIAIIADIIDVSRFKNSKAFTSYLRSAPRVSNSNTSVSIRGINKKGRKLSATLLTQSLNHVLNSSLKLRRWYDRLCEYKKAGLVRTGLRRRILTEIYQMLKKGEYHYGREVKKHEFKMAQYRRFLEKQNNNKVLKKTA

SEQ ID NO: 29665 - DNA, 393 bp, Unknown
  Obtained from environmental sample
  misc_feature (1)..(393): n is a, c, g, or t
atgttgtgcaacttcaattatgcgacattattgacacaaattaaaaagtgttataaaaatactttggaggataaaaagttggttaatgatgtattggatttggcaatagcctataatggaaatgatgtagaacgtacaaatcatcttcttaaggtcttttcgtttgcgcatcacattggagtattagagaattgtgatattcaattacaaactattattgatatatcttcaattcttcatgatattggtattcatgaatctgaacgaaaatataattcaggtgccggtaaatggcaggaaattgagggaccaatagttgcacaggaactactaaaagaattggctttggacaatgctattaaggatagagtatattctcatgacctgcgataa

SEQ ID NO: 29666 - protein, 130 aa, Unknown
  Obtained from environmental sample
  misc_feature (1)..(130): Xaa is any amino acid
MLCNFNYATLLTQIKKCYKNTLEDKKLVNDVLDLAIAYNGNDVERTNHLLKVFSFAHHIGVLENCDIQLQTIIDISSILHDIGIHESERKYNSGAGKWQEIEGPIVAQELLKELALDNAIKDRVYSHDLR

SEQ ID NO: 29667 - DNA, 1182 bp, Unknown
  Obtained from environmental sample
  misc_feature (1)..(1182): n is a, c, g, or t
atggcaggcaaggcaagcgaaacaaaagtgataacccctcagacatgcccgtactgtggggaagaccttgggaaggtcacaggacgaaaaacaggcacgcattacgtaatggaaacaccgcctataacggctacagtcaccgaatatataaacgaagaaaagacatgcccgagatgcggcaaaagagtgtcagcagaataccctcctgaggcggcagcggcccaacaatacggctccaatcttaaagcgttgatagtattgctgagcgaaacaggaatggtagcgatgaaccgtgttgtagaaatactggaagcggtaaccgggatgcgggtaagcggcggaacggtggcaaacacgatagagcaatgcgcaaaaaacctggaggaaccggtaaaaagcataaaggaagagataaaaggtgcgaaagtagggcatttcgacgagaccggcatgaggagccagggagggctgaagtggctgcatacggcttcgaccggacgcctgacgtacatagagatgaaccggaaacgcggcaaggaggcgatggacgacatagggatactcaacgatttcaaggggattgccgtgcatgactgcctggcatcttactggaattacgattgcgttcattcactatgcaacgcgcatctgttacgcgaacttgcgttcattgaggagacaacgggtcaaagatgggcgggggaaatgatcgggctgctgctggagataaagaagtcagttgactcaaggcgcttgtgcaaaaaggaatttctaccaaaggcggaactgtcaaaatatataaaacgatataacatactcgtggaagaaggcttaaatgaaaatcctgaacaggcgaaaccggaaggcaggcgcgggagagcaaaacagacgaaggctcggttgctactattaaggttgcattgccacaaagaagagtatctgcgattcgccaatgattttaccgttccgtttgacaacaatcaggctgaaagagactttagaatggcaaaagtcaaagagaaagtatccggctgttttcgctctgaaaaaggagaaaagagttttgcaacgatatactcattcatacaaacactcaaaaagaataaggtatctgtatttgatgaattggttaaaaccttcaaaggtgattattctttccctttccaactggtaactgaatag

SEQ ID NO: 29668 - protein, 393 aa, Unknown
  Obtained from environmental sample
  misc_feature (1)..(393): Xaa is any amino acid
MAGKASETKVITPQTCPYCGEDLGKVTGRKTGTHYVMETPPITATVTEYINEEKTCPRCGKRVSAEYPPEAAAAQQYGSNLKALIVLLSETGMVAMNRVVEILEAVTGMRVSGGTVANTIEQCAKNLEEPVKSIKEEIKGAKVGHFDETGMRSQGGLKWLHTASTGRLTYIEMNRKRGKEAMDDIGILNDFKGIAVHDCLASYWNYDCVHSLCNAHLLRELAFIEETTGQRWAGEMIGLLLEIKKSVDSRRLCKKEFLPKAELSKYIKRYNILVEEGLNENPEQAKPEGRRGRAKQTKARLLLLRLHCHKEEYLRFANDFTVPFDNNQAERDFRMAKVKEKVSGCFRSEKGEKSFATIYSFIQTLKKNKVSVFDELVKTFKGDYSFPFQLVTE

SEQ ID NO: 29669 - DNA, 531 bp, Unknown
  Obtained from environmental sample
  misc_feature (1)..(531): n is a, c, g, or t
atggaagacatccttgacgtatatacccggaaacgcgataaaaagcaccctttggtgtgcgccgacgaatttccccgccaattgataggcgaagtgcggacgcctattccggctgggcctgggaaaccggcccgtttcgataccgagtataggcgcaacgggacatgcgaaatattcatgtgtgcggctccccttgaaggctggaggagggcggaggtaaccgagcggcggacaaaaacagactgggcgcatcagataaaaaaacttgtaaccgttgattttccagatgcggaaaaaatcattttagtgctggataatctgaatacccacacaataggctctctttacaaagcgttcccgcctgaagaagccaggcggttacgggataagcttgagatacactatacaccgaaacatgggagctggcttaacatggcggaaatagaaatcaatgtgctcgcaaaccacggcctgccaaaacngggtttcatcaatagagcagatgaaaaaagaagttgctgcatggaataa

SEQ ID NO: 29670 - protein, 176 aa, Unknown
  Obtained from environmental sample
  misc_feature (1)..(176): Xaa is any amino acid
MEDILDVYTRKRDKKHPLVCADEFPRQLIGEVRTPIPAGPGKPARFDTEYRRNGTCEIFMCAAPLEGWRRAEVTERRTKTDWAHQIKKLVTVDFPDAEKIILVLDNLNTHTIGSLYKAFPPEEARRLRDKLEIHYTPKHGSWLNMAEIEINVLANHGLPKXGFINRADEKRSCCME

SEQ ID NO: 29671 - DNA, 384 bp, Unknown
  Obtained from environmental sample
  misc_feature (1)..(384): n is a, c, g, or t
ttgctgcttgccgaagaaaactgcaccgatgacatgatagcaggacaaaccgggctgagccggagagggcttgagcaattgcggcagcggtttgtcgaggaagggtttgaagcaacccttggaggaaaaccgcgagggcataggccaaaagtattgggaggagaagacgaggcgcgtttaatagcgcttgtttgcagccccaaaccggatgggcgcacgcgctggtcattgcggcttttggcagacacttggaaaacattggcgtatacggacgtgaaaacggtatcgcatgaaacaataagaaggacgctaaaaaaaacgaaattaagccttggcaaagccaggagtggtgcatcccgcctaaggaaacggaagagtttgtag

SEQ ID NO: 29672 - protein, 127 aa, Unknown
  Obtained from environmental sample
  misc_feature (1)..(127): Xaa is any amino acid
MLLAEENCTDDMIAGQTGLSRRGLEQLRQRFVEEGFEATLGGKPRGHRPKVLGGEDEARLIALVCSPKPDGRTRWSLRLLADTWKTLAYTDVKTVSHETIRRTLKKTKLSLGKARSGASRLRKRKSL

SEQ ID NO: 29673 - DNA, 906 bp, Unknown
  Obtained from environmental sample
  misc_feature (1)..(906): n is a, c, g, or t
atgccgtcggaaccgagggaaaattattatccaaaaaatatttggccgtggagcaagactgtaatatccggcatagtacctatacctctgtctgttattgaaacaacgccgtcaaacttttattcggaattatacaatacgacaaaccgccttcttgacgacgcggcttaccgcctgacatcccttttaatttcactcaggtttaaagcgcattttttcccgagagacggttacggcgagatcggagcgctggttgaaaaaccggaagcggcgttttctcaggcgcttgcggcaaaatacgcgggacttgggactatcggacgcaaccactgcctgcttacaaaagagtttggtccccgcgtacgtattgtatccgttattacagacgccgaatttccgccggattccataatagaaaaaaacctgtgtgttgactgtagtaattgtaaaaacgcctgtcctgtcggcgcttttactccgcgtaatgatattgaaatagacgacatggagaagtacaaatgctcaaagtatcatgcttttctgcggacagaaatgcgctatccctgcggggtttgcgttatggtatgcccggtcggagaagacagaaaacaatacggcagcgaagcggtttctaaacaaggcaaagatcacttgcaaaattacggttccaaagaacgcaattcaagtgaattttatgaaaagagaaggagatttattatggaaaacagaaattacaggtttgaaacaattcaaattcacgcggggcagggaaaacccgatcccgctacggacgcaagagcggttcccatttatcagactacatcttatgtgtttcccacgtcaaaatcagcggncggatcgtttttgctcttacggaagcggggcacatttatacgcgcattatga

SEQ ID NO: 29674 - protein, 301 aa, Unknown
  Obtained from environmental sample
  DOMAIN (136)...(159): 4Fe-4S binding domain
  misc_feature (1)..(301): Xaa is any amino acid
MPSEPRENYYPKNIWPWSKTVISGIVPIPLSVIETTPSNFYSELYNTTNRLLDDAAYRLTSLLISLRFKAHFFPRDGYGEIGALVEKPEAAFSQALAAKYAGLGTIGRNHCLLTKEFGPRVRIVSVITDAEFPPDSIIEKNLCVDCSNCKNACPVGAFTPRNDIEIDDMEKYKCSKYHAFLRTEMRYPCGVCVMVCPVGEDRKQYGSEAVSKQGKDHLQNYGSKERNSSEFYEKRRRFIMENRNYRFETIQIHAGQGKPDPATDARAVPIYQTTSYVFPTSKSAXGSFLLLRKRGTFIRAL

SEQ ID NO: 29675 - DNA, 435 bp, Unknown
  Obtained from environmental sample
  misc_feature (1)..(435): n is a, c, g, or t
atggttacggctgatatagaacctgtttcggtggaaagcagaaaaaaatggtatgatgaacataattcaacgaaaagacctctctgggtcgttgaaaataaattaaataaaataatcggctgggttagttttcaatcattctacggaagacctgcttatgacgctacggttgaaataagtatttatttggagacagaacaaagaggcagaggaataggaaaacaaattcttcaatattgtattaacaatgctccaaaatttggaattaaaaatttgcttgcatttatttttgcgcataatgaacaaagtttaaaattattcagacactttggttttgaggattgggctacacttccgaatgtcgcggagcttgatgggcgggaatatagcttaaaaatattgggcaagcggatatttaacgcttcatttaactga

SEQ ID NO: 29676 - protein, 144 aa, Unknown
  Obtained from environmental sample
  DOMAIN (30)...(113): Acetyltransferase (GNAT) family
  misc_feature (1)..(144): Xaa is any amino acid
MVTADIEPVSVESRKKWYDEHNSTKRPLWVVENKLNKIIGWVSFQSFYGRPAYDATVEISIYLETEQRGRGIGKQILQYCINNAPKFGIKNLLAFIFAHNEQSLKLFRHFGFEDWATLPNVAELDGREYSLKILGKRIFNASFN

SEQ ID NO: 29677 - DNA, 321 bp, Unknown
  Obtained from environmental sample
  misc_feature (1)..(321): n is a, c, g, or t
ttgcctaaccacaaggatcacaagctatatgacaaatatttccccaaaggcgccggctctatctttaccttcgaaataaaaggcaacgcggagaaagccaaacgcttcacagaagaacttaacttgttttcgctgcttgccaatgtcgcggacgttaaatcgctggttatccatcctgcaactacaacccactctcagatgagcgagagcgagcttcttgcatcgggaataaagcctaacacaatcaggctttccattggcgctgaacatattgacgatattattgacgatctgcgtcaggggtttgaatcagttaaatga

SEQ ID NO: 29678 - protein, 106 aa, Unknown
  Obtained from environmental sample
  DOMAIN (1)...(103): Cys/Met metabolism PLP-dependent enzyme
  misc_feature (1)..(106): Xaa is any amino acid
MPNHKDHKLYDKYFPKGAGSIFTFEIKGNAEKAKRFTEELNLFSLLANVADVKSLVIHPATTTHSQMSESELLASGIKPNTIRLSIGAEHIDDIIDDLRQGFESVK

SEQ ID NO: 29679 - DNA, 1170 bp, Unknown
  Obtained from environmental sample
  misc_feature (1)..(1170): n is a, c, g, or t
atgaatgtaagcggtccaggaagtgaaatagaagaaatatgctcttctctagccgccgagggctattcggttaaattcaacggatatagcgcccttgatttgtacttccggcttccgcccctgccttttttatggatcgaaaccaacgcggacattggcgtccttgcgcgttacatcgacaatctgcgtttccccggcgtagacattgccgatgcggctgtggaaactgcctatggcacctgctactttagctgtcttgaaagtgatgaacgaagcaaagcttcttttcctattctttcactaacttacgattggcagaccaaacgtttccaggatcctcttgatatatatcctatactgcgagaccttcgcaatcgtaagtttgaaaccgttcttaaccataccgttcaactgcagttcggaagcaaccgcatcgttatggaagcggctttgcttcttgcccgttacggattttcagcggacatggttgtcgctactgttgagcaaaaccagctgcccaggccggaagcgcagagggtgtttctttgctgtcttatgctttcagccaggccggagcttgggctagaactgcttaagaggtctggccttctaaaagagttttggccggagcttgcctctttaaatgacgtggatcactcaaaggaattccacccggagggcaatgtttggaaccacacccttgaaacattccgctacagaaaaccggccgcatccggcgcttttgacctgcgcctgtccctggcccttcttctgcatgactcgggcaagccaatctctgcctctttcgccagccatcgctttgacggccacgctgagctgggcgctcatacagcggcgcgttttctggagcgcctggaatttgagtcttctctaatccaggacattttctaccttgtaaaaaaccacatgctccccgccgccctgaaacgcctacccctcacaaaaaccgctgagatcatggcctccccgctttttcccacgctgatggaactttaccgttgcgacgaatcttcgtcattcaagggcttgaacgacttttatgaaaacaccgccgcctatcagacttatcttaaaaacattaagaacccctatcgatccaaagacgggaaaaaaatcaaacgaagcaatgtgtatatgggaactcgctaa

SEQ ID NO: 29680 - protein, 389 aa, Unknown
  Obtained from environmental sample
  misc_feature (1)..(389): Xaa is any amino acid
MNVSGPGSEIEEICSSLAAEGYSVKFNGYSALDLYFRLPPLPFLWIETNADIGVLARYIDNLRFPGVDIADAAVETAYGTCYFSCLESDERSKASFPILSLTYDWQTKRFQDPLDIYPILRDLRNRKFETVLNHTVQLQFGSNRIVMEAALLLARYGFSADMVVATVEQNQLPRPEAQRVFLCCLMLSARPELGLELLKRSGLLKEFWPELASLNDVDHSKEFHPEGNVWNHTLETFRYRKPAASGAFDLRLSLALLLHDSGKPISASFASHRFDGHAELGAHTAARFLERLEFESSLIQDIFYLVKNHMLPAALKRLPLTKTAEIMASPLFPTLMELYRCDESSSFKGLNDFYENTAAYQTYLKNIKNPYRSKDGKKIKRSNVYMGTR

SEQ ID NO: 29681 - DNA, 609 bp, Unknown
  Obtained from environmental sample
  misc_feature (1)..(609): n is a, c, g, or t
atgtcaaatagccattcgcctcattcgcctatggggctgggcatattcattgacagagacggtacgttgaacgaagaagttgaatttttgtgccgccctgacgatgtcatccttattgggggcgcggcgcgggccatcgcaatgctgaacgcaagaaacatcccagtaataatagtcacaaaccagagcggcatcggcagggggctgtatggctgggaggagtacggcgcggtcgcaaaaaaaatagatgagctgctggcattggaaggagcgcgcatagacgattcatttgcctgcccatttcacgaagacggggtaggggagtaccgtcagccgaaccaccccgacagaaagccaatgccagggatgcttattaaagccgcgcaaaagcacaaaattgacctgaagctctcttggatgataggcgacaaagaaatagacatggaagccgggcgaaatgctgggtgcagggtagcccttgtgaggacggggtacggcaatgcggctgaccccaaaatggcggacatagtcgcggaccatctangggcagcgatagaagcgatattggaaatcattgaaggaactaaccccacactgcccaaccactga

SEQ ID NO: 29682 - protein, 202 aa, Unknown
  Obtained from environmental sample
  misc_feature (1)..(202): Xaa is any amino acid
MSNSHSPHSPMGLGIFIDRDGTLNEEVEFLCRPDDVILIGGAARAIAMLNARNIPVIIVTNQSGIGRGLYGWEEYGAVAKKIDELLALEGARIDDSFACPFHEDGVGEYRQPNHPDRKPMPGMLIKAAQKHKIDLKLSWMIGDKEIDMEAGRNAGCRVALVRTGYGNAADPKMADIVADHLXAAIEAILEIIEGTNPTLPNH

SEQ ID NO: 29683 - DNA, 687 bp, Unknown
  Obtained from environmental sample
  misc_feature (1)..(687): n is a, c, g, or t
gtgggtgttccaaagacgattgacaacgatttagataagacgcagaccacgtttggattcgacacggctgtgtcgtttgcgacagagagccttgaccgactgcatagcacagcggaaagccaccagcgcgtcatcgttgtcgaagtcatgggccgatacgctggctggatagcactgcactgcggcatcagcggtggagcgcacgccatattgattcccgaaatccccttcgacctcaaaaaggtggccgaaaaggtggtcaagcgcgagaacgatggacgccactattccctcgttgttgtagcagaaggcgcaaagcccaagggcggggatttggctgtcgttgcggcgggcgaaattggccacctagaacggcttgggggcatcggagaccgcgtagcaagagaactgcaagaactaactggcaaggagtgcagaacggtggtgctgggccatcttttgcgcggcggaagtccaacatctttcgaccgcttggcggccctgaggtttggcgcagccgcagttcgcgcattggacgaaggttattctggggtcatggtggcgcttgaacatccaacagtccagtacgttccgcttctcgaagtggctgggcggatgagggcagtgccgctcgactgcgagatcgtgcagaccgggcgcgatgtcggtgtctgctttggagactag

SEQ ID NO: 29684 - protein, 228 aa, Unknown
  Obtained from environmental sample
  DOMAIN (1)...(180): Phosphofructokinase
  misc_feature (1)..(228): Xaa is any amino acid
MGVPKTIDNDLDKTQTTFGFDTAVSFATESLDRLHSTAESHQRVIVVEVMGRYAGWIALHCGISGGAHAILIPEIPFDLKKVAEKVVKRENDGRHYSLVVVAEGAKPKGGDLAVVAAGEIGHLERLGGIGDRVARELQELTGKECRTVVLGHLLRGGSPTSFDRLAALRFGAAAVRALDEGYSGVMVALEHPTVQYVPLLEVAGRMRAVPLDCEIVQTGRDVGVCFGD

SEQ ID NO: 29685 - DNA, 753 bp, Unknown
  Obtained from environmental sample
  misc_feature (1)..(753): n is a, c, g, or t
ttggacggagcgattcttgtactttgcgctgtcggcggagtgcagtcgcagtcaatcacggttgaccgccagcttaaacgctaccatgtaccgcgtatcgcttttataaacaaatgcgaccgtacaggagcaaatcctttcaaggtgcaaaaacagttatgcgaaaaattagggcttaacgcggtgatgattcaaatccccatcggacttgaggacaaactagaaggcgttgtagaccttatcaccatgaaagccgtctattttgacggagatcagggcgagacaatccgtcttgctgaaattcctgcccatttaaaagatgacgccggcaaataccgcgaagagcttcttgacgcgctttcgatgttctccgatgagcttgcggaaaaatttcttgagggcggaccgattcccgaagatatgattcacgcggcaatccgcaaaggcacgcttgccgagcaatttgtgcccgttatgtgcggttccgcttacaagtttagaggcattcagccgctgatggacggagtaacaaattatcttcccaatcctacggaagtaaaaaacttcgccctcgatcttgataaaaacgaagaaagcatcgagcttaacgccgatgaaaaaagcccgaccgtcgctctcgggttcaaactggaagacggtcaatatggtcagctaacgtatgtaagaatttatcagggtaaattaaagaaaggcgacgaactgcaaaacaccagagcgggcagaanaatttaa

SEQ ID NO: 29686 - protein, 250 aa, Unknown
  Obtained from environmental sample
  DOMAIN (1)...(184): Elongation factor Tu GTP binding domain
  misc_feature (1)..(250): Xaa is any amino acid
MDGAILVLCAVGGVQSQSITVDRQLKRYHVPRIAFINKCDRTGANPFKVQKQLCEKLGLNAVMIQIPIGLEDKLEGVVDLITMKAVYFDGDQGETIRLAEIPAHLKDDAGKYREELLDALSMFSDELAEKFLEGGPIPEDMIHAAIRKGTLAEQFVPVMCGSAYKFRGIQPLMDGVTNYLPNPTEVKNFALDLDKNEESIELNADEKSPTVALGFKLEDGQYGQLTYVRIYQGKLKKGDELQNTRAGRXI

SEQ ID NO: 29687 - DNA, 816 bp, Unknown
  Obtained from environmental sample
  misc_feature (1)..(816): n is a, c, g, or t
gtgcgtatgcacgcggacagtatggaagatattaacgaaggatctcccggcgacattgtcgccctgttcggaattgactgcgcctccggcgatacattctgcggcggcgggcttaactacgccatgacgtcaatgtttgttcccaatcccgttatttctctcgctatttcgccgaaagacaaaaaaagcgccgaccagatggcaaaggctcttaatcgttttacaaaagaagatcccactttccaaacttatgttgatcccgaatcgaaccagacaattattaaaggaatgggcgagcttcaccttgaagtttacattgagcgtatgcgccgcgagtacaagtgcgaacttgataccggtatgccgcaggtagcttaccgcgaaacaattacgcaaaaagcggaatttaactacactcacaaaaaacagacgggcggcgcgggacaattcggacgcgtggcaggttacatggaatcgtacacagaaggcgattacgagtttgtcgatatgatcaagggcggatcaattccaaccgagtatgtgccaagctgcgataaaggatttaaagaagcgattaaaaaaggcagtttaataggcttcccaatcgtcaatatccgctgtgttatcaacgacggtcagagccacccggtagactcgtcggatatcgcgttccagtccgcggcaatcggcgctttccgcgaggcgtataacaaggcaaaaccatgtattcttgaacctatcatgaaagtatcggtggaaggaccgacggaattccagggaaatatttttggctcaattaccaaagacgcggtataa

SEQ ID NO: 29688 - protein, 271 aa, Unknown
  Obtained from environmental sample
  DOMAIN (122)...(240): Elongation factor G, domain IV
  misc_feature (1)..(271): Xaa is any amino acid
MRMHADSMEDINEGSPGDIVALFGIDCASGDTFCGGGLNYAMTSMFVPNPVISLAISPKDKKSADQMAKALNRFTKEDPTFQTYVDPESNQTIIKGMGELHLEVYIERMRREYKCELDTGMPQVAYRETITQKAEFNYTHKKQTGGAGQFGRVAGYMESYTEGDYEFVDMIKGGSIPTEYVPSCDKGFKEAIKKGSLIGFPIVNIRCVINDGQSHPVDSSDIAFQSAAIGAFREAYNKAKPCILEPIMKVSVEGPTEFQGNIFGSITKDAV

SEQ ID NO: 29689 - DNA, 318 bp, Unknown
  Obtained from environmental sample
  misc_feature (1)..(318): n is a, c, g, or t
ttgtcccgcgccgcccgtctgttttttgtgagtgtagttaaattccgctttttgcgtaattgtttcgcggtaagctacctgcggcataccggtatcaagttcgcacttgtactcgcggcgcatacgctcaatgtaaacttcaaggtgaagctcgcccattcctttaataattgtctggttcgattcgggatcaacataagtttggaaagtgggatcttcttttgtaaaacgattaagagcctttgccatctggtcggcgctttttttgtctttcggcgaaatagcgagagaaataacgggattgggaacaaacattga

SEQ ID NO: 29690 - protein, 105 aa, Unknown
  Obtained from environmental sample
  misc_feature (1)..(105): Xaa is any amino acid
MSRAARLFFVSVVKFRFLRNCFAVSYLRHTGIKFALVLAAHTLNVNFKVKLAHSFNNCLVRFGINISLESGIFFCKTIKSLCHLVGAFFVFRRNSERNNGIGNKH

SEQ ID NO: 29691 - DNA, 828 bp, Unknown
  Obtained from environmental sample
  misc_feature (1)..(828): n is a, c, g, or t
atgaagtcggtagacgtggtaattgccacaggcggcggcgcaatggtcaagtcggcttactcctccgggaagccaagcttcggcgtgggaccgggcaacctccagggacttatagacgaggacgtgaaccttgatgaaaccgccaaaaaaatgatccaaagccgtatcttcgacaacggcatcatctgttccggaacccagactatcatcgcccccagaaaaaacttcaaagaggtcatcgataccttcgtgaaaaacggctgttactacatcgacgatcccgccagggtagaagctttcagcaaggtgatctttccctctggagagctgaataaagacgttgtaggccaaagcgtcggaatcatcgccaaacttgccggtatcgaactgcctgcgggtaccaaagccatcatactaaaacccaggacttacggagagggtgatgtactctcccaggaaaagatatgccccgtgctgactgcctacgagtacgattcctgggaacatgcggtacagatagcttacgaaaaccttatggtggaaggggccggccacacggtggacgttcattccaacaacaaagcccacatcgaatacgctgcgttaaaactccccgtctcccggatccttgtcaatcagatcagcgccttgcataacggcggggccttccacaattccctttctcccaccaccacgctgggctgcggaagctggggcaataactcgatcagcgaaaacctttcctattaccatctgttcaacaagtccaggatcgcctacgtgaagcccgactggaaccagccaagcgacgaagagatcttcgcctaa

SEQ ID NO: 29692 - protein, 275 aa, Unknown
  Obtained from environmental sample
  misc_feature (1)..(275): Xaa is any amino acid
MKSVDVVIATGGGAMVKSAYSSGKPSFGVGPGNLQGLIDEDVNLDETAKKMIQSRIFDNGIICSGTQTIIAPRKNFKEVIDTFVKNGCYYIDDPARVEAFSKVIFPSGELNKDVVGQSVGIIAKLAGIELPAGTKAIILKPRTYGEGDVLSQEKICPVLTAYEYDSWEHAVQIAYENLMVEGAGHTVDVHSNNKAHIEYAALKLPVSRILVNQISALHNGGAFHNSLSPTTTLGCGSWGNNSISENLSYYHLFNKSRIAYVKPDWNQPSDEEIFA

SEQ ID NO: 29693 - DNA, 831 bp, Unknown
  Obtained from environmental sample
  misc_feature (1)..(831): n is a, c, g, or t
atgaaattacttgaataccaggccaaagagatctttaaaaaatacgatgtacccatacaaaaaggaatcgttatcgacgcaaagacaggagcggcagaaaagataaaagcggcgaatcttgccttccctgtggcaattaaagctcaggtccaaatcggaggccggggcaaagccgggggcgtcaaattcgccgataacgccgaagacgcagggaaactctgcgaagccatgctgggcatggacatccggggatttgccgccaatgaactactcgtggaagagaaaaaagaaattagtaaagagtggtatctctccataatactggaccgttataccaaagctcccctcttaatcttttctccaatgggaggcatggacattgaagaaaccgcccgaactaacgcggataaaatcgccaaagtgcccatcgatccggttcggggtgtccaggactatgtgattaactacgccatggataaaacctgcgcggacaagcgttacaaggatcagctcaaggccatggtggaaaagctatacaagctgttttttgattactatacgatgttagtcgaaatcaatccccttgcgataggaaacgatggaaatctgatcgctttggacggcaaggtggagattgatgataacgctctgcctttcctgcctgacatcacagcctggagggacaaggctccagacgatccccagataatcgaagcccgcaaggtgaacttcctctttatccccgtagatgacgacggggacatcggggttatgtccaaacgctccggtatgctgatgagctgcatcgaccttatcacaaanaagggatga

SEQ ID NO: 29694 - protein, 276 aa, Unknown
  Obtained from environmental sample
  DOMAIN (2)...(197): ATP-grasp domain
  misc_feature (1)..(276): Xaa is any amino acid
MKLLEYQAKEIFKKYDVPIQKGIVIDAKTGAAEKIKAANLAFPVAIKAQVQIGGRGKAGGVKFADNAEDAGKLCEAMLGMDIRGFAANELLVEEKKEISKEWYLSIILDRYTKAPLLIFSPMGGMDIEETARTNADKIAKVPIDPVRGVQDYVINYAMDKTCADKRYKDQLKAMVEKLYKLFFDYYTMLVEINPLAIGNDGNLIALDGKVEIDDNALPFLPDITAWRDKAPDDPQIIEARKVNFLFIPVDDDGDIGVMSKRSGMLMSCIDLITXKG

SEQ ID NO: 29695 - DNA, 1530 bp, Unknown
  Obtained from environmental sample
  misc_feature (1)..(1530): n is a, c, g, or t
gtggttttcggccatcagtttgcctccattgccggcgcggggcctataaacgggccgatcctcgccgtcatgttcgggtgggtgccggtgttgctttggatattggtcgggggggtgttctttggggcggttcaggactntgcggcgctctacgcttcggtgaagaacaaggggaagactatcgggttcataattgagatgtacatcggcaagacgggcaagcggctcttccttatcttcgtgtggcttttttcgatattggtggtggcggcctttgcggacattgtggcggggacgttcggcgggttcgacaaggtggcgggcggcgaggttatcaagattcaggccaacgcttccgtggcgaccacatccatgctctttatcgtcgcggctgtgggccttggcctcttcatgcggcgcgttaagcctacggggcttgtcagcgccgcgatcgcttgcgctgttttggtgctttgtatcgcggcgggactcttttttcctatgtatgtcgataagggcgtttggttgtatctcgtgttcgcttatatattcttagcctccatcacccctgtgtgggcgttattgcaaccgagggactacctcaactctttcctgcttgtggcaatgatcgcggcggcttttgtgggcgtggtgattgccgcgccgcccatcaacataccggcgtttaccggctttaaggcgggcgacagttacatgttccccatcctcttcgtgacggtggcctgcggcgcggtctccggtttccacagcctcgtctcatcgggcactacgagcaagcagatagcgagcgaaaaacatattctgcccatcgggttcggttcaatgctcgtggagagttttttggcggtcatagcggtcataaccgtcggcgcaattaccataggcggaaaactcccgcaaggcattgaaacgccaccgcagattttcgcttccgcggtggctagttttcttgtaaagaccggattgccggagagcgtggtcttcacgctgatcaccctatcgataagcgccttcgccctcacctccttagactcggtcgcccgcgtgggacgtttggcttttcaggaactctttaccgaatcggaatcggaaaccggcggaaaggcgatgccgtcgcggataaggaatttcctgcgcgacaagtacgtggcgacgaccggaacgctgctcttcggttatttgctcgccattttgggctacaaggcaatttggccgctgttcggctcggccaaccaattgcttgccgccttgtccttgatcgcttgcgccgttttcttgaagaagacaaagcgtcagggggtaatgctctacgcgcccatgtttatcatgttggccgtgacgtttacggcgttgatcattaccatattgaccaagggcggaaaactcttcgacggcacgttcgatatcagcaaagactttttgcagttaacctttgccatactgcttttgggccttgggacgatggtcgcggtgcagggcgtcggcaggctgagagaacgtgaaaggtaa

SEQ ID NO: 29696 - protein, 509 aa, Unknown
  Obtained from environmental sample
  DOMAIN (1)...(343): Carbon starvation protein CstA
  misc_feature (1)..(509): Xaa is any amino acid
MVFGHQFASIAGAGPINGPILAVMFGWVPVLLWILVGGVFFGAVQDXAALYASVKNKGKTIGFIIEMYIGKTGKRLFLIFVWLFSILVVAAFADIVAGTFGGFDKVAGGEVIKIQANASVATTSMLFIVAAVGLGLFMRRVKPTGLVSAAIACAVLVLCIAAGLFFPMYVDKGVWLYLVFAYIFLASITPVWALLQPRDYLNSFLLVAMIAAAFVGVVIAAPPINIPAFTGFKAGDSYMFPILFVTVACGAVSGFHSLVSSGTTSKQIASEKHILPIGFGSMLVESFLAVIAVITVGAITIGGKLPQGIETPPQIFASAVASFLVKTGLPESVVFTLITLSISAFALTSLDSVARVGRLAFQELFTESESETGGKAMPSRIRNFLRDKYVATTGTLLFGYLLAILGYKAIWPLFGSANQLLAALSLIACAVFLKKTKRQGVMLYAPMFIMLAVTFTALIITILTKGGKLFDGTFDISKDFLQLTFAILLLGLGTMVAVQGVGRLRERER

SEQ ID NO: 29697 - DNA, 714 bp, Unknown
  Obtained from environmental sample
  misc_feature (1)..(714): n is a, c, g, or t
ttgcacccgaaacaccgcagcctattatggcggcgtcaaattccattggtttattatatagtaatttttcgtattagactatattatgatattatggcggaacgaaagaggctgtttatggagaagaaagccggtaaaaaagaccggatagaaaccataaaatgggcggcgcagaataattatgacacgctggtttttcctttagctgaatgtttcaatgggcttcaccgtgaatacatcaagttgataaaacggtacgagcttaacattgaggcgggggggcgcgagctgtctttatttgttcccaggaatttgtttttgttccaccgtgaacttttccgcatggagcagggcaggcggaaaaaaaagcatcatttttgcccgacaaatcctaagtcaacggctgttatcgcggaaaacgcgcaaaaaatttttgaacgctccatgcaggttgtaactcaacgccgcgtttttcacctgtggccggaggaggggcacgagaatacctggtgcgcgtgtccggcctgccgcgcgttcactcccgccgaacaatacgtcatcgcggtaaacacggtagcggacatgcttgcgaagatggatccagacgcgcggctttcgtatcttgattacggagaagagcaggagaagacggggattgcgccgagaaagaatatgttcaaggttaagagagaacaaataagaaataacaaataa

SEQ ID NO: 29698 - protein, 237 aa, Unknown
  Obtained from environmental sample
  misc_feature (1)..(237): Xaa is any amino acid
MHPKHRSLLWRRQIPLVYYIVIFRIRLYYDIMAERKRLFMEKKAGKKDRIETIKWAAQNNYDTLVFPLAECFNGLHREYIKLIKRYELNIEAGGRELSLFVPRNLFLFHRELFRMEQGRRKKKHHFCPTNPKSTAVIAENAQKIFERSMQVVTQRRVFHLWPEEGHENTWCACPACRAFTPAEQYVIAVNTVADMLAKMDPDARLSYLDYGEEQEKTGIAPRKNMFKVKREQIRNNK

SEQ ID NO: 29699 - DNA, 453 bp, Unknown
  Obtained from environmental sample
  misc_feature (1)..(453): n is a, c, g, or t
atggaagaagttgccgcgctcatagttgagctgctcaaaacgcacaatcgggtttcgctccccggcatgggggctttcatggcaaatccgcagcctgccgtcattgacaaggaaaagcaagcgattttacctccctcgaaaaggattaccttttcgaaagcggaaacgtggaatgacggcttgctggaacagctgtacgccgaacggcatgggttgagcgttggcgaggcttgcgacaggctgcgccacatcattaccgacattcgctttgagcttgacgccaacggaaaagttatactgcaggggctgggaatgctccgacaaacgcaagcccgcgacatcagctttgggttgaacaaaaacctaaacctgaaagcggactcctacggcttgaatgaggtgaggctggattcgggagcaaacgccttagggtcgggcactcggccgatctga

SEQ ID NO: 29700 - protein, 150 aa, Unknown
  Obtained from environmental sample
  misc_feature (1)..(150): Xaa is any amino acid
MEEVAALIVELLKTHNRVSLPGMGAFMANPQPAVIDKEKQAILPPSKRITFSKAETWNDGLLEQLYAERHGLSVGEACDRLRHIITDIRFELDANGKVILQGLGMLRQTQARDISFGLNKNLNLKADSYGLNEVRLDSGANALGSGTRPI

SEQ ID NO: 29701 - DNA, 486 bp, Unknown
  Obtained from environmental sample
  misc_feature (1)..(486): n is a, c, g, or t
gtggcagcttatcagccgctttcgtttgcaccgctggagaatgtaattgccgaagggcgcacgcgctttggcgcaataatggctgcgctccgagatgtgtttaaggtgctgatagaccaccagcggcgcggcattcccaccatgacgcttatggtgtccgaccagtcgccggcgcgcggctcgtgtacgcactggcttacgctgctggggcagccaacgcctgtgcttgttggtcccgagcgcatagcgcaaaaaataagcgcagcggtgatgtacctgcgcattgtggaaaaaaaacgattcagctacgagtacgagctggtgatgttgagcgaaaacgccgcgcaggaggcggaaatggcggtaacaaagaggttttacactgagctggaaaaagaccttcggcgcgtaccgcagctgtggatgtggacgcacaagcgttggaagcatcaagatttgtttgacaataagaaaaacactttataa

SEQ ID NO: 29702 - protein, 161 aa, Unknown
  Obtained from environmental sample
  misc_feature (1)..(161): Xaa is any amino acid
MAAYQPLSFAPLENVIAEGRTRFGAIMAALRDVFKVLIDHQRRGIPTMTLMVSDQSPARGSCTHWLTLLGQPTPVLVGPERIAQKISAAVMYLRIVEKKRFSYEYELVMLSENAAQEAEMAVTKRFYTELEKDLRRVPQLWMWTHKRWKHQDLFDNKKNTL

SEQ ID NO: 29703 - DNA, 540 bp, Unknown
  Obtained from environmental sample
  misc_feature (1)..(540): n is a, c, g, or t
atggcgagagtctcggagaacgctctacctatggggcaacagtattttctgcaagtcgattacggcaacagatactccctgacgctgtccggcgattcggcgatgttgaccgtccgcccgaacagcacgacggagcaacgtgggaacttcgtccgcgaatggtaccgcgaacagctaaaagaagagataacccgcacgctccccaaatgggaaacggcaaccggcctgaaatgcgactcttggcagacaaagcagatgacaagcaaatggggaacgtgcaacatatccaagcgtaaaatatggctgaacctccaactcgtccaaaaacccatagagtgcttggaatacatcatcctgcacgagttagcccacctaaaagtaagaaaccacaacgcggccttcgcggcgctgctggacaagtatatgccgttttggagagagatcaagaagaggctgaacgatcagacgctggattgctgggagggcggcggaactggcgagcgtgtgaacgggcgggagcgcgatggcggggtttgttaa

SEQ ID NO: 29704 - protein, 179 aa, Unknown
  Obtained from environmental sample
  DOMAIN (2)...(155): Protein of unknown function DUF45
  misc_feature (1)..(179): Xaa is any amino acid
MARVSENALPMGQQYFLQVDYGNRYSLTLSGDSAMLTVRPNSTTEQRGNFVREWYREQLKEEITRTLPKWETATGLKCDSWQTKQMTSKWGTCNISKRKIWLNLQLVQKPIECLEYIILHELAHLKVRNHNAAFAALLDKYMPFWREIKKRLNDQTLDCWEGGGTGERVNGRERDGGVC

SEQ ID NO: 29705 - DNA, 882 bp, Unknown
  Obtained from environmental sample
  misc_feature (1)..(882): n is a, c, g, or t
ttgatattaatgaaaggaagagcgcttctcttggttaatcctcaaaagggtcatgcgcgaaagctgggcaatgaaatactaaaagaactgctcgccatgaatattgaaacggatacctactcaattaaggaaagtcccgttatttcaaaagacaaaaaatataacgttgcgttagttcttggcggagacgggactgttctgtccgcggcaagagcggtgtccccgcttggtattccgatttttcccataaaccttggaacatttggctttattgccgaggtacagcccattgaatggcgggatgtttttgacagttggacggcgggaaaggtatccgtttcccggcgtctaatgcttgaggtatcggttgaaaggaatggccgcgaagtcttacggaaatgctgtcttaacgatgtgattatttcatcttccgtaattgccaaaataattaatctgggccttttctacagagaagggggaatggaaacagacctgaagctgggttcgtaccgctctgatggccttataatagccactcctaccggttcaaccgcctattcagccgcggtaggcggtcccattgttgatcctgaacttgaggcgctgattttaagccccatttgccctttcatgcttacaaaccgccctttggtattgcccgcagccggaatggtgatcgcggaagtggcggataagcagcanagtggggtaatattgacattggacggtcaggtcagggagaaaattaaaaagggggacaggatctttgtgnaaaagacacctatttcctgttttttaattgcctcctgccgcagtggtttttattcggcgctcaggaaaaaactatcatgggcgggagatggggaagtccggagcgagtaa

SEQ ID NO: 29706 - protein, 293 aa, Unknown
  Obtained from environmental sample
  DOMAIN (7)...(129): Diacylglycerol kinase catalytic domain (presumed)
  misc_feature (1)..(293): Xaa is any amino acid
MILMKGRALLLVNPQKGHARKLGNEILKELLAMNIETDTYSIKESPVISKDKKYNVALVLGGDGTVLSAARAVSPLGIPIFPINLGTFGFIAEVQPIEWRDVFDSWTAGKVSVSRRLMLEVSVERNGREVLRKCCLNDVIISSSVIAKIINLGLFYREGGMETDLKLGSYRSDGLIIATPTGSTAYSAAVGGPIVDPELEALILSPICPFMLTNRPLVLPAAGMVIAEVADKQXSGVILTLDGQVREKIKKGDRIFVXKTPISCFLIASCRSGFYSALRKKLSWAGDGEVRSE

SEQ ID NO: 29707 - DNA, 675 bp, Unknown
  Obtained from environmental sample
  misc_feature (1)..(675): n is a, c, g, or t
atgatagaagaacttagcgtaaggaatttcgcgctgatagacagccttaacctctcttttgaaaaaggctttacggtcttgtcgggggaaactggagccgggaaatccataatcgtgggatcccttagttttctttttggcgcaaaagcagacagcgaaattatccgttcaggttcagaagaagcaagcgtttcggcggtggttaccgttgatggcaaaaaccgggatgccctgcaatggcttagccagcgggaaattgacccggaagattccaggcttgtaatacggcgcagcgtaaaagcctcgggccgcaattcaatctatatacaaaatgtacctgtaacccggaacgatcttgccgaatttatgggctttctttttgacctccacggccagcacacccacgaatcacttttgagaaaagaaactcaccgcgtttaccttgaccggttttcaggcctggaaaatgaagtcgcggcattcagccaggtgtttatggagctggcagaaaagcgcaagaccctagaatcgctgaaccgttccgaaaaggaaaggagtcagaggctagagctgttaaattacgctattgaggaaatttccaaagccgctcccaaaaatggggagataaaagagctggaagctgaaacccagcgcctttcggatttgaaaagctaa

SEQ ID NO: 29708 - protein, 224 aa, Unknown
  Obtained from environmental sample
  DOMAIN (1)...(210): RecF/RecN/SMC N terminal domain
  misc_feature (1)..(224): Xaa is any amino acid
MIEELSVRNFALIDSLNLSFEKGFTVLSGETGAGKSIIVGSLSFLFGAKADSEIIRSGSEEASVSAVVTVDGKNRDALQWLSQREIDPEDSRLVIRRSVKASGRNSIYIQNVPVTRNDLAEFMGFLFDLHGQHTHESLLRKETHRVYLDRFSGLENEVAAFSQVFMELAEKRKTLESLNRSEKERSQRLELLNYAIEEISKAAPKNGEIKELEAETQRLSDLKS

SEQ ID NO: 29709 - DNA, 720 bp, Unknown
  Obtained from environmental sample
  misc_feature (1)..(720): n is a, c, g, or t
ttgaaggaccaaatgacttacggcacaggctgttttctgttgatgaacacaggtacagacgccgccgtaagcgcgaacggtcttttaactacaatcgccgcggggttaagcgaaaaagttcaatatgtgcttgaaggttcagtctttacgggcggcgcggttattcaatggttacgggacgaattgcgtattattaccgacagcgcggacagcgaatattatgcggagaaagtaaagaataccggaggcgtctatcttgttccggcgtttacgggacttggcgcgccgtattgggatatgtacgcgcgcggctgtataatcggaattacgcgcggaacaaaaagggcgcacattatcagggcggcgcaggaatccatcgcgtatcaggtaatggatcttttaaacgccatggaaaacgatcttggagtaaaactaaaagagttaaaagttgacggcggcgcgagcagggataaattccttatgcagtttcaggcggatatgtgccgcgcgcggattatacgccctattgtccgcgaaacaacggctctcggcgcggcgtgccttgcgggaattaccgttggtttttggaaagacttgaacgaaatcaaaaaatgctggcgggaggacactgttttttcgcctgaaatggacaatgaaaaacgcggtaaattaatagccggctggcataaagcggtggaaagaagccgcggctgggcttga

SEQ ID NO: 29710 - protein, 239 aa, Unknown
  Obtained from environmental sample
  DOMAIN (1)...(223): FGGY family of carbohydrate kinases, C-terminal domain
  misc_feature (1)..(239): Xaa is any amino acid
MKDQMTYGTGCFLLMNTGTDAAVSANGLLTTIAAGLSEKVQYVLEGSVFTGGAVIQWLRDELRIITDSADSEYYAEKVKNTGGVYLVPAFTGLGAPYWDMYARGCIIGITRGTKRAHIIRAAQESIAYQVMDLLNAMENDLGVKLKELKVDGGASRDKFLMQFQADMCRARIIRPIVRETTALGAACLAGITVGFWKDLNEIKKCWREDTVFSPEMDNEKRGKLIAGWHKAVERSRGWA

SEQ ID NO: 29711 - DNA, 1296 bp, Unknown
  Obtained from environmental sample
  misc_feature (1)..(1296): n is a, c, g, or t
gtggtagattggccgagcgagagatcttggtgcgggcaggcaagaatccaattgcagaaatacggccgtctgtacggttgggagacggcgaaaatcgcatgtcccgcgggctggcacctctccaccgtagaggaatgggacaggctgctgacggctataggcggtaaaaaaggagggatggacggaagcgactgggtaggcgtaggcaagaaactgaaagcgaagggccgctggggcagttggtggcgcaaaaaactaagcggcgacggcgcggacaattacggtttttcggcattgcccggcggccagcgttacagaagcggcgaattcatgaaaccgggcgaacgaggcaattggtggacggctaaagaaaacaacggttcaagcgcgtataatcgggagatgatcttcaactacgatctcgtgttcgccggtacgggtttcaaggaggaggggttctcggtgaggtgtgtgagcgacgacggcgagattgtcaaggccaaggccggcgagggcggcgcgttctcgcttactgtaaccgcgggaaatggcggtacggcgtccgtcgcaccgcgcaaagatacctactccatcggcgagagggttacgatcgccgccgtccccgacgacgggtacgccttcgccggttggacgggcgggcgcgtcacggattccgtttcattgattacctccgccgtaatgcgttcggacatggccgtcgccgcgaatttccggcgtatcgattacggtacgcttgccgacaagagggacgggagaacgtaccgcacggtaaatataggcggcaaaacgtggatggctgagaatctgaattacgaacccgaaccgtcggcgggcaaatcatcgtgtcttggcggtaggaacggcaactgcgcgaagtacggaagattgtatgatttccgcacggcgacggaggtctgcccgtccggttggcatctgccttcgcttaacgattgggacgagctggctatttgcgttggggggctcgatgtggccggcaggaagctgaaagcggcaaaaggctgggtgggggagtccggctatcgcggcacaggcacggacgactacggtttctcggccctgcccggcggcggcgaacccaacagcttcgagaatgacgacatcttcggcgcgtggtggacgaccacgaagatgtacgatgtcgcccctataaacgctcggatcacgctctataaagacgagttgagcgggcttgccgctgagaagagcgatatgtgttcggtgaggtgcgttatggacgagaaggttgagcgctga

SEQ ID NO: 29712 - protein, 431 aa, Unknown
  Obtained from environmental sample
  misc_feature (1)..(431): Xaa is any amino acid
MVDWPSERSWCGQARIQLQKYGRLYGWETAKIACPAGWHLSTVEEWDRLLTAIGGKKGGMDGSDWVGVGKKLKAKGRWGSWWRKKLSGDGADNYGFSALPGGQRYRSGEFMKPGERGNWWTAKENNGSSAYNREMIFNYDLVFAGTGFKEEGFSVRCVSDDGEIVKAKAGEGGAFSLTVTAGNGGTASVAPRKDTYSIGERVTIAAVPDDGYAFAGWTGGRVTDSVSLITSAVMRSDMAVAANFRRIDYGTLADKRDGRTYRTVNIGGKTWMAENLNYEPEPSAGKSSCLGGRNGNCAKYGRLYDFRTATEVCPSGWHLPSLNDWDELAICVGGLDVAGRKLKAAKGWVGESGYRGTGTDDYGFSALPGGGEPNSFENDDIFGAWWTTTKMYDVAPINARITLYKDELSGLAAEKSDMCSVRCVMDEKVER

SEQ ID NO: 29713 - DNA, 645 bp, Unknown
  Obtained from environmental sample
  misc_feature (1)..(645): n is a, c, g, or t
ttgcataattgtaacgcgcacatacttgtctatgaaccttcaggtgcacctcaaaacgatgtaatgactcatgcaaaaaaaatcccccagatgaccgccggcaaggcgtcgcttatcggccttatgaaccgctatctgcaagggctgcttgatcccttcgtgacgctgctggaagtacataagttaatgtattttatgcaggaaagtggagagaagttgcgattaatatataccaaagccccttatggcccatatgcaaataatttacgtcatgtattaaacgctatagaaggatacttcatttccggatatgcggacggaggtgacaagcctgataaacaactggaattggttcctggcgcattacaagaagcggaaatatttttacaaaactgtccggaaacaagaaaacgttttgaacgaatttccgatttagtagatggttttgaatcatcatttggtctggaactgctttcaactgtacattgggtaatccaaaaagaaaacgcccgaacatacgaagacgttttaagacaaacatacgcatggaatgagcggaaaaaacagttttcagacaggcaaattaaaatcgctacgacagtgcttgctaaaaaagactggatatcaccacttgattctctttaa

SEQ ID NO: 29714 - protein, 214 aa, Unknown
  Obtained from environmental sample
  misc_feature (1)..(214): Xaa is any amino acid
MHNCNAHILVYEPSGAPQNDVMTHAKKIPQMTAGKASLIGLMNRYLQGLLDPFVTLLEVHKLMYFMQESGEKLRLIYTKAPYGPYANNLRHVLNAIEGYFISGYADGGDKPDKQLELVPGALQEAEIFLQNCPETRKRFERISDLVDGFESSFGLELLSTVHWVIQKENARTYEDVLRQTYAWNERKKQFSDRQIKIATTVLAKKDWISPLDSL

SEQ ID NO: 29715 - DNA, 735 bp, Unknown
  Obtained from environmental sample
  misc_feature (1)..(735): n is a, c, g, or t
atgaccgttattctgtttttaatagttccgtccccaaggatgaaaagggcggaaaagagagaacggcagagccttgctttttcgcgggaaaccataataacgcaggagagggaacgcctgcgtatagcccgtgaattgcatgatacggtcgcgcaggatttgtggcggctttcgtttcaaactgaaagcatagacaaggctgatgaaaacgcgcagaggagcaaactttgcgcggaagttgtaaagggtcagaaggaaatcatgcagagggtaagaagcatttgcgacaaccttatacctccggatttccaacggcggcattttgacgacgcgcttcagaacctttgttataattttgaacaacgtaccggaattgaatgtcagcttgttattcaggacaatcttctgcccggttctctggacggcgatactcagttacagagttttcgcattgtgcaggaatgtttaacaaatacagagaaacacgctgaagcctctaaaatatcggtgatagtacgaagcatcaaagaaggcgaactggtaatttgcgtgtcagataacggcaaaggtttctcgccgcccggcagagacagtttgcgctctgacggcggccactacggattatggaacatttatgaacgcgccgcgtccattcaggcggcggtaaccatagacagcgaaaaagacgaaggcactacggtaacattgcagataccgttttcggagaaaatatga

SEQ ID NO: 29716 - protein, 244 aa, Unknown
  Obtained from environmental sample
  DOMAIN (38)...(103): Histidine kinase
  misc_feature (1)..(244): Xaa is any amino acid
MTVILFLIVPSPRMKRAEKRERQSLAFSRETIITQERERLRIARELHDTVAQDLWRLSFQTESIDKADENAQRSKLCAEVVKGQKEIMQRVRSICDNLIPPDFQRRHFDDALQNLCYNFEQRTGIECQLVIQDNLLPGSLDGDTQLQSFRIVQECLTNTEKHAEASKISVIVRSIKEGELVICVSDNGKGFSPPGRDSLRSDGGHYGLWNIYERAASIQAAVTIDSEKDEGTTVTLQIPFSEKI

SEQ ID NO: 29717 - DNA, 1455 bp, Unknown
  Obtained from environmental sample
  misc_feature (1)..(1455): n is a, c, g, or t
ttggcaacggcgaaggctgctgaaatacattcagcataccaacctcgatggataccgcaagctgatcaaggaactgggcctgcgcaaataatgatacaaaaagtaacaatccaaattgccggcaaagaccttgttcttgaaaccggcagaatcgcaagacaggcaaacggcgcggttttcgcgcagtatgcgggatcagcagtgatagcgactgtctgctcatcttcggaaccagtggaagggctggattacgttccccttacggttgattacaacgaaaaatactatgccgcagggaagatccccggaggcttcatcaagcgggaaagccggcccaaggacaaggaaatcctggtcagccgccttatcgaccgcccgatgcgtccgcttttcgagaaggctttcggcagggagatacaacttgtccccaccacgctttcgaccgatcaggtaaacccgccggacatgctggcgataatcgcctcgtccgccgcggtgcatatttcggacattccctttaacggccccattgcaggggtacgggtctgccaggtggacggcgaactggtggtcaatcctacttacgagcagattgaaaaatccacaatggaaattgttgtcgccggtacaagagacggcattacaatggtcgagggcggggcaaaagaggtcagcgaggatctgatgatacaggccctggacaaggcccataatatgatccttgagttatgcgactttcaggaaaaactgcgcgaacttgcgggcaagcctaaacttccgctggctgtccctacccatgttctggaaaacagtgacgcgatccgcgcgtcggcatacccgaaacttgaaaaggcctgttttctcgcgaccaagcaggaacgtcatgagggcattaaagctatacaaatggaattagcggcgcagtacgcggtccagctgagggacgaaaaacagaaaaaactctttaacgcgttatttgaggatatgcagtataacatcctccgttcgtcgatacttaataatggccgccgcgttgacggacggggtactgaggacatacgcgatataacctgcgaagttgatatactcgccagaacccacggatcggcgctttttacccgcggcgaaacccaggccctggttgtaacgaccctgggtacggtgtttgacgagcaggtgtatgacgacatcgaaggtgacaagcgggagcattttatgctccactacaattttcctccatattcagttggcgaagtcggcaggctgggaacaggccgccgcgagataggtcacggaaaccttgcccgtcgttcgctggaagccgttgttccctcaaaagatgatttcccgtatacggtgcgggtggtctcggagataatggaatcaaacggctcctcgtcaatggcatcggtttgcggtggaacgctttcaatgcttcatgccggggtgccctga

SEQ ID NO: 29718 - protein, 484 aa, Unknown
  Obtained from environmental sample
  DOMAIN (271)...(349): Polyribonucleotide nucleotidyltransferase, RNA binding domain
  misc_feature (1)..(484): Xaa is any amino acid
MATAKAAEIHSAYQPRWIPQADQGTGPAQIMIQKVTIQIAGKDLVLETGRIARQANGAVFAQYAGSAVIATVCSSSEPVEGLDYVPLTVDYNEKYYAAGKIPGGFIKRESRPKDKEILVSRLIDRPMRPLFEKAFGREIQLVPTTLSTDQVNPPDMLAIIASSAAVHISDIPFNGPIAGVRVCQVDGELVVNPTYEQIEKSTMEIVVAGTRDGITMVEGGAKEVSEDLMIQALDKAHNMILELCDFQEKLRELAGKPKLPLAVPTHVLENSDAIRASAYPKLEKACFLATKQERHEGIKAIQMELAAQYAVQLRDEKQKKLFNALFEDMQYNILRSSILNNGRRVDGRGTEDIRDITCEVDILARTHGSALFTRGETQALVVTTLGTVFDEQVYDDIEGDKREHFMLHYNFPPYSVGEVGRLGTGRREIGHGNLARRSLEAVVPSKDDFPYTVRVVSEIMESNGSSSMASVCGGTLSMLHAGVP

SEQ ID NO: 29719 - DNA, 492 bp, Unknown
  Obtained from environmental sample
  misc_feature (1)..(492): n is a, c, g, or t
atgggccttgtccagggcctgtatcatcagatcctcgctgacctcttttgccccgccctcgaccattgtaatgccgtctcttgtaccggcgacaacaatttccattgtggatttttcaatctgctcgtaagtaggattgaccaccagttcgccgtccacctggcagacccgtacccctgcaatggggccgttaaagggaatgtccgaaatatgcaccgcggcggacgaggcgattatcgccagcatgtccggcgggtttacctgatcggtcgaaagcgtggtggggacaagttgtatctccctgccgaaagccttctcgaaaagcggacgcatcgggcggtcgataaggcggctgaccaggatttccttgtccttgggccggctttcccgcttgatgaagcctccggggatcttccctgcggcatagtatttttcgttgtaatcaaccgtaaggggaacgtaatccagcccttccactggttccgaagatga

SEQ ID NO: 29720 - protein, 163 aa, Unknown
  Obtained from environmental sample
  misc_feature (1)..(163): Xaa is any amino acid
MGLVQGLYHQILADLFCPALDHCNAVSCTGDNNFHCGFFNLLVSRIDHQFAVHLADPYPCNGAVKGNVRNMHRGGRGDYRQHVRRVYLIGRKRGGDKLYLPAESLLEKRTHRAVDKAADQDFLVLGPAFPLDEASGDLPCGIVFFVVINRKGNVIQPFHWFRR

SEQ ID NO: 29721 - DNA, 732 bp, Unknown
  Obtained from environmental sample
  misc_feature (1)..(732): n is a, c, g, or t
gtgcatcttttggcgctcaataacgccgccgcccctcttgatgatgtccgcgtgcgtaaagctataaattacggcattgacgttcagggcataattgacggcgcttttttcggaaacggttttccgtcaggcagccccataattccgggattatacaattattatgacgcatccctcagttatccgtatgatccgaatacggcgcgctcccttctcgcggaagcaggttttgacaatatccgcaaactaacgctggacattacagtgccttccgagtacaccatgcatgtagataccgcgcaggtaattgtaagccagcttgaaaaaataggggttgccgcgtccgtcaaacttgtcgactggaacacatggctttccgacgtttacaggggacacaattatcaagcgacagttatttccctggacagccagattgtatccgcgcgcaatttccttgcccgctacagatcagataacagcggtaattttatttgtttttcaaacgctgattttgacagggtttatgacgctatacttacagaaacggacgaagttaaaaggaaacatctttatttggaagcgcagcgcataataacatcaaacgcggcaagcgtatatattcaggatattctttattataaagttttccgcgccggcgcttacgacggcgtgaaaaattatccgttattggtggttgacttttctgcaatttacgggataaagaaaaattga

SEQ ID NO: 29722 - protein, 243 aa, Unknown
  Obtained from environmental sample
  misc_feature (1)..(243): Xaa is any amino acid
MHLLALNNAAAPLDDVRVRKAINYGIDVQGIIDGAFFGNGFPSGSPIIPGLYNYYDASLSYPYDPNTARSLLAEAGFDNIRKLTLDITVPSEYTMHVDTAQVIVSQLEKIGVAASVKLVDWNTWLSDVYRGHNYQATVISLDSQIVSARNFLARYRSDNSGNFICFSNADFDRVYDAILTETDEVKRKHLYLEAQRIITSNAASVYIQDILYYKVFRAGAYDGVKNYPLLVVDFSAIYGIKKN

SEQ ID NO: 29723 - DNA, 843 bp, Unknown
  Obtained from environmental sample
  misc_feature (1)..(843): n is a, c, g, or t
atggtttctgctttaaaccagaaatataaaattccagaatctgatcaaagaggtccgtctaacgtcagttggctttgtatattagcaattgataatcaagttcattatgtacatggaacctgtgcgaatactcctgactttagaatttccgatgatgttcctcacatgccaagagaaatgtggattttatttaggtatatagtagatttatctcccattgaaataatgaaatccggacatagacccgctaaccctccccctcctttccccccaacccccctcacgtatcaaaaaggtacattcaccgatacgcgagacggcaaaacatacaaaacaacaaaaatcaacgagcaggtttggatgtcggaaaatttgaattatgagatgaatggttctaaatgttacaagaacgaacctgtcaactgcgaaaaatacgggagattatataatttggaagcggctagtaaagcttgtccaaacggttggcatttgcctagctattacgagtgggatgtattgataataccgattggcggctatagcgtagcaggcaaatttcttaaggcgacaagcggttggaatgattacaaaggaaaatctggtaatggcgatgataaatatggatttgccgccctacctggtggctttggcagatctaattgtgttttcgacagtgtcggtgtttacggtcgttggtggtatgaatacacagttcctggtagctatggcattgggattccagaatatatctgggttacctactacacacgatacgaggataaccccttgcttagtgttcgttgtttgcaagaccccaccccacccaaaggagaggcaaaatga

SEQ ID NO: 29724 - protein, 280 aa, Unknown
  Obtained from environmental sample
  misc_feature (1)..(280): Xaa is any amino acid
MVSALNQKYKIPESDQRGPSNVSWLCILAIDNQVHYVHGTCANTPDFRISDDVPHMPREMWILFRYIVDLSPIEIMKSGHRPANPPPPFPPTPLTYQKGTFTDTRDGKTYKTTKINEQVWMSENLNYEMNGSKCYKNEPVNCEKYGRLYNLEAASKACPNGWHLPSYYEWDVLIIPIGGYSVAGKFLKATSGWNDYKGKSGNGDDKYGFAALPGGFGRSNCVFDSVGVYGRWWYEYTVPGSYGIGIPEYIWVTYYTRYEDNPLLSVRCLQDPTPPKGEAK

SEQ ID NO: 29725 - DNA, 591 bp, Unknown
  Obtained from environmental sample
  misc_feature (1)..(591): n is a, c, g, or t
ttggaaaagtttgacgcttatgcggcatcgaccaatatcgaggaaaactcacgctattattccctgcgcgttccggcgcattattacgacgctttcctcgccgaaatggacggcatgggaaggcttatcaaccgctatgaaagcaccgaagacgtatccctccgttattatgatcttgaagggcggcttgcgaccaaaaaagagctgttgaaaacatttcaatcctatcttggaaaggcaaaaaccattgaggaaattctttcggtggaagcgcgtatatcggatcttcaatacgatattgaaggaacgggaatacagtttcgtaaccttgccaacatggtagactacgccactattgacctgtctttttttggaccggtaacatcaacgcccaaccggggcttaactttgggcgaacgcgtcaaacagcttttcggcagtttcggcggtttcctgtcaacagtcgcaatggttttaatcggcattgtcatttacgggattcccgttctgctgttattgggtttgctgttcctgcttctgttcggcaaaatcggacttgcccggaaattatggcggctgattaaatcctga

SEQ ID NO: 29726 - protein, 196 aa, Unknown
  Obtained from environmental sample
  misc_feature (1)..(196): Xaa is any amino acid
MEKFDAYAASTNIEENSRYYSLRVPAHYYDAFLAEMDGMGRLINRYESTEDVSLRYYDLEGRLATKKELLKTFQSYLGKAKTIEEILSVEARISDLQYDIEGTGIQFRNLANMVDYATIDLSFFGPVTSTPNRGLTLGERVKQLFGSFGGFLSTVAMVLIGIVIYGIPVLLLLGLLFLLLFGKIGLARKLWRLIKS

SEQ ID NO: 29727 - DNA, 1278 bp, Unknown
  Obtained from environmental sample
  misc_feature (1)..(1278): n is a, c, g, or t
ttggttatttattcggcggcatattcgtccgaagaaaaccctgaaattgccgaagcagagaggcgcggcattccggcctataagtataccgacgcccttggtgcgtactcggcgggctttgattcaacggggattaccggggttcacggcaagactactacaaccgccctcgccggtacgctgctacgcggcgcgggtcttccggctcaggttctggtgggaagcgccgtcaacggctttggcggccgatgtacgcttagccttggagataaatactttgtcgccgaaacctgcgagtacaggcggcattttttgtcttttcatcccaaaacgattatcctgaccagcgtggaaagcgaccaccaggattattacccgcgctacgaagacatcagggacgcctttattgaatacggaaggctccttccacccgacggcgattttattttctgtgccgatgatcctggcgcgtctgaagtcgccgcgttcctcaaaaaagaaaagccggaaataaaccttgtcccctatggctttggcgcacagaatgattaccggattgagagctatcaggttattaatgaaagggtagtaatcaggcttaaaggttttccgggcgaattaaagatccgcatacccggaaggcatacagcccttaatacggcggcggccattgccctgtgttcacttcttgtgaaaaaggaatttggaaatgacagtgatgacggatggaatgaggaaagaagggaaggagtcagaaaggccctggaagaattttcaggttcaaagagaaggtcggaaattctgggcgaggcaggcgggatcctttttatggacgattacggccaccacccgacagcaataacaacaaccctccggggtttaaaagaattttatccccggcgcaggcttattgttagtttcatgtcgcacacttttacaaggactgcttcgctgtttgatgaatttgcctcctgttttactgacgccgatttgatcttgctgcataaaatttacgcttcggcgcgtgaagcctataatggaggcgttaccggctatacgctttatgaaaaaaccaaagaaaactttggcgatcgggtactttatgccgaagaagtagatgacggttttgagcttatgaaaggaattttaaaaagcggggatctttttattactatgggtgctggagataactggagactcagtaaaaaactttttgaattcttctataaaagtgaattcattaaaaatgaattcaataataatggaaacagcatatga

SEQ ID NO: 29728 - protein, 425 aa, Unknown
  Obtained from environmental sample
  DOMAIN (43)...(227): Mur ligase middle domain
  misc_feature (1)..(425): Xaa is any amino acid
MVIYSAAYSSEENPEIAEAERRGIPAYKYTDALGAYSAGFDSTGITGVHGKTTTTALAGTLLRGAGLPAQVLVGSAVNGFGGRCTLSLGDKYFVAETCEYRRHFLSFHPKTIILTSVESDHQDYYPRYEDIRDAFIEYGRLLPPDGDFIFCADDPGASEVAAFLKKEKPEINLVPYGFGAQNDYRIESYQVINERVVIRLKGFPGELKIRIPGRHTALNTAAAIALCSLLVKKEFGNDSDDGWNEERREGVRKALEEFSGSKRRSEILGEAGGILFMDDYGHHPTAITTTLRGLKEFYPRRRLIVSFMSHTFTRTASLFDEFASCFTDADLILLHKIYASAREAYNGGVTGYTLYEKTKENFGDRVLYAEEVDDGFELMKGILKSGDLFITMGAGDNWRLSKKLFEFFYKSEFIKNEFNNNGNSI

SEQ ID NO: 29729 - DNA, 918 bp, Unknown
  Obtained from environmental sample
  misc_feature (1)..(918): n is a, c, g, or t
atgtactatgaagcggaggatatcgcgggcgaattccgttcctaccgcgacggcttgagttatgatccccgtcggcaggaaacggttgacgagcgccttgccctgctgtacaagctgaaacgaaaatacggggagacggaaaatgcgccgcatcctctggatgcgccgcatccggaggatgcgatccttgcctaccgtaccaccgccgaaacggagatagaaacactgtccggcgccgaggaaaaccgcgaaaagttaaaagccgaaatagccgctttggaaaaggaaatctccgcccgcgccgcggcgctgcggcaaaagcggatagccgccgccgccgatttaggccagaaggtcagcggcatattgaaacgtttgggcatgcccaacgcgcgtttttccccctcggtgacggctaaaaccagagaagacggtacgcaaggctttgtatgcggcccctggggcgccgaagacgtggaattccttatctccgccaattcaggcgaaccgctgaaagacctttcccgcgtcgcttccggcggggaactttcccgtgtaatgctggcgataaagtcggtattatcctcaggcgacagcatagaaactctggtatttgatgaaattgacacgggcataggcggcgaagtagcccttgcggtgggcgaatatctggaaaaaatcggaaaataccggcaaattttttgtgtaacccatcttgccagtatagcggtacgtgccgatnatcactttaaggtggaaaaaaggaccgaggccggcagaacttttaccggcgttggcccgttaagcgccgaaggcaggagaaaagagattgcccggatgcttgcgggcgatgccggagaagcggcacttgcccatgccgatgaattaattctaaaatacggaaaacggggctgttaa

SEQ ID NO: 29730 - protein, 305 aa, Unknown
  Obtained from environmental sample
  misc_feature (1)..(305): Xaa is any amino acid
MYYEAEDIAGEFRSYRDGLSYDPRRQETVDERLALLYKLKRKYGETENAPHPLDAPHPEDAILAYRTTAETEIETLSGAEENREKLKAEIAALEKEISARAAALRQKRIAAAADLGQKVSGILKRLGMPNARFSPSVTAKTREDGTQGFVCGPWGAEDVEFLISANSGEPLKDLSRVASGGELSRVMLAIKSVLSSGDSIETLVFDEIDTGIGGEVALAVGEYLEKIGKYRQIFCVTHLASIAVRADXHFKVEKRTEAGRTFTGVGPLSAEGRRKEIARMLAGDAGEAALAHADELILKYGKRGC

SEQ ID NO: 29731 - DNA, 567 bp, Unknown
  Obtained from environmental sample
  misc_feature (1)..(567): n is a, c, g, or t
ttgcggtccttcatccaaggcatccgccggaacaaggtgtgtgcggtgcactaccaagcttccttccaccacggggcaaaagcgtttgaattcgctcccaagcggcttgtcgcctaccgggaggccatgtacatccacggccggatcgtttccgacaagggcacggcggcgcccgtgtacgaaaaagcgacgcttctcgccctgcacagggtgcgacaggttctcgtgacacgccgaagcgccgcgcatatccccgatgtggaggaagaacaccggggcctgttcggcgtcatggatcacgcgccgtttcccgtgcggatcaaattcgccgccgaggcggccggctatgtcgcggagcgggaatggagcaaggatcagaaagtgaccgtccatgcggacgggggcatcacccttgccatgaccgcccgcagcccggcggaagtcatctcctgggtgctgagcttcgccgacgcggcggaactgcttgcgcccaaacgactcagggaagagattgcccggcatgtcctgaaacttgcggacacatatggaaaagagggaaagcaatga

SEQ ID NO: 29732 - protein, 188 aa, Unknown
  Obtained from environmental sample
  misc_feature (1)..(188): Xaa is any amino acid
MRSFIQGIRRNKVCAVHYQASFHHGAKAFEFAPKRLVAYREAMYIHGRIVSDKGTAAPVYEKATLLALHRVRQVLVTRRSAAHIPDVEEEHRGLFGVMDHAPFPVRIKFAAEAAGYVAEREWSKDQKVTVHADGGITLAMTARSPAEVISWVLSFADAAELLAPKRLREEIARHVLKLADTYGKEGKQ

SEQ ID NO: 29733 - DNA, 1254 bp, Unknown
  Obtained from environmental sample
  misc_feature (1)..(1254): n is a, c, g, or t
atgatcagatggccgagttcgttgtattgttatacatgtactgtaacctcaaaggcggatcaaaaggcaagacgcgttataagaaaggcgctgcgcgattatccaaaaagcaaagttattgttacgggctgttacgcgcagttgaacagcgaagatttattaaagttagacgacggtaaaaaaaagcggctgtttgtaattaaaaaagacagtattatcgatctgcctgattattacaatgagaatgaacaaatagaaagcatattggaaaatttttcagagagaccgcaggcaaaaacgggggagcggttttttcaatttaacccgcaggttttttcagatcatacaagaagttttttaaagattcaggatgggtgtaacaaccactgtacatattgcagaattcgcttagcgcgcggcgcgagtatcagtcttgacgcggacgaggtattgtcgcgtttgcgaatactggaaaaaaatcacgcggaagccgtgcttacgggcgtaaatatcagtcagtaccgcgatgaaaaaaaagcggctaaccttgcgcggcttttggaacatcttttaaaaggaacggataaaatagctctgcgcttatccagtcttgcgcccgataaaattgatgaggagcttataggcgttttatccgataaacggatacgccctcattttcatttatcgattcaatcgtgcagtaaaaaaatacttgaaaaaatgggacgctcctacgacggtaaaattattgaagacgctgtttctcttttgcgccgcgcaaaagatgatccgttccttgcctgcgacattatcacaggctttccgggggagacggaaacggagtttaaggaaacttttgaaatgtgcgaaaaactggactttgcgtggatacatgttttcccctactcaaaaagaccgggaaccgccgcctttgctttcactgaggcagtacaagaaagcgaagtgacaaggcgcgtcgatttatttacagaccttgcacagcggggcagggcggcatacacgcggcgctggcttggcaaagaagttgacgtactggcagaaaagaaccgcggaaagacctgccggggaataaccgaaaactacctaaaaacgctgataaattacgagggaaagcccccctcgcccggagaagttttgaggtgcaaactggagaaagccgatgcggaaaaccaaaaagattatgacgcaatagctgtttttggaggtaagggaattcgaatccctgacttctag

SEQ ID NO: 29734 - protein, 417 aa, Unknown
  Obtained from environmental sample
  DOMAIN (9)...(59): Uncharacterized protein family UPF0004
  misc_feature (1)..(417): Xaa is any amino acid
MIRWPSSLYCYTCTVTSKADQKARRVIRKALRDYPKSKVIVTGCYAQLNSEDLLKLDDGKKKRLFVIKKDSIIDLPDYYNENEQIESILENFSERPQAKTGERFFQFNPQVFSDHTRSFLKIQDGCNNHCTYCRIRLARGASISLDADEVLSRLRILEKNHAEAVLTGVNISQYRDEKKAANLARLLEHLLKGTDKIALRLSSLAPDKIDEELIGVLSDKRIRPHFHLSIQSCSKKILEKMGRSYDGKIIEDAVSLLRRAKDDPFLACDIITGFPGETETEFKETFEMCEKLDFAWIHVFPYSKRPGTAAFAFTEAVQESEVTRRVDLFTDLAQRGRAAYTRRWLGKEVDVLAEKNRGKTCRGITENYLKTLINYEGKPPSPGEVLRCKLEKADAENQKDYDAIAVFGGKGIRIPDF

SEQ ID NO: 29735 - DNA, 867 bp, Unknown
  Obtained from environmental sample
  misc_feature (1)..(867): n is a, c, g, or t
atgaaattcagcgaaaagttaaagaatttttttagcgggaaacccgcaattaatgaagagttatttgacgagctttgcgatttgttaatagaaggcgattttggcgcgaatcaggcgtataaaacggttgaattattaaaagagcaatgtaaaaaagacggcggcgccgcattacccgataaattggctcaattgcttgaagacgaattaaaaaaagcgccggctgttaatcattctgatgattcggaaaaactaaccgctattttgcttcttggagtaaatggagtaggcaaaacaactaccgccgcaaaactttcccacctttacaatacaaagttaaataaaaaaaccatactcgccgcggcggacacgttcagagccgcggcaatagatcaattaaaaattcacggggaaaaacttaatacgcgggtagtggctcataaacagggcggagaccccgcggctgtggtttatgacgcgttggaagccgctcagtcggggggagcggacgtagttattgcggacaccgcaggaagaatgcatacaaaatccgcgttagttgaagaattgcgcaaaattgacagggtagtggagtcaagagccggcggagcgaattatattaaataccttgtactggacgctactacagggagaaacgcttttgcgcaggcggaaacatttcacggcgcggttgttctggacggggtaatattgacaaaatacgattctacggcaaagggcggagtggttttttcattggcggatgaattaaaactgcctgtagcgtatatatgcacaggcgaaaaatacggggatatcgaatttattgatcctcataaatttgcgagggaatttgcgggtatttaa

SEQ ID NO: 29736 - protein, 288 aa, Unknown
  Obtained from environmental sample
  DOMAIN (84)...(287): SRP54-type protein, GTPase domain
  misc_feature (1)..(288): Xaa is any amino acid
MKFSEKLKNFFSGKPAINEELFDELCDLLIEGDFGANQAYKTVELLKEQCKKDGGAALPDKLAQLLEDELKKAPAVNHSDDSEKLTAILLLGVNGVGKTTTAAKLSHLYNTKLNKKTILAAADTFRAAAIDQLKIHGEKLNTRVVAHKQGGDPAAVVYDALEAAQSGGADVVIADTAGRMHTKSALVEELRKIDRVVESRAGGANYIKYLVLDATTGRNAFAQAETFHGAVVLDGVILTKYDSTAKGGVVFSLADELKLPVAYICTGEKYGDIEFIDPHKFAREFAGI

SEQ ID NO: 29737 - DNA, 432 bp, Unknown
  Obtained from environmental sample
  misc_feature (1)..(432): n is a, c, g, or t
atgctcacaaaactagccatattagacaaaacaagcatccctgtggcgagcaagggactggatgcttacgcccatagaggcagggctattgctaacaacatagccaatgtaagcactccagggtaccgccgcatagaggtttcttttgaagaccaattgcgcagagctttggacaaacaactcaatttggctggggagcgtaccaatggcaatcatttatttttaggtcgtccagagcttgaacacgtgaaaagcgaaggatatcgcgtggatgaccctacaaatccgggtgagataaacaatgtggatatagatatggaaatgggaaaacttgcagaaaacgaaattgcttttaattttgcaaccgcattcataagagaccgcagcggggcaataggggaggcaattagaggaagcaggggaggtgaatag

SEQ ID NO: 29738 - protein, 143 aa, Unknown
  Obtained from environmental sample
  DOMAIN (13)...(43): Flagella basal body rod protein
  misc_feature (1)..(143): Xaa is any amino acid
MLTKLAILDKTSIPVASKGLDAYAHRGRAIANNIANVSTPGYRRIEVSFEDQLRRALDKQLNLAGERTNGNHLFLGRPELEHVKSEGYRVDDPTNPGEINNVDIDMEMGKLAENEIAFNFATAFIRDRSGAIGEAIRGSRGGE

SEQ ID NO: 29739 - DNA, 1368 bp, Unknown
  Obtained from environmental sample
  misc_feature (1)..(1368): n is a, c, g, or t
ttgtcggttggttatttaacggacggcgacggcgtaacgttgcgttttacggtagaggataccggacagggtattaagccgcaggacaaggagcggctcttttcggaatacatgcgtttcaacgccgaaaccaaccgcgccaccgagggtacggggcttggtctgaatatcacaaaaaagttagtggagatgatggacggcacgatcggagcggagagcgagtacggtaaaggcagcgtgtttaccgtgaccgtccggcaaaaagcggtggagtgtccggccataggcgcaagcgttgcggagcaactgcgtaaattcactttcaccggcgataggcgcatggctaatctgcggataaaccgcgagcttatgccctacgggcgcgtactggtggtggacgacgtggccactaatatatatgtggcggcagggttgctggcgctgtatcaattaaacatagatacggcggacagtgggttcgaggccattgaaaaagttaaaagcggcggcgtttacgacgttatcttcatggatcacatgatgccgcggatggacggtattgaggcaatgctgaaactgcgcgaactcggatacgcgggtacgatagtggcgctgaccgccaacgctatggtcggcaacgacgatatgttcaagcaaaagggattcgacgggttcatcgccaagcctatcgaaattcgtcagttgaatgaggttttaaacaaatttgtccgcgacaagcgcttggcggaggcaaaaagacgcgccgcggaagcggttgttaaaccctctaaatctgtcaactgcgctatgaatcccaggctgctcaaatttttctgccaagacgtggagaaggcgatcgccacgctgcggaaaacaacggaaaacggcgatacgaagcttttcacgatcaccgcccacgccatgaaatcggcgttggcgaatgtcggcgagaccgaggcgtcccgtaccgccgccgcgttggaaagcgccggacgaagcgaggacatggggcgtatttcagagaatatcgacgcgtttatccaaacgcttgaatcgttaatagataaatacggcaatgcggggaatgacgacgccggcggtatggataaatcgggtaaccctatcgcgtcggaagataccggctatctcgtggaacagctgcgtataataaaatccgcctgcgaaaaatacgacgacgacgcggtttacgccgcccttgaccgattgaaagagatgctatggaagccgtctacggcggagtcattggagaagatacgcgaggcattgtacgtatccagcgatttcgagagagcggcggggctgagcatgtcgcttatcggcgcgtccggcggggaaataatcccatga

SEQ ID NO: 29740 - protein, 455 aa, Unknown
  Obtained from environmental sample
  DOMAIN (273)...(356): Hpt domain
  misc_feature (1)..(455): Xaa is any amino acid
MSVGYLTDGDGVTLRFTVEDTGQGIKPQDKERLFSEYMRFNAETNRATEGTGLGLNITKKLVEMMDGTIGAESEYGKGSVFTVTVRQKAVECPAIGASVAEQLRKFTFTGDRRMANLRINRELMPYGRVLVVDDVATNIYVAAGLLALYQLNIDTADSGFEAIEKVKSGGVYDVIFMDHMMPRMDGIEAMLKLRELGYAGTIVALTANAMVGNDDMFKQKGFDGFIAKPIEIRQLNEVLNKFVRDKRLAEAKRRAAEAVVKPSKSVNCAMNPRLLKFFCQDVEKAIATLRKTTENGDTKLFTITAHAMKSALANVGETEASRTAAALESAGRSEDMGRISENIDAFIQTLESLIDKYGNAGNDDAGGMDKSGNPIASEDTGYLVEQLRIIKSACEKYDDDAVYAALDRLKEMLWKPSTAESLEKIREALYVSSDFERAAGLSMSLIGASGGEIIP

SEQ ID NO: 29741 - DNA, 1053 bp, Unknown
  Obtained from environmental sample
  misc_feature (1)..(1053): n is a, c, g, or t
ttggcgtatcccgcaggcaaatccggcgcgtacgacattccgaatagcgtgacgactatcggacggggagcgttttccgacagccgcggcctgacgtcggtcactattcccaacagcgttacgtctatagaatactacgcgttttacgaaagcaccggccttacgtccgtcaccatcggcaacggcgtgacatccatcggacacgccgtattttcaggatgcggaaacctgacgtcggtcattattcccaacagcgtaacgtccttaggaaattacgcgttttcatggaccggactgacatcgatcactattcccaacagcgtaacgtttatcgacaagtgggcgtttaattattgtgaaaacctggcgtccgtcgtcataggcaacggcttaacgtctatcgaagggaatacgttcgcccattgtccaaacttaacgtctatcgccatcggcaaaaacgtaacgtctatcgcggacagcgcgttcggggattgcggcagactggcgtcgattaccattttaaatccggcgccgccggcaatcggtgttcaagccggtattcccccgttcccgtcaatcatcctaaacgtccccggatccgccgtagaagcctacagcgcccacgaaatctggggtctgttcgatatcagaagctcttcgacatcggcagactcccacgcccgcgagatcccgcagcccatcacggagaaagagacggcggcgatagccccggcagccgctttgacaagcggggtcacggtcgggcctaatccggcggacaagcaatccggcgcggtcactttcttccgcaacggcagccgcgtaaagtccgcgtcgctgtttgtctatgacgcttccggtcgtgcggtgaagaagattgccgttagcgacaacgccgccgtcggcaacaacggcaagcgcgcgataggttcgtgggatttgcgcgacgcgaaaggccgcccggtgtccgagggcgcttatttggtcaagggcataattaatacctcagacggcaagagcgagaaggtgtcggcggtattgggcgtaaggtag

SEQ ID NO: 29742 - protein, 350 aa, Unknown
  Obtained from environmental sample
  misc_feature (1)..(350): Xaa is any amino acid
MAYPAGKSGAYDIPNSVTTIGRGAFSDSRGLTSVTIPNSVTSIEYYAFYESTGLTSVTIGNGVTSIGHAVFSGCGNLTSVIIPNSVTSLGNYAFSWTGLTSITIPNSVTFIDKWAFNYCENLASVVIGNGLTSIEGNTFAHCPNLTSIAIGKNVTSIADSAFGDCGRLASITILNPAPPAIGVQAGIPPFPSIILNVPGSAVEAYSAHEIWGLFDIRSSSTSADSHAREIPQPITEKETAAIAPAAALTSGVTVGPNPADKQSGAVTFFRNGSRVKSASLFVYDASGRAVKKIAVSDNAAVGNNGKRAIGSWDLRDAKGRPVSEGAYLVKGIINTSDGKSEKVSAVLGVR

SEQ ID NO: 29743 - DNA, 306 bp, Unknown
  Obtained from environmental sample
  misc_feature (1)..(306): n is a, c, g, or t
ttgaagaactcttatgtaaaggcaaaccaactgcgttatgattacagcgcccaaaaagaagaagaagaacagttaaagcgccttggcatccacatggacaccgaagacgccgcggcagcgccgccgcccgccggatctccccccgctgcagccgcagggaaacctcccgccgccgcgggaaaaccgcccgccggaaaaccgcctgccgccgccggaaagcctcctgctgccgggaaaccgcccgccgccgcagggaaacctcctgccgccgcgggaaaaccgcccgcaaaggggaaagcctcctga

SEQ ID NO: 29744 - protein, 101 aa, Unknown
  Obtained from environmental sample
  misc_feature (1)..(101): Xaa is any amino acid
MKNSYVKANQLRYDYSAQKEEEEQLKRLGIHMDTEDAAAAPPPAGSPPAAAAGKPPAAAGKPPAGKPPAAAGKPPAAGKPPAAAGKPPAAAGKPPAKGKAS

SEQ ID NO: 29745 - DNA, 843 bp, Unknown
  Obtained from environmental sample
  misc_feature (1)..(843): n is a, c, g, or t
atgaccaaagcggtcgcggaaatatcaatcaactcaaaaaccggcgttgatcctataaccctcagtataataggcgaaagcctttcaaggctgtccaaaacaacagcgacttcaatgaccatattgaagaatttgagtatctactacagggaatgttataaacttgatatacgccaaaaaataacacagggcatgtccgccggtgaagcgactcttgaaaacataaagaaaaaaatgtcttccgcaatgccgggatctccgttctataaagaactggttgatgaagttatcaaagaagattattccaaagacggccaggacatgaaggacatggtccttaacacacttaaagtgcccggaaccaaacaaaaggcggtaaaagccgccgtaaatttcaaaaacatcctgctggacggcattcaggtaataggcggagcctcggcctcgctcacagaaatcatgacaaagcttgatgataatcaagctataatggaaagccctaaaaaaggctttatgcatatgatcaaggagcttatcaggcagattacaaacgccgaacctgaagaagttatttacaccgtggaatacatggatcaaaccaaggatgtgccggtaaaagaaaagataagttatcatcagtttagggatgaattggaaaagaagataagatttttgtccagtttaatgagaggaccggcttatcaaaaactgtcgcaaatgacagaagaacaaataatcggctatctggaaagaaatatagccgagatgcaaaattatcacagaaccttaggcgcgcttgatgattttttcaaggcaaaagtcgccccgggaaaaccgggataa

SEQ ID NO: 29746 - protein, 280 aa, Unknown
  Obtained from environmental sample
  misc_feature (1)..(280): Xaa is any amino acid
MTKAVAEISINSKTGVDPITLSIIGESLSRLSKTTATSMTILKNLSIYYRECYKLDIRQKITQGMSAGEATLENIKKKMSSAMPGSPFYKELVDEVIKEDYSKDGQDMKDMVLNTLKVPGTKQKAVKAAVNFKNILLDGIQVIGGASASLTEIMTKLDDNQAIMESPKKGFMHMIKELIRQITNAEPEEVIYTVEYMDQTKDVPVKEKISYHQFRDELEKKIRFLSSLMRGPAYQKLSQMTEEQIIGYLERNIAEMQNYHRTLGALDDFFKAKVAPGKPG

SEQ ID NO: 29747 - DNA, 843 bp, Unknown
  Obtained from environmental sample
  misc_feature (1)..(843): n is a, c, g, or t
ttgggcttatgttcgcggcgatttttggcacggtctttaccgctgttattcagttgcttcgcgtttttttataaggaacgtgaaatgaagataaaactgtttttattgttgctgataatattttgtatttccgctcccctctttgggcttgaccgcgttgtggatactgccgatctcttaagcgacggcgaaaaagccagtctaaaaaggctgttagatacagtttcccagaattacgattttgatatggtaattgtttcggtaaaacaaacaggcagtaccgaaccgaaagactttgctgatgggttttttgataagaacggttacggccttggtaagaatagggatggctgtctccttctgatagtcacagataggaaggttttctggttcgctacatcaggcagaggcaaaaagattcttactcctatggcttccagaaaactggaaaaagacgtttttagtttccttgaaaagggagacttttacgaagctttcgttgcttatgccaagacttgggaagagtttatcgttcttgatgccaaaggcagaacttataacgtcctccataagtataacgcggtttttgtgattattgcctgggtagtttctcttggaatcggctttttagttgtttttatatggaaaaaaagaatgaataccgcaattccaaaaaaacaggacgcgccttacattactcctgggagcttgtcctttgcggtgcagcaggacaaatttctctacagcacggttaccaaaatcgaaaggaccttggattcagacgatgacgacgatgatgaaaccacggcggcgggaaattctgaagatgaggaagaggactga

SEQ ID NO: 29748 - protein, 280 aa, Unknown
  Obtained from environmental sample
  DOMAIN (58)...(180): Domain of unknown function (DUF477)
  misc_feature (1)..(280): Xaa is any amino acid
MGLCSRRFLARSLPLLFSCFAFFYKEREMKIKLFLLLLIIFCISAPLFGLDRVVDTADLLSDGEKASLKRLLDTVSQNYDFDMVIVSVKQTGSTEPKDFADGFFDKNGYGLGKNRDGCLLLIVTDRKVFWFATSGRGKKILTPMASRKLEKDVFSFLEKGDFYEAFVAYAKTWEEFIVLDAKGRTYNVLHKYNAVFVIIAWVVSLGIGFLVVFIWKKRMNTAIPKKQDAPYITPGSLSFAVQQDKFLYSTVTKIERTLDSDDDDDDETTAAGNSEDEEED

SEQ ID NO: 29749 - DNA, 759 bp, Unknown
  Obtained from environmental sample
  misc_feature (1)..(759): n is a, c, g, or t
atgttgaagcccgatggctgtattccctctaagctggaaaagcaagcggccgtagaggccctcaaacagttctgcgatgggaagcggcttttgccggattttttcaaaaaagaaaatcacatcgaaaacattcagggtatgtatgtcccgttatggctctttgacgtcaaagcgcaagcccacgttaggtacaaggctgcaaaggttaacgcctatagcgatgaaaattatgactataccaaaaccgactattattctgttgtaagagacggcagcctgaattttgaaaagatgcctgttgacggctcggataagctgaataatgcctacatggatgccgttgagccatttgattacgcccagttgaataattttcaaagcgaatgtctcgcagggtattccgcagagaagcatgacgtagatgtcgaggcaggcaaagaaaaggctaacgaaaggatcaggaattcgatagaaaaggaattttctggctctgttacaggttattacaaggttgagctggaaagttctgctgtaaatatcgagggcggcaaggttagtaatgcgctgttaccagtgtggattttaaacacaaagtacaacgatgagaattatcaacttataatgaacggccagacaggcaagttcgtgggcaaactgccggttgacaagggaaaagccatgaaatttgggcttatgttcgcggcgatttttggcacggtctttaccgctgttattcagttgcttcgcgtttttttataa

SEQ ID NO: 29750 - protein, 252 aa, Unknown
  Obtained from environmental sample
  misc_feature (1)..(252): Xaa is any amino acid
MLKPDGCIPSKLEKQAAVEALKQFCDGKRLLPDFFKKENHIENIQGMYVPLWLFDVKAQAHVRYKAAKVNAYSDENYDYTKTDYYSVVRDGSLNFEKMPVDGSDKLNNAYMDAVEPFDYAQLNNFQSECLAGYSAEKHDVDVEAGKEKANERIRNSIEKEFSGSVTGYYKVELESSAVNIEGGKVSNALLPVWILNTKYNDENYQLIMNGQTGKFVGKLPVDKGKAMKFGLMFAAIFGTVFTAVIQLLRVFL

SEQ ID NO: 29751 - DNA, 465 bp, Unknown
  Obtained from environmental sample
  misc_feature (1)..(465): n is a, c, g, or t
ttgcgcgacccgcagacggaaacaaggttttcaaacaccatgaccagcgaaaccaattctcagccgatttccagccagaatgaacattccagcgctaggcgctggctgacggtgttgttgcgctctatgcacatcgtaacgactgccatcgtcttggggggcgtatttcttggcgccaagcatggcgaaatatacatcgccatttgggcggccatcctgagcggcttcctgatgctactagcggacgtttataaaagcccacgcgtcttggtgcagggcagcggccttttttccctgctgaagctggccttcttgggtaccgggttctttatgctgccaggccaccgcttttattggtacatgggtgccactgtcattgcttcggtgggcagccacatgccgggggccgtgcgccactttgatcttttggagtggctgaaaaaaaggtatggccagcgcacttga

SEQ ID NO: 29752 - protein, 154 aa, Unknown
  Obtained from environmental sample
  misc_feature (1)..(154): Xaa is any amino acid
MRDPQTETRFSNTMTSETNSQPISSQNEHSSARRWLTVLLRSMHIVTTAIVLGGVFLGAKHGEIYIAIWAAILSGFLMLLADVYKSPRVLVQGSGLFSLLKLAFLGTGFFMLPGHRFYWYMGATVIASVGSHMPGAVRHFDLLEWLKKRYGQRT

SEQ ID NO: 29753 - DNA, 795 bp, Unknown
  Obtained from environmental sample
  misc_feature (1)..(795): n is a, c, g, or t
atggaaattgcagtccaagtcaaatcagatggctcaacaagcgccaaagaatcaaaaatttttgagcctccaaagggcttcgagagcaagttcggcggcatggcgctggacctgcccatctttgaaggccccttggatttgctgctgttcctaatacgcgaccaaaaactggacatcatggacttgcctatagcgcatgtcaccaagcaatacatggactatcttttcctgatggaagaatttaacttggaagtagccgccgagttcatttccatggcggcgcaattggtgcagataaagagccgcatgctgctcccgctcccgccaaaggacggcgaagcggaagaccctagggaagaattggcgctcaggctgcaacagtacgaggccataaaggaagccgcgaaagaactctccattagggaagggctgatgcagggcgcaatttttaccaacgggctggacatggacgaacacgccagaaccgaggacgaacccataagggccacagcgatggatcttttgggcgcctacagggacatactcaagcgcctcctgcccccgcccccggttgaagttgtggccccgccaaaaacattggaacagcgcatcgccgaagtgctagaaatgctgggagccggcaattggctgccctttgcaaggctgttcgcagaatccagaaaccgcgaagaccttgtcctaacttttttggcgctgctggagatagtgaaaaatggcagggccaagctggtgcagacagaagtttttggcgaaattcgcgtccaagccgcatga

SEQ ID NO: 29754 - protein, 264 aa, Unknown
  Obtained from environmental sample
  DOMAIN (51)...(264): ScpA/B protein
  misc_feature (1)..(264): Xaa is any amino acid
MEIAVQVKSDGSTSAKESKIFEPPKGFESKFGGMALDLPIFEGPLDLLLFLIRDQKLDIMDLPIAHVTKQYMDYLFLMEEFNLEVAAEFISMAAQLVQIKSRMLLPLPPKDGEAEDPREELALRLQQYEAIKEAAKELSIREGLMQGAIFTNGLDMDEHARTEDEPIRATAMDLLGAYRDILKRLLPPPPVEVVAPPKTLEQRIAEVLEMLGAGNWLPFARLFAESRNREDLVLTFLALLEIVKNGRAKLVQTEVFGEIRVQAA

SEQ ID NO: 29755 - DNA, 1617 bp, Unknown
  Obtained from environmental sample
  misc_feature (1)..(1617): n is a, c, g, or t
atggcgagggggcacccggcatccatcatcgcctccgccagacaggggcagggtggtggctttaggcagaatttcggcgctccgcagcacaatgcgccgcgtccgggagggcagcagggcggcaggccgggctttgtgccccgccagggcggacaaggccgtggtggacaagccggttctccgcccccaagcatattgccggaagggaagagtggagcgaagcgtacttttagggcaaagaaacccacttacaaccgcaaagaaaaagaacttgagatggaggagaaactccgccagaccaggaaaaaaataacttatgtcgctaacccggttcccaagtcaatcgaaatcatggaaaatatttcggtatcggaattggcaagaaagatgaacctcaaggcgtcggatttaatccagaagctgatgaagcttggcatgatggttacaattaaccagcagatagacgccgataccgcgacgatactggccgccgaattcggggccgacgtaaaaatcatcagcctgtatgatgagacaatcatagacaccggcacggatgaaggcgcagacatgctgcccaggccgccggttgtaaccgttatgggacatgttgaccacggcaaaaccaaactgctggacgctatccggaaagcggacgtagtgtccggcgagtttggcggaataacccaacacatcggcgcgtacatggtagaaaccccgcatggcagaatcaccttccttgacactcccggccacgaggcgttcacgcgcatgagggcgcggggcgcgcaggtaacggacattgttattcttgttgtagccgcggatgacggggtaatgccccagaccattgaggcgatcaaccacgcgaaggaagccggggttccaattatngtcgctgtcaacaaaatcgacaagccggaggcaaaccctgaccgcgtaaagagccagctttccgaacttggcctaatgccggaggaatggggcggccagacgatgtttgtcgagctttcggccctgcaaaaaatcggaatagacaaacttattgataccatactccttgaagcggagcttcttgatctcaaagccaatttccaccggagcgccgaggggaagatacttgaatcgaggatcgatcacgggcgcggcattgtggctaccgtcattgtggaaagagggactatctccgtgggcgattcttttgtggcgggtatatggccgggaaaagtgcgcgcgattttcaatgaccggggcgataaactcaaacacgcgtctccctccatgcccgttgaaatcctcggctttgagggaatccccaacgccggcgatcccttacaggctgttgatgacgagaaaattgcccgcgagtattcgtccaaacgccaggaactgaaacgttttgaggacgccaagaacttcaagcaggtaacggccgagactctgcgcgacaggataagtgacggcaccatacaggaacttaaggtaatcatcaaggctgacgttcagggttcggcggaggctctcaagagcagcctggaaaaactttccaccaaggaaatccggctgcatgtcatacaggccctgcccggcccgattctcggccgatcttgtcaatga

SEQ ID NO: 29756 - protein, 538 aa, Unknown
  Obtained from environmental sample
  DOMAIN (196)...(305): GTPase of unknown function
  misc_feature (1)..(538): Xaa is any amino acid
MARGHPASIIASARQGQGGGFRQNFGAPQHNAPRPGGQQGGRPGFVPRQGGQGRGGQAGSPPPSILPEGKSGAKRTFRAKKPTYNRKEKELEMEEKLRQTRKKITYVANPVPKSIEIMENISVSELARKMNLKASDLIQKLMKLGMMVTINQQIDADTATILAAEFGADVKIISLYDETIIDTGTDEGADMLPRPPVVTVMGHVDHGKTKLLDAIRKADVVSGEFGGITQHIGAYMVETPHGRITFLDTPGHEAFTRMRARGAQVTDIVILVVAADDGVMPQTIEAINHAKEAGVPIXVAVNKIDKPEANPDRVKSQLSELGLMPEEWGGQTMFVELSALQKIGIDKLIDTILLEAELLDLKANFHRSAEGKILESRIDHGRGIVATVIVERGTISVGDSFVAGIWPGKVRAIFNDRGDKLKHASPSMPVEILGFEGIPNAGDPLQAVDDEKIAREYSSKRQELKRFEDAKNFKQVTAETLRDRISDGTIQELKVIIKADVQGSAEALKSSLEKLSTKEIRLHVIQALPGPILGRSCQ

SEQ ID NO: 29757 - DNA, 777 bp, Unknown
  Obtained from environmental sample
  misc_feature (1)..(777): n is a, c, g, or t
ttggctttgagatcaagaagctccgcttcaaggagtatggtatcaataagtttgtctattccgattttttgcagggccgaaagctcgacaaacatcgtctggccgccccattcctccggcattaggccaagttcggaaagctggctctttacgcggtcagggtttgcctccggcttgtcgattttgttgacagcgacnataattggaaccccggcttccttcgcgtggttgatcgcctcaatggtctggggcattaccccgtcatccgcggctacaacaagaataacaatgtccgttacctgcgcgccccgcgccctcatgcgcgtgaacgcctcgtggccgggagtgtcaaggaaggtgattctgccatgcggggtttctaccatgtacgcgccgatgtgttgggttattccgccaaactcgccggacactacgtccgctttccggatagcgtccagcagtttggttttgccgtggtcaacatgtcccataacggttacaaccggcggcctgggcagcatgtctgcgccttcatccgtgccggtgtctatgattgtctcatcatacaggctgatgatttttacgtcggccccgaattcggcggccagtatcgtcgcggtatcggcgtctatctgctggttaattgtaaccatcatgccaagcttcatcagcttctggattaaatccgacgccttgaggttcatctttcttgccaattccgataccgaaatattttccatgatttcgattgacttgggaaccgggttagcgacataa

SEQ ID NO: 29758 - protein, 258 aa, Unknown
  Obtained from environmental sample
  SIGNAL (1)...(26)
  misc_feature (1)..(258): Xaa is any amino acid
MALRSRSSASRSMVSISLSIPIFCRAESSTNIVWPPHSSGIRPSSESWLFTRSGFASGLSILLTATIIGTPASFAWLIASMVWGITPSSAATTRITMSVTCAPRALMRVNASWPGVSRKVILPCGVSTMYAPMCWVIPPNSPDTTSAFRIASSSLVLPWSTCPITVTTGGLGSMSAPSSVPVSMIVSSYRLMIFTSAPNSAASIVAVSASICWLIVTIMPSFISFWIKSDALRFIFLANSDTEIFSMISIDLGTGLAT

SEQ ID NO: 29759 - DNA, 459 bp, Unknown
  Obtained from environmental sample
  misc_feature (1)..(459): n is a, c, g, or t
gtggttgatcgcctcaatggtctggggcattaccccgtcatccgcggctacaacaagaataacaatgtccgttacctgcgcgccccgcgccctcatgcgcgtgaacgcctcgtggccgggagtgtcaaggaaggtgattctgccatgcggggtttctaccatgtacgcgccgatgtgttgggttattccgccaaactcgccggacactacgtccgctttccggatagcgtccagcagtttggttttgccgtggtcaacatgtcccataacggttacaaccggcggcctgggcagcatgtctgcgccttcatccgtgccggtgtctatgattgtctcatcatacaggctgatgatttttacgtcggccccgaattcggcggccagtatcgtcgcggtatcggcgtctatctgctggttaattgtaaccatcatgccaagcttcatcagcttctggattaa

SEQ ID NO: 29760 - protein, 152 aa, Unknown
  Obtained from environmental sample
  misc_feature (1)..(152): Xaa is any amino acid
MVDRLNGLGHYPVIRGYNKNNNVRYLRAPRPHARERLVAGSVKEGDSAMRGFYHVRADVLGYSAKLAGHYVRFPDSVQQFGFAVVNMSHNGYNRRPGQHVCAFIRAGVYDCLIIQADDFYVGPEFGGQYRRGIGVYLLVNCNHHAKLHQLLD

SEQ ID NO: 29761 - DNA, 651 bp, Unknown
  Obtained from environmental sample
  misc_feature (1)..(651): n is a, c, g, or t
atgagggaaccgattaaatgggcgtgtaacgaaatgcccaaaacggactgctccaaaagcctctcgctaatgacgcctaacgagacggagaaggccgtcggttttcaccggagtttcccgcagtatatgatgacgcccctggtgaagttatcccaccttgcggagcttttcggaataaagggaatctatataaaagacgaatccttccgtttcgatttaaacgccttcaaggtgctgggcggctcttacgccatcgccaggtatatcgccaaacgccttggcaaagacatcgcggaaattgattacgataccctggtttcatgcgaaactaaacaaaagttaggcgacattacattttacaccgccacggacggcaaccacggcaggggcgtggcctgggcggcgaacaggctgcgccagaaggccgtggtgttcatgcccagaggttcctcgcatatccggctgcaggccattcttaacgagggggcccaggcgactatcaccgatctcaactatgatgacgccgtgcggctggccagcaaaaaggcgtcggaagaccccaacggcgttgtggtgcaggacacagcctgggccgggctacgaggaaatcccaagctggatcatgcagggctacggttccatggcggttga

SEQ ID NO: 29762 - protein, 216 aa, Unknown
  Obtained from environmental sample
  misc_feature (1)..(216): Xaa is any amino acid
MREPIKWACNEMPKTDCSKSLSLMTPNETEKAVGFHRSFPQYMMTPLVKLSHLAELFGIKGIYIKDESFRFDLNAFKVLGGSYAIARYIAKRLGKDIAEIDYDTLVSCETKQKLGDITFYTATDGNHGRGVAWAANRLRQKAVVFMPRGSSHIRLQAILNEGAQATITDLNYDDAVRLASKKASEDPNGVVVQDTAWAGLRGNPKLDHAGLRFHGG

SEQ ID NO: 29763 - DNA, 771 bp, Unknown
  Obtained from environmental sample
  misc_feature (1)..(771): n is a, c, g, or t
atgtcatttgttgcggttggtttagcagcttccattttttctttttatcttgacgacagaatagtaatacccacgttaaaagaaaaaaacgaacttacaagacgagcgttaaaacaatatgttacggaaagcaactctgatattgttattaaatcaaggaacggcaggataatttattcggttgattattttgacagtgaaaaaaatatattgaacggcgtaaatgttgtggaaatgaatgaaaagggcttgtttatttcgcagattcgcgctttttccgccgattgggtcgacggacactgggaatttaaaaacgccgttatttaccgctatgacgaggaaggcgtattgcgagtatatccgtttgtttctaccgatacatacaatgaacatcccgatatattcagaagaaaggcggttaatgtggaagaattaaatgcaaaaaacgccggtcttttaataaaagatcttcgcatcgcgggacttccgtaccgccacactcaggcaaattattatcaccgttattcgtttgccgcaacctcgcttattgtaatgatactttcaatttctatgggcggcagattcagaaaaaatattttattaatgagtctttttacaagcttgtctgtcgccgtagtttactacattgcggaaatgttaagcatgacaatggctggacttaattatatacatccgtttgtcggcgcatggtttcctgttttaattttccttgtattaggcgtacatcttttacggagttcaaaaacctga

SEQ ID NO: 29764 - protein, 256 aa, Unknown
  Obtained from environmental sample
  misc_feature (1)..(256): Xaa is any amino acid
MSFVAVGLAASIFSFYLDDRIVIPTLKEKNELTRRALKQYVTESNSDIVIKSRNGRIIYSVDYFDSEKNILNGVNVVEMNEKGLFISQIRAFSADWVDGHWEFKNAVIYRYDEEGVLRVYPFVSTDTYNEHPDIFRRKAVNVEELNAKNAGLLIKDLRIAGLPYRHTQANYYHRYSFAATSLIVMILSISMGGRFRKNILLMSLFTSLSVAVVYYIAEMLSMTMAGLNYIHPFVGAWFPVLIFLVLGVHLLRSSKT

SEQ ID NO: 29765 - DNA, 1104 bp, Unknown
  Obtained from environmental sample
  misc_feature (1)..(1104): n is a, c, g, or t
gtggacgccataacctcccgcagcgagttctacaccgcctacacgccctatcagccggagttgtcgcagggcacgctgcaggccatatacgagtaccagtcgcatatatgccgcttgacggggatggagatctccaacgcttccctctacgacggcgggacggcgatttttgaggctgctaagatggcgctggccgccacggataggcgcgcgattgtcgttgacgggggagtcaaccccatatatcgaaagatgctgaaggcgcataccgtaagcttaggggttgatatagtagaggtgccggccctgcgcgacgggacgcttgacagagcgtcggtaaacggccgcatagacaataacgtcgcggccgtcgttttgcagaatccgaacttcttcgggattatagacgaccacgccgacgtggttgacaaatgcaaaagcgccggcgccctggccatccagtccgtaaacccgttggctttggcgttgataaagccgcccggggagcagggcttcgacatcgcggtgggggaggggcaatctatgggcataccgctctccttcggcgggccgtaccttggcttcataggcgctaagaaggcgctggcgaggaagatgcctgggaggatagtggcgcggaccacggacacgagcgggcgcgagggctttgtgctgtcgcttcaagcgcgggaacagcatatcaggcgcgaaaaggcgacctccaatatctgctcaaacgaggcgctgtgcgcgcttagggcgcacgtctacctatcgctgatagggaaaaacgggcttgttgaggtcgcgtcgctgtgtcacaacaaagcggtctacttgcgtgagcgtatcaaagagtccataccgtccgtaaagacatacggcggcgcgccgatatttaacgagtttgtgattgaattgccgataagcgcggataagtgcgtggaagcgatgctggccaagggttttgccgccggtattccgatcagtcaatactacggctacgacggcgctgacaaagcgttgcttgtggctgtaacggagaagaggacgcggcgcgaaatggacgcgtttgttgataatctgcgggaagttgtaggttag

SEQ ID NO: 29766 - protein, 367 aa, Unknown
  Obtained from environmental sample
  DOMAIN (1)...(362): Glycine cleavage system P-protein
  misc_feature (1)..(367): Xaa is any amino acid
MDAITSRSEFYTAYTPYQPELSQGTLQAIYEYQSHICRLTGMEISNASLYDGGTAIFEAAKMALAATDRRAIVVDGGVNPIYRKMLKAHTVSLGVDIVEVPALRDGTLDRASVNGRIDNNVAAVVLQNPNFFGIIDDHADVVDKCKSAGALAIQSVNPLALALIKPPGEQGFDIAVGEGQSMGIPLSFGGPYLGFIGAKKALARKMPGRIVARTTDTSGREGFVLSLQAREQHIRREKATSNICSNEALCALRAHVYLSLIGKNGLVEVASLCHNKAVYLRERIKESIPSVKTYGGAPIFNEFVIELPISADKCVEAMLAKGFAAGIPISQYYGYDGADKALLVAVTEKRTRREMDAFVDNLREVVG

SEQ ID NO: 29767 - DNA, 333 bp, Unknown
  Obtained from environmental sample
  misc_feature (1)..(333): n is a, c, g, or t
ttgggacgcaaacgttacctgccggagatcaactctgcaatccgaacgatacgggaggccgccgaacgtaccgctatcaacacgccggttcaggggactgccgcggatattataaaggtcgcaatgataaacttgcacaagagaatgcccgacaagtggccgcaatccaaaatgctgctgcaagtccacgacgaactggtatttgaaacgcccgcggagagcgccgaggagttcgcgcagtgggcgaaaggggaaatgagcaaagcgtgcgaactcaaggtgccgttgaaggtagacgccggcatcggtaagcattggggagaagcgcactaa

SEQ ID NO: 29768 - protein, 110 aa, Unknown
  Obtained from environmental sample
  misc_feature (1)..(110): Xaa is any amino acid
MGRKRYLPEINSAIRTIREAAERTAINTPVQGTAADIIKVAMINLHKRMPDKWPQSKMLLQVHDELVFETPAESAEEFAQWAKGEMSKACELKVPLKVDAGIGKHWGEAH

SEQ ID NO: 29769 - DNA, 1335 bp, Unknown
  Obtained from environmental sample
  misc_feature (1)..(1335): n is a, c, g, or t
ttggtcggtcaacaggattcatacgcgggcggcgcgccggttcttatgaatcctgaatgtgaaattctggaagacggcgatgaaacgtcactacattccggacggatcgttccggtttaccgcaaactcggcgatttgcggacgcgggcgctgcggcagattttgtactcgacgctttccatattgccggcggaaatgccggacacacttccggcgtaccttgtacgcaaattccggctgccgtcgaagattgaagcggcgcggctgattcattttcccgtattgcgcggcgaatcggaagcggaaagggaagaagaactgcgcgcgtataacgcgggaacttcccgcgcgcacaaacgttttatattcgaggaactctttcagtttcagactgcgatttatatagcgcgcgaaggccgcttacgccatgaaaaagggcggcgcatcgtaatcggcgaaaacgtccgttcggccatcaagaaaattctgccgtttcatccgaccgaagcgcaaaaacgcgttttgaaggaaattgccgatgatcagtgctcgccgtatccaatgaaccggcttttgcagggagatgtcggttcgggtaaaacgcttgtttcgttcatggcggctctgcgggcggctgacaatggcggccagaccgcgctattggccccaacagaactgcttgcccgccagcacgcggaaaacgcagcccgcctccttgaacccctgggcctgcgtatagcgttcctgacggggaatataaaagcctcgggcagaaaggatctgttaaaacatttggcggcgggggaaatagatattgttgtgggaacccacgcgcttttctcaaaagacgttaactataaaaacttacagttggtaattatagacgaacagcaccgcttcggcgtgacgcagagagcccttatcatggcaaagggcgttaatggcgcggcggcgggaccccacctgttgatgatgagcgccacgccgatcccgcgcacccttgccatgacggttttcggcgacatggacgtttcggtaataagcgatatgccgccggggagaaagccggtaataacccacctggcaagggaatccaacgagcagaaagtgtatgactttgtgcgcgataaactgaaagccggctcacaggcctattttgtatacccgttaatcgaaagcgatgacgagaaaganacgctacttaaagacgctgtctccatggcggagcggctggcggcaaaagtcttcccgaaattcgccgtggccctgatccactcaaaactcgacgagnaagaaaagcgccngactatggatcgtttccgccaagcgaaataa

SEQ ID NO: 29770 - protein, 444 aa, Unknown
  Obtained from environmental sample
  DOMAIN (164)...(331): Type III restriction enzyme, res subunit
  misc_feature (1)..(444): Xaa is any amino acid
MVGQQDSYAGGAPVLMNPECEILEDGDETSLHSGRIVPVYRKLGDLRTRALRQILYSTLSILPAEMPDTLPAYLVRKFRLPSKIEAARLIHFPVLRGESEAEREEELRAYNAGTSRAHKRFIFEELFQFQTAIYIAREGRLRHEKGRRIVIGENVRSAIKKILPFHPTEAQKRVLKEIADDQCSPYPMNRLLQGDVGSGKTLVSFMAALRAADNGGQTALLAPTELLARQHAENAARLLEPLGLRIAFLTGNIKASGRKDLLKHLAAGEIDIVVGTHALFSKDVNYKNLQLVIIDEQHRFGVTQRALIMAKGVNGAAAGPHLLMMSATPIPRTLAMTVFGDMDVSVISDMPPGRKPVITHLARESNEQKVYDFVRDKLKAGSQAYFVYPLIESDDEKXTLLKDAVSMAERLAAKVFPKFAVALIHSKLDEXEKRXTMDRFRQAK

SEQ ID NO: 29771 - DNA, 1257 bp, Unknown
  Obtained from environmental sample
  misc_feature (1)..(1257): n is a, c, g, or t
atgctgtggttccgcgctcccgaaaaggtatatatcaagaggggatgcctccccgtggctctggacgagcttaaaaacgtgatggggaaaaagcgggcgttcatcgttaccgacacgttcctctaccaaaacggttacaccaaaacgattaccgacaagctggacagcatgggcattgtccatgaaacgttctttgatgtcgctcccgacccgaccttaggctgcgccaagagaggcgcggcgctggtaaccgctttcaagcccgatgttatcatcgcgcttggcggcggctcggcaatggacgcgggcaaaattatgtgggtactctacgaacacccggaagcggattttgaggatatggccatgcgcttcgccgacattcgcaagcgggtctacaccttccccaagatgggagaaaaggcgtactttatcgcaataccaacctccgccggaacgggcagcgaggtaacgccgtttgccgtcatcaccgacgagaccaagggcatgaagtacccgttggcggattatgagctgatgcccaatatggcgattgttgacgcggacgtacagatgaacgcgcccaaggggcttaccagcgcatccggcattgacgcgttgactcacgccctggaagcctacgcctcgatcatggccaccgacttcaccgatgggctcgcgatacaggcgcttaaggtgatttttgagtggctgccagtagcgtataacgaaggcgcggcaaatcctgttgcgcgtgaaaaaatggcaaacgccgccactattgcgggtatggcttttgccaacgccttcctcggcgtgtgccactcaatggcgcacaaactaggcgcgttccaccacctgccccacggcatcgccaacgcactgatgatcagcgaagtactccgctacaacgcctgcgaagttcctccgaagatgggctccttccctcaatatgatcatcccaaaacattatcccgttacgcgcaaatcgcggacgctttgtctctcggcggtaaaaccgacgaagaaaaacttgagaacctcatcaccgctgtggaaaaattgaaagagcagatagggatcaagaagacaatcaaagattacggcattgatgaaaaagattttcttgcccgtcttgacgacatgagcgagcaggcctttgacgatcaatgtaccggcgcgaatccccggtatcccttaattgaggaaatcaagaaaatgtatattaatgttttttacggaaagaaggagagggtttaa

SEQ ID NO: 29772 - protein, 418 aa, Unknown
  Obtained from environmental sample
  DOMAIN (7)...(403): Iron-containing alcohol dehydrogenase
  misc_feature (1)..(418): Xaa is any amino acid
MLWFRAPEKVYIKRGCLPVALDELKNVMGKKRAFIVTDTFLYQNGYTKTITDKLDSMGIVHETFFDVAPDPTLGCAKRGAALVTAFKPDVIIALGGGSAMDAGKIMWVLYEHPEADFEDMAMRFADIRKRVYTFPKMGEKAYFIAIPTSAGTGSEVTPFAVITDETKGMKYPLADYELMPNMAIVDADVQMNAPKGLTSASGIDALTHALEAYASIMATDFTDGLAIQALKVIFEWLPVAYNEGAANPVAREKMANAATIAGMAFANAFLGVCHSMAHKLGAFHHLPHGIANALMISEVLRYNACEVPPKMGSFPQYDHPKTLSRYAQIADALSLGGKTDEEKLENLITAVEKLKEQIGIKKTIKDYGIDEKDFLARLDDMSEQAFDDQCTGANPRYPLIEEIKKMYINVFYGKKERV

SEQ ID NO: 29773 - DNA, 348 bp, Unknown
  Obtained from environmental sample
  misc_feature (1)..(348): n is a, c, g, or t
ttgggaaggctggcaagtatgcccaaacacaccaaactctgccacggcgactttaaccccagcaacattgtgattaccgaaaaggacgaggcgtatatcatcgactggtcncacgccgcccagggcaacgcctcggcggacgcggcgcatacctgcctgttgttctggcttgcgggcaacatcactttggcggaaaagtaccttgcgctgttctgcaaaaagagcgacacggcgaagcagtacgtggaaaagtggctgtccattgtggcggcgtcaaggcttcccaaggcaaagccggaagaaaaagagtttttgctgcattgggccaatgtagcggaataccaataa

SEQ ID NO: 29774 - protein, 115 aa, Unknown
  Obtained from environmental sample
  misc_feature (1)..(115): Xaa is any amino acid
MGRLASMPKHTKLCHGDFNPSNIVITEKDEAYIIDWSHAAQGNASADAAHTCLLFWLAGNITLAEKYLALFCKKSDTAKQYVEKWLSIVAASRLPKAKPEEKEFLLHWANVAEYQ

SEQ ID NO: 29775 - DNA, 483 bp, Unknown
  Obtained from environmental sample
  misc_feature (1)..(483): n is a, c, g, or t
atggacaactacaaactggaaaaaataatcgccgtacggacggcgaagacgatctaccgcgacggcagcaaggtgataaaactcatgggtgaggaataccccgcttcggacatactttccgaggcgctcaaccttgccgcggtgggagagaccaccctcaaggttcccaggctggttgaggtaacgaaaatcaacggcaagtgggctatcgtttgggaatacgttgagggaaccacccttgataagctcatggagaaaaacaaggacaaggaacagcagtaccttgaacgctttgttgacattcagcttgatatgcaccgccataatgctacaaggcttccgcggcttaccgaaaaaatggagcgaaaagtagaagcctccggcattgacgccaccgcccgctacgaaatttgggaaggctggcaagtatgcccaaacacaccaaactctgccacggcgactttaaccccagcaacattgtga

SEQ ID NO: 29776 - protein, 160 aa, Unknown
  Obtained from environmental sample
  misc_feature (1)..(160): Xaa is any amino acid
MDNYKLEKIIAVRTAKTIYRDGSKVIKLMGEEYPASDILSEALNLAAVGETTLKVPRLVEVTKINGKWAIVWEYVEGTTLDKLMEKNKDKEQQYLERFVDIQLDMHRHNATRLPRLTEKMERKVEASGIDATARYEIWEGWQVCPNTPNSATATLTPATL

SEQ ID NO: 29777 - DNA, 432 bp, Unknown
  Obtained from environmental sample
  misc_feature (1)..(432): n is a, c, g, or t
atgatcgacggggcacgccacgcccttatgatcagcgaagtgatgcgttacaacgcctgcgaagttccgcccaaaatgggaaccttctcccaatatgatcaccccaagaccctttcccgttacgcggaaatcgcggacgccctggattttggcggcgcaaacgacggggaaaagctcgaaaacctgatcgccgccatagaatggctgaaagaacaaatagggatcaagaagactatcaaggattacaacattgatgaaaaagattttcttgcccgccttgacgaaatgagcgaacaggcttttgacgatcagtgtaccggcgctaatccccggtatcccctgattgaggaaatcaaacagatgtatctcaacgcttactacggcaagagtattcatctgggcggttccgacggaaagaaggagcgggtgtaa

SEQ ID NO: 29778 - protein, 143 aa, Unknown
  Obtained from environmental sample
  misc_feature (1)..(143): Xaa is any amino acid
MIDGARHALMISEVMRYNACEVPPKMGTFSQYDHPKTLSRYAEIADALDFGGANDGEKLENLIAAIEWLKEQIGIKKTIKDYNIDEKDFLARLDEMSEQAFDDQCTGANPRYPLIEEIKQMYLNAYYGKSIHLGGSDGKKERV

SEQ ID NO: 29779 - DNA, 951 bp, Unknown
  Obtained from environmental sample
  misc_feature (1)..(951): n is a, c, g, or t
gtggacgattccaatcccgcaatcgtactctgccccgaaaaatgcatccgctgcggcagatgcgtaaaagtctgccaggacgtgcagaatgtgtgggccttggaattcctcggccggggcatacacggaaaaatcgccagcgcggcggacgctccgttaggtgaaagtccgtgcatcaagtgcggacagtgcgcggcgcattgccccgttggcgcgatttatgaaagagacgacacggtaaaagtgtggaacgccctgcaggacaaggaaaaacaccccgttgtgcagattgcccccgcagtccgcgtcgctctggctgaagaattcggccttaaacccggcacggtttttacaaaaaaaatatacgccgccctgcgccgccttgggtttaaaacggtctttgacactaacttttcagccgaccttaccattatggaagaaggctccgaacttgtaaaacgcctgaccgaaaaaaacagcgttattccgcttattacttcatgctgccccgcgtgggtagactatatggaaaagtattacaacgatatgattcccaatttttctaccgcgaaatccccccagcagatgatgggcgcgatgattaaagcatactgggctgaaaaagccggcgttgatcccgataaggtatattcggtatcagtcatgccgtgcaccgcgaagaagtgggaaacaaaacgcaatgacgacatgaagagcgccggtcacggttacgacgtggacattgtaattacaacaagggaacttgcgcggatgatcaaacaggcgggaattgaagtactgaaacttgacgaagaagaggctgataatccgcttggaccgtacaccgggagccggaacaattttgggcgcgacggggggcgtaatggaagccgcgtttcgcagcgcatactaccttgttacaaagaaagaactccccgacgtagactttaa

SEQ ID NO: 29780 - protein, 316 aa, Unknown
  Obtained from environmental sample
  DOMAIN (51)...(74): 4Fe-4S binding domain
  misc_feature (1)..(316): Xaa is any amino acid
MDDSNPAIVLCPEKCIRCGRCVKVCQDVQNVWALEFLGRGIHGKIASAADAPLGESPCIKCGQCAAHCPVGAIYERDDTVKVWNALQDKEKHPVVQIAPAVRVALAEEFGLKPGTVFTKKIYAALRRLGFKTVFDTNFSADLTIMEEGSELVKRLTEKNSVIPLITSCCPAWVDYMEKYYNDMIPNFSTAKSPQQMMGAMIKAYWAEKAGVDPDKVYSVSVMPCTAKKWETKRNDDMKSAGHGYDVDIVITTRELARMIKQAGIEVLKLDEEEADNPLGPYTGSRNNFGRDGGRNGSRVSQRILPCYKERTPRRRL

SEQ ID NO: 29781 - DNA, 555 bp, Unknown
  Obtained from environmental sample
  misc_feature (1)..(555): n is a, c, g, or t
ttgacgaagaagaggctgataatccgcttggaccgtacaccgggagccggaacaattttgggcgcgacggggggcgtaatggaagccgcgtttcgcagcgcatactaccttgttacaaagaaagaactccccgacgtagactttaaacccgcccgcggtcttgacggcgtaaaggaaggggaagttgatttcggtaacggaacaaagatacgcattgcggtagctcatcagatgggtaatattgccgcggttctggataagattcgcgaggcgaaaaaagccggtaaagagacgccgtatcactttgtagaagtaatggcgtgccgcggcggatgtgtcgcgggcggaggacagccctacggttgtaaggacgatattcgcgaaaggcgcgcaagcggtctttacacggacgatcaaaaatcgcagtaccgctgttcgcatcagaatccttttatcgatcaggtttacaaggaattccttggagagccgggcggtcacaaggcgcataaacttctacacacaaaatatgtggaacgtccgttatatgtgaagtaa

SEQ ID NO: 29782 - protein, 184 aa, Unknown
  Obtained from environmental sample
  SIGNAL (1)...(28)
  DOMAIN (2)...(119): Iron only hydrogenase large subunit, C-terminal domain
  misc_feature (1)..(184): Xaa is any amino acid
MTKKRLIIRLDRTPGAGTILGATGGVMEAAFRSAYYLVTKKELPDVDFKPARGLDGVKEGEVDFGNGTKIRIAVAHQMGNIAAVLDKIREAKKAGKETPYHFVEVMACRGGCVAGGGQPYGCKDDIRERRASGLYTDDQKSQYRCSHQNPFIDQVYKEFLGEPGGHKAHKLLHTKYVERPLYVK

SEQ ID NO: 29783 - DNA, 306 bp, Unknown
  Obtained from environmental sample
  misc_feature (1)..(306): n is a, c, g, or t
atgacaaacgaagaaattttaaaacgtattgatcatacgctcttaaagatgaccgcctcatgggatgagattaaaactctctgcgatgaggcggttaaatttaaaaccgcgtccgtttgcgtgccgccttcttatgtaaaacccattcataacgaatttaaggatttaaacatctgcacggtcatcggctttccgttaggctattcaataacagccgcgaaagttttggaagcggaacgcgctgttttaagcggcgcaaatgaaatcgacatggtgattaacgtaggcgacgtaaaaaacnggtag

SEQ ID NO: 29784 - protein, 101 aa, Unknown
  Obtained from environmental sample
  misc_feature (1)..(101): Xaa is any amino acid
MTNEEILKRIDHTLLKMTASWDEIKTLCDEAVKFKTASVCVPPSYVKPIHNEFKDLNICTVIGFPLGYSITAAKVLEAERAVLSGANEIDMVINVGDVKNX

SEQ ID NO: 29785 - DNA, 843 bp, Unknown
  Obtained from environmental sample
  misc_feature (1)..(843): n is a, c, g, or t
gtggctcttgcgccnngggtatggggcttaacgcncttttttacctttactgttgttatgggaatgggttatagatggcaaaccgcccttaccgcggtttttcttgaaggtattttatttataatcctttcgttattcaatgtgcgtgaggctatcatcaaggcaattccgaaaaatctgaaaaaagccgttgccgtaggtattggtctctttatcgcccttatcggttttgccaacgccaacatcgtggttcaggattccggcactataattggttttggcaatgtaacttccggcgctcctcttttggcgatcatcggcctgattcttattgtggttctttatgtagcgaagattccgggttcaatccttatcggcattattcttaccactttaatcggtatcccaatgggaatcacgcaggttgccgaaagttggaaaccgtttagcattcccgccgcgcctttgctcttccagtttgatttttctcccgcggcaatattaacatttaagttcttcactgtattttttactttcctgttcgtggatatttttgatacaatcgggactcttgtaggcgttaccactcaggcaaaacttattgacgacaagggaaatatccccaacgtaaaacaggctcttttgtccgacgctgtcggcaccgtggcgggagcggctcttggtacttctaccgttaccagctacattgaaagctcggccggcgtttcagcgggcggccgtacggggcttaccagtttaactaccggcgtacttttccttttagccctgtttctttcgcccttgttccttctgtgccgtccgcggctacggcaccggctctga

SEQ ID NO: 29786 - protein, 280 aa, Unknown
  Obtained from environmental sample
  DOMAIN (1)...(280): Permease family
  misc_feature (1)..(280): Xaa is any amino acid
MALAPXVWGLTXFFTFTVVMGMGYRWQTALTAVFLEGILFIILSLFNVREAIIKAIPKNLKKAVAVGIGLFIALIGFANANIVVQDSGTIIGFGNVTSGAPLLAIIGLILIVVLYVAKIPGSILIGIILTTLIGIPMGITQVAESWKPFSIPAAPLLFQFDFSPAAILTFKFFTVFFTFLFVDIFDTIGTLVGVTTQAKLIDDKGNIPNVKQALLSDAVGTVAGAALGTSTVTSYIESSAGVSAGGRTGLTSLTTGVLFLLALFLSPLFLLCRPRLRHRL

SEQ ID NO: 29787 - DNA, 609 bp, Unknown
  Obtained from environmental sample
  misc_feature (1)..(609): n is a, c, g, or t
atgtcctttcacgccgtgaatacaggcttaacaaattttttgtctggtatgtgtttataccccatgatcttttcaggcgggcttgtttcaagttattttataacttcccagtttttaaggctaaaagataccgcctgggctttgattctgcccattgcggtaagctcttttaacgtaatcctttgcaagactttttttagaacgacgattcccgattcaatcgtggaatccgcagttatagacggggctggccagcttacggtttatttccgaatcatactgccgctgtctctgcccgtattggcaaccgttggccttttcctttctttcggctactggaacgattggttcctggcaatgctgtatatcgatagtccacgtctctataccctccaggcttatctcaaccgcctcttgggcgatatcaacttcctcgcgcaaaacgcgcaaagcatgggagtaagcgtggcaaatatcatagccagtatgcccaaagaggctgcgcgtatggccatggtggttatcgcagtattgcctatcgcctgcgcttacccatttttccaacgctattttatttcgggcctgacggtgggcgcagtaaaagggtga

SEQ ID NO: 29788 - protein, 202 aa, Unknown
  Obtained from environmental sample
  misc_feature (1)..(202): Xaa is any amino acid
MSFHAVNTGLTNFLSGMCLYPMIFSGGLVSSYFITSQFLRLKDTAWALILPIAVSSFNVILCKTFFRTTIPDSIVESAVIDGAGQLTVYFRIILPLSLPVLATVGLFLSFGYWNDWFLAMLYIDSPRLYTLQAYLNRLLGDINFLAQNAQSMGVSVANIIASMPKEAARMAMVVIAVLPIACAYPFFQRYFISGLTVGAVKG

SEQ ID NO: 29789 - DNA, 489 bp, Unknown
  Obtained from environmental sample
  misc_feature (1)..(489): n is a, c, g, or t
gtgaaaaaaaagtctgaaaatacggtgttaaagtttacacaggttgggccgctaacaaatgtttttttcaatatgataatgctggccttgctgttgatgtgccttgtcccactcttgctggttgtttccatttcgttttcggcggaagaatccattcgaattttcggttatcaacttatacccaaaatcccctcgtttgaaggctacgcctttttgtttcaccagcgggcaaccatgctcagaactttatggatgtcggtgctggttacggcactcggtacttctcttggcattgtactgaacagcctcatgggctatgtcctttcacgccgtgaatacaggcttaacaaattttttgtctggtatgtgtttataccccatgatcttttcaggcgggcttgtttcaagttattttataacttcccagtttttaaggctaaaagataccgcctgggctttgattctgcccattgcggtaagctcttttaa

SEQ ID NO: 29790 - protein, 162 aa, Unknown
  Obtained from environmental sample
  misc_feature (1)..(162): Xaa is any amino acid
MKKKSENTVLKFTQVGPLTNVFFNMIMLALLLMCLVPLLLVVSISFSAEESIRIFGYQLIPKIPSFEGYAFLFHQRATMLRTLWMSVLVTALGTSLGIVLNSLMGYVLSRREYRLNKFFVWYVFIPHDLFRRACFKLFYNFPVFKAKRYRLGFDSAHCGKLF

SEQ ID NO: 29791 - DNA, 528 bp, Unknown
  Obtained from environmental sample
  misc_feature (1)..(528): n is a, c, g, or t
gtgtggggtttccttagctacgatatgggaatggtgaaccgtctgttggaaaactttagctttcccatgcgccgcttttacatggagccttctttttggcccggctttctgatttttatgagccagtggaagggagtaggctatggcacggttatctatctggcaacaattgcatccctggacaaaaccatatatgaagccgcgatcattgacggcgcaaccaaatggcagcagatatggaagctcactatccccatgatgaagacggtcattgtgctcctgtttatcatgtccgctggcagaatattttattccgacttcggccttttctaccaggttccgcgaaattccagttcgctttacaagacagtctataccctggatgtctatgtatacaatttgctaaaaacctcgaacaccggcatggcggcggcggcggcactaattcagagtgcggccgcctgtgtaacgatcctgatagtgaatcaaattgtaaaaaaaattgatcccgactcggcaatgatctag

SEQ ID NO: 29792 - protein, 175 aa, Unknown
  Obtained from environmental sample
  misc_feature (1)..(175): Xaa is any amino acid
MWGFLSYDMGMVNRLLENFSFPMRRFYMEPSFWPGFLIFMSQWKGVGYGTVIYLATIASLDKTIYEAAIIDGATKWQQIWKLTIPMMKTVIVLLFIMSAGRIFYSDFGLFYQVPRNSSSLYKTVYTLDVYVYNLLKTSNTGMAAAAALIQSAAACVTILIVNQIVKKIDPDSAMI

SEQ ID NO: 29793 - DNA, 810 bp, Unknown
  Obtained from environmental sample
  misc_feature (1)..(810): n is a, c, g, or t
ttgatggacgaggtcccgttcgtcctacggacgatgctcgcgctctcttttttgagcggtattttacttaccatgtactttgccaagcaacgcggtttaaatcccgatgtcgtgtccgacgcggggctttaccttataatctcggcgattgtcggcgcgcgcgcctactatgtgatgacgcacttccacgagttccgaggcgacctgctctccatcgtcaatccgtttcaggacgggcgcatcgggataagcgggcttgtgatgtacggcgggttcatcgcggcgattatcactaccgcgctgttttttaagattaaaaagctcccgattctgccctatttagacgtgttctcgccgggcgtaggtctgggaatcgcgctcacccgcatagggtgctttctcaacgggtgctgttacgggctggcggccaaggcggggagcctcttgtcggtgaattatccgattaacgttaattctccagccggatactatcaacacaagatactgggcgctccgggattgctgccgacgcagtgttttgaatcggtcggggggataataatcgccgtcacgctgtatttggtcggaaaaagcaagttcgcgtttgcgggattgcagttttatttgttaatagtcatgtacgccgcgttgcgctttttcattgagagcgtccgctttatcgaaacgcaaaagatagggccgttttcgcataatcaggtgatatgcattgtctcgtttttggtgttcggggggattattgttaggaagtttacggacggaaagacgttgaaaatcaaaaaggcgctttga

SEQ ID NO: 29794 - protein, 269 aa, Unknown
  Obtained from environmental sample
  DOMAIN (2)...(258): Prolipoprotein diacylglyceryl transferase
  misc_feature (1)..(269): Xaa is any amino acid
MMDEVPFVLRTMLALSFLSGILLTMYFAKQRGLNPDVVSDAGLYLIISAIVGARAYYVMTHFHEFRGDLLSIVNPFQDGRIGISGLVMYGGFIAAIITTALFFKIKKLPILPYLDVFSPGVGLGIALTRIGCFLNGCCYGLAAKAGSLLSVNYPINVNSPAGYYQHKILGAPGLLPTQCFESVGGIIIAVTLYLVGKSKFAFAGLQFYLLIVMYAALRFFIESVRFIETQKIGPFSHNQVICIVSFLVFGGIIVRKFTDGKTLKIKKAL

SEQ ID NO: 29795 - DNA, 888 bp, Unknown
  Obtained from environmental sample
  misc_feature (1)..(888): n is a, c, g, or t
atgccaagtcgccaccgtcggtatgtggctggccgaccatcagatgaatatgcgcgcgtcggacttttcgggcaatatatggcaagactgccgttgacgcaaagcgcgactatcataaacggcaacgcgcttcggataaattgggaagatattgtacccaaaagcgaattaagctgcattttaggaaatcctccgtttgccggagccagacttatgatgtctacgcaaaaagaagatatgcaaatagtctttgagaaaggttttcatggcattggaaatttagattatgtaacggcatggtacaagcgggccgccgagtatattaaagataccaagattcgcgcggcgttcgtctcgaccaattccatcacgcagggcgaacaagtcgcgttattgtggaagccgctttttgaagaatatggtataaaattcgatttcgcgtaccgtactttcaggtgggataacgaggcgaagggccgggcggccgttttttgcgttattatcggattcagcgcgacaggtattatcggtcaagaacgtcccgggtttatgggtataatttatgacgactccggtagaaaaatcaaggcgaacaacataaacccatatctggttgacgcggtaagcgtgtttatcaagagcagagcgttaccgcgctacttcgtaccggagatggtctttggaagtatgccaaatgatgccggattgttaagcaactactccacagaagaaaaaaaacgtattgtttccgaacatcccgaaacaaaaaagtggttcaaacggcttttgggcgcggaagaatttataaacaatattgagcggtggtgcttgtggttggaagacgtctccccgtcggatatcgcgaaatccgtttctcggccgatctga

SEQ ID NO: 29796 - protein, 295 aa, Unknown
  Obtained from environmental sample
  misc_feature (1)..(295): Xaa is any amino acid
MPSRHRRYVAGRPSDEYARVGLFGQYMARLPLTQSATIINGNALRINWEDIVPKSELSCILGNPPFAGARLMMSTQKEDMQIVFEKGFHGIGNLDYVTAWYKRAAEYIKDTKIRAAFVSTNSITQGEQVALLWKPLFEEYGIKFDFAYRTFRWDNEAKGRAAVFCVIIGFSATGIIGQERPGFMGIIYDDSGRKIKANNINPYLVDAVSVFIKSRALPRYFVPEMVFGSMPNDAGLLSNYSTEEKKRIVSEHPETKKWFKRLLGAEEFINNIERWCLWLEDVSPSDIAKSVSRPI

SEQ ID NO: 29797 - DNA, 1341 bp, Unknown
  Obtained from environmental sample
  misc_feature (1)..(1341): n is a, c, g, or t
atgactattctttcacttttactgcgtatgaccggcgggctttgcatgttcctgtttggcatgaaaatgatgagtgacggactgcaaaaaagcgccggtgagcgcatgcgaaaaacattaaatttcatgaccggcaaccgttttatcggaatgctaaccggttttgcggttaccgctattatccagtcttcatctgcgtttaccgtcattgtaatatcctttgtaaacgcgggacttttaacccttacacagtttatcggggtattattcggaacaaatattggaactaccgtaacaggatggataatctctcttgtgggattcaaattaagcatcgatgttctggctttaccggcgataggcattggttttattcttagcataataaaatggaaatacaaacatgtcggcgatttacttgtgggattcggtttcttgtttcttggtctttatttcctttccaacggaatagccaattcaaatgaaatttttgattttaccaaaattggagccattagagacaatagagtcacagcgatattaatcggcgtaggtgtgggattgataatgaccataatcattaactcgtcttcagcggcggtaacattaataatgacgctggcatttcaagatgttataacttacgagatggccgccggcatggtgttgggttccaatgtggggactaccattaacgcggttcttgccggcatcgcgggaaatactgaatcaaaacgcgccgctcttgcccatgtcctgtttaacgtgttaggacttatttgggcgcttccattattaatcccactgcttaatcttgttgaatttattttccctggcgacccatgggccgcgggtcccggcaacacttcaatacccgttcatctggcggggcttcatactttatttaacgtaataaataccgttattttcctgccctttgtaaaccagtacgccaaattgatctctatgcttattcccgacaagaaacaagaagagaaaatagaacactacaaatttgcgtatctgtccgcaggtaataccgagtcgcctgaacttaatatccttcgcgccgaaaaagaaattagtgacatggctagaattgtctcgtttatgtattcccgcttttgcacggtgttacgcggtttacacgaagagggcggcaatgacaaagagaataccgccgaattatgcgcggaactgttagaaaaagaggaatacattgatgaaatgcgggaaacactaagcgcctttttaattgaatgttcacgcgtaaaactcaatctaaaaaccgaagcccgtatttcataccttatgcaggtcatctcaatgctgaatcaatga

SEQ ID NO: 29798 - protein, 446 aa, Unknown
  Obtained from environmental sample
  DOMAIN (16)...(173): Na+/Pi-cotransporter
  misc_feature (1)..(446): Xaa is any amino acid
MTILSLLLRMTGGLCMFLFGMKMMSDGLQKSAGERMRKTLNFMTGNRFIGMLTGFAVTAIIQSSSAFTVIVISFVNAGLLTLTQFIGVLFGTNIGTTVTGWIISLVGFKLSIDVLALPAIGIGFILSIIKWKYKHVGDLLVGFGFLFLGLYFLSNGIANSNEIFDFTKIGAIRDNRVTAILIGVGVGLIMTIIINSSSAAVTLIMTLAFQDVITYEMAAGMVLGSNVGTTINAVLAGIAGNTESKRAALAHVLFNVLGLIWALPLLIPLLNLVEFIFPGDPWAAGPGNTSIPVHLAGLHTLFNVINTVIFLPFVNQYAKLISMLIPDKKQEEKIEHYKFAYLSAGNTESPELNILRAEKEISDMARIVSFMYSRFCTVLRGLHEEGGNDKENTAELCAELLEKEEYIDEMRETLSAFLIECSRVKLNLKTEARISYLMQVISMLNQ

SEQ ID NO: 29799 - DNA, 708 bp, Unknown
  Obtained from environmental sample
  misc_feature (1)..(708): n is a, c, g, or t
atgcgaacatatcattccgtaccaacagttgttgttatagcccttgcgggcctgatagcgctaagctgcgcaagtaccggcgcgggcagaaaggccgcggacaggcccttgccccagtattcgcaaaaaagctggaaaaatgtcaaaattgtcggcggcggcatgattcccggtattattttcaatactacccaaaaagaccttgcctatgtccgtaccgacatgggcggcgcgtaccgctggaatcccgaaaacgaatcatgggtaccgttaacagattttgccggagtggaagactacggacggctcggtatttccagtatcgccacggatccgatagagccgaaccgcgtcattatcgcttcgggaacctacactaatagttgggaccctaccccgtcccagatgctcgtgtccgaggactacggttctacctttacccgtgtcaatatgccttttaaaatgggcggtaatatgccagggcgcggggccggcgaaagactttgcatcgatcccaatgacaataaaaccgtatactatggctcctacggcgacggcctgtggcgcagccgcgattacggccatacatgggaagaggtgaaatcattccccacaaagggaaatgtctacgacaacgactttaccttctatgttgataaaaatttcaaacatttccacggcataatgtggtgcctcggccgattctga

SEQ ID NO: 29800 - protein, 235 aa, Unknown
  Obtained from environmental sample
  SIGNAL (1)...(27)
  misc_feature (1)..(235): Xaa is any amino acid
MRTYHSVPTVVVIALAGLIALSCASTGAGRKAADRPLPQYSQKSWKNVKIVGGGMIPGIIFNTTQKDLAYVRTDMGGAYRWNPENESWVPLTDFAGVEDYGRLGISSIATDPIEPNRVIIASGTYTNSWDPTPSQMLVSEDYGSTFTRVNMPFKMGGNMPGRGAGERLCIDPNDNKTVYYGSYGDGLWRSRDYGHTWEEVKSFPTKGNVYDNDFTFYVDKNFKHFHGIMWCLGRF

SEQ ID NO: 29801 - DNA, 798 bp, Unknown
  Obtained from environmental sample
  misc_feature (1)..(798): n is a, c, g, or t
atgggggtggactgtttcaaaacagacttcggcgagcgtatccccgatgacgcggtatattttgattcaggcgaccccgagcgccatcacaacttttacgcttatctttacaacaaggctgtgtttgaactgcttgaaaaaaaacgcggtaagggcgaagcctgcgtctttgcccgttccgcgacagcctgcggccagcagttccccctgcactggggcggggactgcgaatccacgtttgaggcgatggcggaaaccctgcgcggcggcctttctttaagcctctcgggtttcggcttctggagccacgacataggcggctttgagggaacgcctaacgccgccctgttcaaacgctggcttgcctttgggctgctttcctcccattcgcggctgcatggcagcacttcctaccgtgtcccgtggagcgtggacgaagaatccgccgaagtctgccgcttctttaccgaacttaagctgcgccttaaaccgtatattctgcaatgcgcgcgtgaagcccacgaaaagggcgtcccggtaatgcgagccatgttcgttgaattccctgacgatccggcctgcgcctaccttgaccgccaatatatgctgggcccggacctgctagtcgcgcctgtattcagcgaaagcggtgaagttacatattacctgcccgaaggcgagtggacaagcctcatttcaaatgagacagtcaaaggtggctgctggaaaaccgaaaagcacggctttttaagcctgcccctttatgcccgcgccgggaagaaggtcgttgcggggtaa

SEQ ID NO: 29802 - protein, 265 aa, Unknown
  Obtained from environmental sample
  DOMAIN (5)...(262): Glycosyl hydrolases family 31
  misc_feature (1)..(265): Xaa is any amino acid
MGVDCFKTDFGERIPDDAVYFDSGDPERHHNFYAYLYNKAVFELLEKKRGKGEACVFARSATACGQQFPLHWGGDCESTFEAMAETLRGGLSLSLSGFGFWSHDIGGFEGTPNAALFKRWLAFGLLSSHSRLHGSTSYRVPWSVDEESAEVCRFFTELKLRLKPYILQCAREAHEKGVPVMRAMFVEFPDDPACAYLDRQYMLGPDLLVAPVFSESGEVTYYLPEGEWTSLISNETVKGGCWKTEKHGFLSLPLYARAGKKVVAG

SEQ ID NO: 29803 - DNA, 822 bp, Unknown
  Obtained from environmental sample
  misc_feature (1)..(822): n is a, c, g, or t
gtgcttcagagagaaccttacaacaaggaagcccttttcgccgcagcggagctggacattgcgcgcggcagggccggggacgcggttatccgttaccgcgcggcagtgagccgttaccccgacgacaggcggcttttggtttcacttgccctggtgctgggttctttgggagacacagacggcgcccgctcctacatagagcgcgccctgcttgcccacgccggtgattacagggtgcattattacgccgcttacctggcttcccaggccggccgccttgccgacgcggttgcccacgcggaagatgcgctttattacaggcctggttttatcccggcccgttttttgctggcgtctctgcgttaccggcagggccggtatgaggaagccgccagacttgcggacgagcttatttttttgaatcgggacgattccctctcctggtacctaaagggcgtttcgtatattaggatggggcggtttactgaagcccaatccgtgctaaccacagccgcgaatattaatggggatgatgaattcatcagaaccgcactggaagagcttcttataaccagaacgagaattgaggatccggtccgcagccgctgggcctcctggcactttgccagagccaggacctttcgtaccggcaatcagcttgagcaggccctttttgaatacaggcgggggctcaggcttaacccctatgccagggatcgccgcgaaatatgccgaattgctcaggcttcagggttacccggcccgttacctggaagagctaaaagtcatgcaaaaacctggggctggcggacacctccctga

SEQ ID NO: 29804 - protein, 273 aa, Unknown
  Obtained from environmental sample
  DOMAIN (145)...(178): Tetratricopeptide repeat
  misc_feature (1)..(273): Xaa is any amino acid
MLQREPYNKEALFAAAELDIARGRAGDAVIRYRAAVSRYPDDRRLLVSLALVLGSLGDTDGARSYIERALLAHAGDYRVHYYAAYLASQAGRLADAVAHAEDALYYRPGFIPARFLLASLRYRQGRYEEAARLADELIFLNRDDSLSWYLKGVSYIRMGRFTEAQSVLTTAANINGDDEFIRTALEELLITRTRIEDPVRSRWASWHFARARTFRTGNQLEQALFEYRRGLRLNPYARDRREICRIAQASGLPGPLPGRAKSHAKTWGWRTPP

SEQ ID NO: 29805 - DNA, 810 bp, Unknown
  Obtained from environmental sample
  misc_feature (1)..(810): n is a, c, g, or t
gtgaaaataatccaggctgcggaatttgattctttttggaagcgcgatgtagcgcagaatgatgatgaaactgaattagtggtaaaagaaataatagccgctgtaagaagcgaaggggacatggcggttcgccgctttacttcccgctttgacaagagctctccagaaaagctggaagttccaatgtctgtggcccttgaggcgcgggaagaaatgcgccggagcgatcctcaactgtattcgacgattgagctttcggcatcgcacataaaacgcttttgccagaaacaaagggaacaattttttgattttgaatatgaaatggaaaaaggccttattacaggccagaaggtaattcccgtacaaaaggcggcggtttatgttccgggtgggcgctttcctttgttctcatcggtgattatgtgccttcttcccgcgttctgcgccggtgtggaagaagtgatcttcgcgtcgccgcctttggaagatgggattcccgacagaaagatacttgccactgccgcgattacagcggaaatagccgaaagggagcttcgtgtttttgccgttggcggcgcacaggcaattgccgctctgtcgctggggacagaatccattcccggttcagatgtagttgccggtcccggcaacaaatacgttgcggcggccaagcggcttttgttcggcgaggtggggatagattttatcgcggggccgtccgatgtgctggtcatcagcgataattccaaaacggcagacatttcgcaaaatgcgaattcgcgaaacgcgaatttatcgccgcagatatga

SEQ ID NO: 29806 - protein, 269 aa, Unknown
  Obtained from environmental sample
  DOMAIN (9)...(268): Histidinol dehydrogenase
  misc_feature (1)..(269): Xaa is any amino acid
MKIIQAAEFDSFWKRDVAQNDDETELVVKEIIAAVRSEGDMAVRRFTSRFDKSSPEKLEVPMSVALEAREEMRRSDPQLYSTIELSASHIKRFCQKQREQFFDFEYEMEKGLITGQKVIPVQKAAVYVPGGRFPLFSSVIMCLLPAFCAGVEEVIFASPPLEDGIPDRKILATAAITAEIAERELRVFAVGGAQAIAALSLGTESIPGSDVVAGPGNKYVAAAKRLLFGEVGIDFIAGPSDVLVISDNSKTADISQNANSRNANLSPQI

SEQ ID NO: 29807 - DNA, 726 bp, Unknown
  Obtained from environmental sample
  misc_feature (1)..(726): n is a, c, g, or t
gtgggcgaagacttttcgataaatattgccgactacaaaatatcttcaggcggcgtggtttttccgaaccccaacgcaccgacaggaataccgctttcattaagcgatgttttttcgcttgccgaacaccttgaaaagctggataaggttttaatagtggacgaagcatacgccgctttcggtgcggaatccgcggttccttttatcaacaagcacagcaacattctcactgttcatacgctttcaaagtccgcgtcattagccggactacgcagcggttacgcaatcggaaacagcgagttgatcgaagggctctgccgcgtaagggacagttttaattcttacacggttgacaggcttgctctggccggcgcggaagctgcggtctccgatgcggcctattacgatgaaattaaccgccgcgttatagcgaccagggaacgtgttacaaaaactttacgcaaggaaggttttaccgtactgccatcagctgcaaatttcatttttgttaaagctccagttagagcttcacccgaaaaaactgagccgtgtattagcggcgctgatcttatggccgccttgcgtgaaaggggaattcttgtcaggcatttcaacaagaatagaatagccgattaccttagggtgagcatgggaaccgatgaggaaatggatgcgtttttggaggcctgtatagcgataatcgctaacacaggaaatacaaagtga

SEQ ID NO: 29808 - protein, 241 aa, Unknown
  Obtained from environmental sample
  DOMAIN (1)...(230): Aminotransferase class I and II
  misc_feature (1)..(241): Xaa is any amino acid
MGEDFSINIADYKISSGGVVFPNPNAPTGIPLSLSDVFSLAEHLEKLDKVLIVDEAYAAFGAESAVPFINKHSNILTVHTLSKSASLAGLRSGYAIGNSELIEGLCRVRDSFNSYTVDRLALAGAEAAVSDAAYYDEINRRVIATRERVTKTLRKEGFTVLPSAANFIFVKAPVRASPEKTEPCISGADLMAALRERGILVRHFNKNRIADYLRVSMGTDEEMDAFLEACIAIIANTGNTK

SEQ ID NO: 29809 - DNA, 1215 bp, Unknown
  Obtained from environmental sample
  misc_feature (1)..(1215): n is a, c, g, or t
ttgacgggatacgcaattgaactggccgccgaatttgaccgttacggcgaagtggcggtaattgatcttgatgccgcaatgggcaagggctcaaacatcgaaatgataaagccccttttgcgaatggctgagtgccgtgttggcggcggcataaaaactccggaacaggcaaaagaattggtgagccttggggcgcggaaaataattgtcggttcgggggcttttaaaagcggcggcgaattcaggccaaatattccgtttcttaaatcaatggcggaaaaaatcggaagggaacggctaatagtcgcagttgatgcccgcgactctgaaatagttgtagacggatggaagacacgcaccggccttgacctgtttgataccgcaaaggcagttgagccttatgtctctgaattgctctttacctgcgtagagcgtgagggcgaaatgaaaggtacagacctggaaactgtgcgcaaactgcgcgaagcagtttcctgcctgcttaccgtcgcgggcggcgtctcaagtttggatgaagtcgcggagctggcgtctttaaactgcgatattcagttaggcatggccctctataccgggaagattcaactcgccgacgcttttttgcggtcgcttaactggaaaaaatgctgtccgccagcaactgacattaataaatcgcttcttcctcttattgttcagtctcctgacggacagacgcttatgacgggctttaccgatgtcgaagcattagccgaaacattcatgcagggaaacgtttgtttccacagtcgcactcgaaacaagctctggatgaaaggcgaaacttcggaaagtgttttgaatcttttaaaatgcgcgccgattgcgacagggacgcgcttcttgccgtggcgggaaccctgccggcctgtttgtcatacgggcgcgtggtcatgttttgaaacaggcagaaaatttacctgggaattgttacagagcattattgtcgagcgtttcgaaaacccgccgccaggttcgtacaccgcaactttagacgacaagcttgtgcgcgaaaaactaatggaggaagcggaagaagtatgtacggcaaaaacgcatgacgaagttgtctgggaagcggcggatctgctttattttgcaactgtgctgataacccgcgagggacttaccgttcaggaagtcctggacgagcttgatcgcagacacaaaaaataa

SEQ ID NO: 29810 - protein, 404 aa, Unknown
  Obtained from environmental sample
  DOMAIN (241)...(315): Phosphoribosyl-AMP cyclohydrolase
  misc_feature (1)..(404): Xaa is any amino acid
MTGYAIELAAEFDRYGEVAVIDLDAAMGKGSNIEMIKPLLRMAECRVGGGIKTPEQAKELVSLGARKIIVGSGAFKSGGEFRPNIPFLKSMAEKIGRERLIVAVDARDSEIVVDGWKTRTGLDLFDTAKAVEPYVSELLFTCVEREGEMKGTDLETVRKLREAVSCLLTVAGGVSSLDEVAELASLNCDIQLGMALYTGKIQLADAFLRSLNWKKCCPPATDINKSLLPLIVQSPDGQTLMTGFTDVEALAETFMQGNVCFHSRTRNKLWMKGETSESVLNLLKCAPIATGTRFLPWREPCRPVCHTGAWSCFETGRKFTWELLQSIIVERFENPPPGSYTATLDDKLVREKLMEEAEEVCTAKTHDEVVWEAADLLYFATVLITREGLTVQEVLDELDRRHKK

SEQ ID NO: 29811 - DNA, 555 bp, Unknown
  Obtained from environmental sample
  misc_feature (1)..(555): n is a, c, g, or t
atgagcaagtactggaataaccgcgtaaaaaatatctctccttatgtgccgggcgaacagccgagggacaggaagtttatcaagctcaacacaaatgaaaatccgtatccgccttccccaaaagtaattaaagccatacaggaagctgccaatgagcgtctccgactttatcccgatcctcaatgcaccgagcttcgcgaagctattgccaggcggtacggagtaaagagcgaacaggtttttgcgggcaacggatcggatgagatactggcttttgcctttgcggcgttttttgaaagttcaggtgtgaacaggaatgaaccgattctctttcctgacataacctatagcttttatccggtgtatgccaatctgtgggatattccttaccacacaataccggtaggcgaagacttttcgataaaaatcgccgactacaaaataccatcaggcggcgtggtgtttccgaatcccaatgcgccaacaggaacactgctttcattaagcgaggttttttcccttgccgaatacctggaaaagctgaacaaggtttaa

SEQ ID NO: 29812 - protein, 184 aa, Unknown
  Obtained from environmental sample
  misc_feature (1)..(184): Xaa is any amino acid
MSKYWNNRVKNISPYVPGEQPRDRKFIKLNTNENPYPPSPKVIKAIQEAANERLRLYPDPQCTELREAIARRYGVKSEQVFAGNGSDEILAFAFAAFFESSGVNRNEPILFPDITYSFYPVYANLWDIPYHTIPVGEDFSIKIADYKIPSGGVVFPNPNAPTGTLLSLSEVFSLAEYLEKLNKV

SEQ ID NO: 29813 - DNA, 852 bp, Unknown
  Obtained from environmental sample
  misc_feature (1)..(852): n is a, c, g, or t
ttgagcgcaccggtattcattcaggcgacagtatcgccgtctatcccgnctttgaatatagacgacgaccttgctggaaaaatttttgaaataacgaaaaaactctgcatggctttgaatgtccgcggccttgtaaatattcaatatgtatattatgagaacgacatctatgtaattgaggtaaacccgcgcgcgtcgcggacagttccgtatatcagcaaggttacgggtgttcagatgtgcgagattgcgacaaaggtcagcgtagggcagactcttgcctctcttggctatacatctgggatagcgaaaatgccgccttatgtcgcggtcaaagttcccgtcttttcctttgaaaagcttgccggccttgacactcaccttggccccgagatgaaatccacaggcgaagttttaggacttggcaagagtcttgaagaagcgcttttcaaaggacttgtcgccgccggttataaaatattaaaaggcggcggcgtattaattacagtccgcgacggcgataagggcgagattgccggagtcgctgaaaaatttgccaactgcggtttttctctgcacgctacaagaggaacagcccgcttcctcgaaggcaaaggctttactgttcaagcgatagacaaaatctgcgacaacgatatggaaaacaccgaaacgcttttagcaagcggaaagataagctacattatttcaacttctgaaaaaggcagagaccccgcgttggacgatgttaagctccgcagaaaagcctgctccctcggcgtgccgtgcttaacatcaattgataccgccaacgctctcgctgacggattgctttcgattacagcgaaataa

SEQ ID NO: 29814 - protein, 283 aa, Unknown
  Obtained from environmental sample
  DOMAIN (177)...(265): MGS-like domain
  misc_feature (1)..(283): Xaa is any amino acid
MSAPVFIQATVSPSIPXLNIDDDLAGKIFEITKKLCMALNVRGLVNIQYVYYENDIYVIEVNPRASRTVPYISKVTGVQMCEIATKVSVGQTLASLGYTSGIAKMPPYVAVKVPVFSFEKLAGLDTHLGPEMKSTGEVLGLGKSLEEALFKGLVAAGYKILKGGGVLITVRDGDKGEIAGVAEKFANCGFSLHATRGTARFLEGKGFTVQAIDKICDNDMENTETLLASGKISYIISTSEKGRDPALDDVKLRRKACSLGVPCLTSIDTANALADGLLSITAK

SEQ ID NO: 29815 - DNA, 840 bp, Unknown
  Obtained from environmental sample
  misc_feature (1)..(840): n is a, c, g, or t
atgatatattttgtaaagaacccgcactactcatccgtaaaagaggctactgacgtgattgcgtttgaaggcgtctccaagcagtacggcgatactgtgctgtttgacggggccacgttcggcataaacgaggggcaccgcacagcgctcatcgggcccaacggggccggcaagaccaccctgttcaactgcctcaccggaatttatcggcccacccggggcctgatcagcctccgccggccccaaggcccgggcgaaccgccgcttacggcgaccttgaacaacctccggccggaccagatcacgaacctgggcctggcccggacttttcagaacatccgccttttcaacaacctcaccgtgctggaaaacgtgctcatcggctgccacccgaaaatgaaggccggtctctggggggccttgatgcgcacccgccaggccaaggccgaagaacggtccatggctgaattcagcatgcggctcctggagaaatacggcctgggcgcggcggccaacgacctggccaaaaatctgccctatggcgaccagagacgcctggagataatccgggccctggccaccggacctcgtcttttgctgctggacgagccggccgccggcttgaacatcgctgaaaccgaagccttggacgatctgatccgccttatccgcgaacgggaaaacctgtccatcctcctcatcgaacatgacatgaacctggtgatgagcgtttcggaaaaggtctgggtcatggaatacgggcgcctgatcgccgccggttccccggaagaggtcaaaaacgatccggtggtcatccgggcctacctgggggaggaatga

SEQ ID NO: 29816 - protein, 279 aa, Unknown
  Obtained from environmental sample
  DOMAIN (45)...(254): ABC transporter
  misc_feature (1)..(279): Xaa is any amino acid
MIYFVKNPHYSSVKEATDVIAFEGVSKQYGDTVLFDGATFGINEGHRTALIGPNGAGKTTLFNCLTGIYRPTRGLISLRRPQGPGEPPLTATLNNLRPDQITNLGLARTFQNIRLFNNLTVLENVLIGCHPKMKAGLWGALMRTRQAKAEERSMAEFSMRLLEKYGLGAAANDLAKNLPYGDQRRLEIIRALATGPRLLLLDEPAAGLNIAETEALDDLIRLIRERENLSILLIEHDMNLVMSVSEKVWVMEYGRLIAAGSPEEVKNDPVVIRAYLGEE

SEQ ID NO: 29817 - DNA, 510 bp, Unknown
  Obtained from environmental sample
  misc_feature (1)..(510): n is a, c, g, or t
ttgtcggctgtatatgatgcggttaagctgcgaaagcctgtaatggaaaggtatataacagtcggaggatcagccgttaagcagcctcaagtaatgaaagtcagaataggaaagagaattggggatgtctttgccgaatgcggagggttcaaggcttctcccaggaagattgccgtaggttcgcccttttccgggcagccgctgggcaaccttgatgaacctgtaataaaaaccagttacgcgatttttgcccttctggaagggtacaacaaggaaaaccagcacagttgcataaattgcggagaatgcagaaatgtgtgccccgtgggccttgatcccgaagagctatataaaaggactcttataagcggaaaaaataccgccgatgctgctaaaacggaattattcgctgaatgtcatgcctgcggctgttgtgaattggtatgcccttcccagcttcctctaagttcggtaatatcttcttttgttttgagggaaaccgatgtttga

SEQ ID NO: 29818 - protein, 169 aa, Unknown
  Obtained from environmental sample
  misc_feature (1)..(169): Xaa is any amino acid
MSAVYDAVKLRKPVMERYITVGGSAVKQPQVMKVRIGKRIGDVFAECGGFKASPRKIAVGSPFSGQPLGNLDEPVIKTSYAIFALLEGYNKENQHSCINCGECRNVCPVGLDPEELYKRTLISGKNTADAAKTELFAECHACGCCELVCPSQLPLSSVISSFVLRETDV

SEQ ID NO: 29819 - DNA, 717 bp, Unknown
  Obtained from environmental sample
  misc_feature (1)..(717): n is a, c, g, or t
gtgccgttaagcgaaattccacccggcgctgtaaggatatttattcgggcggaagacaggcgcttttattttcattttgggattgacgttttctcgctggcggccagcatctataggaatctgaaagccggacgcaccgtatccggagcatccacgattactatgcagttggcgcggctggtgcatccccactctggcggcctgcggggaaagattgttgaagcctgggacgcaattcggcttgaggcccatctgtcaaaaaaggaaatcctcgagctgtacctgaacagcattcccttcgggcagcaacatcgaggggctggccgcgataacgagagccaggtttggcagttccgtcagagagctggacgacaacagggccgcgctccttgcctcggttccccggcgtccgcttctttacgatcccgccttaaaccccggaggcggctgtttccgccgcaatggccctgtccgcccgatgccgcctggatctgcgggaagaagagctctggcaggcggcaaaggaagccgccatacccacttcaagtcaggatgatccgagagcgccgttcttcgcccctcactttaccgaacgcttggcaagaatggagccaagtgcaaaaagcaatgtacaaagtaccctcgacctcaccctccagcttttcgctgaagaagagttggccctggaaatctcgcttctttctaacaagcggataa

SEQ ID NO: 29820 - protein, 238 aa, Unknown
  Obtained from environmental sample
  DOMAIN (1)...(111): Transglycosylase
  misc_feature (1)..(238): Xaa is any amino acid
MPLSEIPPGAVRIFIRAEDRRFYFHFGIDVFSLAASIYRNLKAGRTVSGASTITMQLARLVHPHSGGLRGKIVEAWDAIRLEAHLSKKEILELYLNSIPFGQQHRGAGRDNESQVWQFRQRAGRQQGRAPCLGSPASASLRSRLKPRRRLFPPQWPCPPDAAWICGKKSSGRRQRKPPYPLQVRMIRERRSSPLTLPNAWQEWSQVQKAMYKVPSTSPSSFSLKKSWPWKSRFFLTSG

SEQ ID NO: 29821 - DNA, 582 bp, Unknown
  Obtained from environmental sample
  misc_feature (1)..(582): n is a, c, g, or t
atgcaggtggccgacggcgcgctggaggaagtcaccgcgctgctcacccgcggcgccgagctggcgcagcaggcgcagacgggcaccatcagctccaccaaccgcctggccctggacctcgagttccaggtcatatccgacgccatcaagaacgtcgccaacaacgcggtgttcaactcccagtcggtgttccgctccgagagcatctacgtcgcggtcgccagcttcgagaggatcaacttcaccatcggcacgatggaaggcaacatgagcatctccagcctgagcgtcaaggacaccaccgtcgcactggcagcccagtcgaagctggaccaactgctccaggatgtcagcatgcagcgcgccaccatcggctcccgtatgcagtacatgaacacgatatcgaacacccttggtatccaggtggagaacttcaccgcggctaagagccagatagtggacgccaacatagcggacgaggtcatcaacctgaccaagttccagattctgggtcagtccggcacgagcgcgctggcgcagtccaaccaggccgcgcagctcatgctcggcctgctccgctag

SEQ ID NO: 29822 - protein, 193 aa, Unknown
  Obtained from environmental sample
  DOMAIN (100)...(171): Bacterial flagellin C-terminus
  misc_feature (1)..(193): Xaa is any amino acid
MQVADGALEEVTALLTRGAELAQQAQTGTISSTNRLALDLEFQVISDAIKNVANNAVFNSQSVFRSESIYVAVASFERINFTIGTMEGNMSISSLSVKDTTVALAAQSKLDQLLQDVSMQRATIGSRMQYMNTISNTLGIQVENFTAAKSQIVDANIADEVINLTKFQILGQSGTSALAQSNQAAQLMLGLLR

SEQ ID NO: 29823 - DNA, 798 bp, Unknown
  Obtained from environmental sample
  misc_feature (1)..(798): n is a, c, g, or t
atgccgatgtcgaaggaaaggcgacaatggccgaaccggacaaccccaacggctccgccttcgccatcgagggccttaccagtcccgacggcagggtgcttggcaagatggcccactccgaacgttgcggagaatttgttcacatcaacattcccggcaatagacaccagaggatatttgaagcgggggttagatattttagataatttattctggacacagattttgcttctctgccttatgatggtcgggcttgtttgcgcgaaagccggcctcattgatgagagatgccgttcctcaataagcgatcttattctctgcgtatttttgccgtgcaccactttatcggcgtttctgggtgccggcttttcacagctttcgtcacttgggattatctttttaatttccgctcttaatctggttatttgttttttgctttccagatacgtgttctacagaaaggccgaaacagagcaaaaaaaggttctgacgtacgcctcagttattcccaacgccagtttcctgggaaatccgatagtagaaagcatttacggccttggagcgcttgtttattcggcggtttacctcgcgccgattaggatttccctttggtcagtgggcatcgcgattttttccggtaaaaaaatcagtctgaaaaagattgcctttcacccctgtcttgttgcaacctatctgggcatactgcttatggtaacaaactttaagccgccgccgctggtatcccggctggcaatcagtctgggaaattgtacaacgccgctttcgatgatggtgtag

SEQ ID NO: 29824 - protein, 265 aa, Unknown
  Obtained from environmental sample
  misc_feature (1)..(265): Xaa is any amino acid
MPMSKERRQWPNRTTPTAPPSPSRALPVPTAGCLARWPTPNVAENLFTSTFPAIDTRGYLKRGLDILDNLFWTQILLLCLMMVGLVCAKAGLIDERCRSSISDLILCVFLPCTTLSAFLGAGFSQLSSLGIIFLISALNLVICFLLSRYVFYRKAETEQKKVLTYASVIPNASFLGNPIVESIYGLGALVYSAVYLAPIRISLWSVGIAIFSGKKISLKKIAFHPCLVATYLGILLMVTNFKPPPLVSRLAISLGNCTTPLSMMV

SEQ ID NO: 29825 - DNA, 1119 bp, Unknown
  Obtained from environmental sample
  misc_feature (1)..(1119): n is a, c, g, or t
ttgcccttcgaatttgacgctactggggttctcgccgccagaactttagctgacctgcccttccgtattgtagaaacaagaccacctgaagagatttatgaagacgagaaccccgaagctctcgttgcggaaattcccctggaggttctgcgccgggcttacgagtaccctcttgcacaggtttatcctcagacctctacgggggccaccgtcgcggaaccggcggatgaaagcttagttcaaaaacttccgacctttaagggcggcacgacttcgttcgacatgcacaagcacacccgcctgattttacagggagcgccgctggcagtgcttccggtatttcccggcaccaactgcgaatgggaaatggaaagggcttttaaggaagcaggggcgaaaaccaggctcgtggttttcagaaaccgcagtagccgggatattgccgaatccctcgatgaactggccaaagcctttggagaggcgcagataatcgccctttcaggcggtttcagcgccggagacgaacctgacggttcaggcaagttcatcgccaacgtacttcgttcgcctgtcatcgccgccgctgtttcggagtttcttgaaaaccgggacggcctcatgcttggaatctgcaacggtttccaggccctggttaaaaccggacttgtgccttatggccgcatcatcccttcagtagaaatggacgccgcgcccaccctcactttcaacgccataggccgccatgtgtcccggatggtacgtaccattgtactgccgaacatttccccctggctcagcctggaaaaacctggcggtatccacgtaataccggtaagccacggcgaaggccgcgtggtaatcaaaagcgaagaggccgaaaccctttttaacgccgggcaggttcccttctgctatgccgatgtcgaaggaaaggcgacaatggccgaaccggacaaccccaacggctccgccttcgccatcgagggccttaccagtcccgacggcagggtgcttggcaagatggcccactccgaacgttgcggagaatttgttcacatcaacattcccggcaatagacaccagaggatatttgaagcgggggttagatattttagataa

SEQ ID NO: 29826 - protein, 372 aa, Unknown
  Obtained from environmental sample
  misc_feature (1)..(372): Xaa is any amino acid
MPFEFDATGVLAARTLADLPFRIVETRPPEEIYEDENPEALVAEIPLEVLRRAYEYPLAQVYPQTSTGATVAEPADESLVQKLPTFKGGTTSFDMHKHTRLILQGAPLAVLPVFPGTNCEWEMERAFKEAGAKTRLVVFRNRSSRDIAESLDELAKAFGEAQIIALSGGFSAGDEPDGSGKFIANVLRSPVIAAAVSEFLENRDGLMLGICNGFQALVKTGLVPYGRIIPSVEMDAAPTLTFNAIGRHVSRMVRTIVLPNISPWLSLEKPGGIHVIPVSHGEGRVVIKSEEAETLFNAGQVPFCYADVEGKATMAEPDNPNGSAFAIEGLTSPDGRVLGKMAHSERCGEFVHINIPGNRHQRIFEAGVRYFR

SEQ ID NO: 29827 - DNA, 864 bp, Unknown
  Obtained from environmental sample
  misc_feature (1)..(864): n is a, c, g, or t
atggtcatgcacaagggcgcgccgaggaacaagcgtttcatgaagctcataaaggagcagggcgccgcgaagtacatgaagatggtggagacggagttcctgcgcgacaagaagctgcacgagatcgacgaggagttgtactacactatagacgagtcgggccacagcgccgatcttacggagaaggggcgggcgcttgtgggcggaaacaacccggagttcttcacggtgcccgacttggccgtgacgctcggcaagatagatcacgacgagtcgctctccgtacaggagaaggcggagcgtaaggaggcggcgcaccgcgagtacgcggagatttcggagcgcatccacagcgtcggtcagttgctgcgcgcctattcgcttttcgagaaggatgtcaactacgtggtgcaggacgggcagatactcatagtggacgagttcacgggccgcatactgcacggccgccgctacagcgaggggctccaccaagcgttggaggcgaaagagggggttaaggtagccggtgagaatcagacgctggccacaatcaccttccaaaatttcttcaagatgtacaacaagctcgccggaatgaccggtaccgccgtaacggaggccgcggagttccacgagatatacaagctcgacgtggtgaccatacccaccaatagggcgcttaagaggatggactacgacgacgagatatacaagacccaccgcgagaagtacaacgccatcgttcaggacataaaggcgatgaacgagctgggccgcccgtgtttggtgggcacgacgtccatagagaaatcggagctcctgagccgtatgcttttgcgggcgggcgttcagcacgaggtgtga

SEQ ID NO: 29828 - protein, 287 aa, Unknown
  Obtained from environmental sample
  DOMAIN (25)...(211): SecA DEAD-like domain
  misc_feature (1)..(287): Xaa is any amino acid
MVMHKGAPRNKRFMKLIKEQGAAKYMKMVETEFLRDKKLHEIDEELYYTIDESGHSADLTEKGRALVGGNNPEFFTVPDLAVTLGKIDHDESLSVQEKAERKEAAHREYAEISERIHSVGQLLRAYSLFEKDVNYVVQDGQILIVDEFTGRILHGRRYSEGLHQALEAKEGVKVAGENQTLATITFQNFFKMYNKLAGMTGTAVTEAAEFHEIYKLDVVTIPTNRALKRMDYDDEIYKTHREKYNAIVQDIKAMNELGRPCLVGTTSIEKSELLSRMLLRAGVQHEV

SEQ ID NO: 29829 - DNA, 1119 bp, Unknown
  Obtained from environmental sample
  misc_feature (1)..(1119): n is a, c, g, or t
ttggaaagcgtaaacggattccgcgccgccacggccgccctctccgacgacgagctgaaggccaagaccgccgagttccgcgaacgcatcgccgagggcgaaacgctcgacgacctcctcccggaggcttacgccgtcgttcgcgaggccacgcaccgcgttttgggagaacgcaagaccgtgaccgactcggccaccggcgggcagattcccttcatggcccacttcgacgttcaggtcatgggggctatcgtcctccatcagggcaaaatatcggagatgaaaacgggcgagggcaagacgcaggtggcggctatggcggcctacctcaacgccctcagcggcaaaggcgtccacgtcatcaccgtcaacgactacttggcgcggcgcgacagcgattggatggggaaaatattcggctttctggggctgaccgtcggatgcctcgacgtcaccgaaccccacagcccgcagcggcaggcggcctacgcttccgatatcactttcggcaccaacaacgagttcggcttcgactacctgcgcgacaatatgtccggcgcgccggagcactgcgtccaacgcgaactcaacttcgccatcgtcgatgaggtggacaatattctcatagacgaggcgcgcacgccgctcatcatctccgggccggtcaccaagtccaaccgcgagtacgaagaactaaaaccccgcgtggtcaagcttgtagccgcgcaggcggcgctgacgcagaagatcgtggacggagccgaggagctttttaaagcagacggcaaggagttcgaggccggcttcaaagctcatggtcatgcacaagggcgcgccgaggaacaagcgtttcatgaagctcataaaggagcagggcgccgcgaagtacatgaagatggtggagacggagttcctgcgcgacaagaagctgcacgagatcgacgaggagttgtactacactatagacgagtcgggccacagcgccgatcttacggagaaggggcgggcgcttgtgggcggaaacaacccggagttcttcacggtgcccgacttggccgtgacgctcggcaagatagatcacgacgagtcgctctccgtacaggagaaggcggagcgtaa

SEQ ID NO: 29830 - protein, 372 aa, Unknown
  Obtained from environmental sample
  DOMAIN (1)...(233): SecA DEAD-like domain
  misc_feature (1)..(372): Xaa is any amino acid
MESVNGFRAATAALSDDELKAKTAEFRERIAEGETLDDLLPEAYAVVREATHRVLGERKTVTDSATGGQIPFMAHFDVQVMGAIVLHQGKISEMKTGEGKTQVAAMAAYLNALSGKGVHVITVNDYLARRDSDWMGKIFGFLGLTVGCLDVTEPHSPQRQAAYASDITFGTNNEFGFDYLRDNMSGAPEHCVQRELNFAIVDEVDNILIDEARTPLIISGPVTKSNREYEELKPRVVKLVAAQAALTQKIVDGAEELFKADGKEFEAGFKAHGHAQGRAEEQAFHEAHKGAGRREVHEDGGDGVPARQEAARDRRGVVLHYRRVGPQRRSYGEGAGACGRKQPGVLHGARLGRDARQDRSRRVALRTGEGGA

SEQ ID NO: 29831 - DNA, 633 bp, Unknown
  Obtained from environmental sample
  misc_feature (1)..(633): n is a, c, g, or t
ttggacgcagtgctccggcgcgccggacatattgtcgcgcaggtagtcgaagccgaactcgttgttggtgccgaaagtgatatcggaagcgtaggccgcctgccgctgcgggctgtggggttcggtgacgtcgaggcatccgacggtcagccccagaaagccgaatattttccccatccaatcgctgtcgcgccgcgccaagtagtcgttgacggtgatgacgtggacgcctttgccgctgagggcgttgaggtaggccgccatagccgccacctgcgtcttgccctcgcccgttttcatctccgatattttgccctgatggaggacgatagcccccatgacctgaacgtcgaagtgggccatgaagggaatctgcccgccggtggccgagtcggtcacggtcttgcgttctcccaaaacgcggtgcgtggcctcgcgaacgacggcgtaagcctccgggaggaggtcgtcgagcgtttcgccctcggcgatgcgttcgcggaactcggcggtcttggccttcagctcgtcgtcggagagggcggccgtggcggcgcggaatccgtttacgctttccaatataggtatcagctttttgacatcgcgctcttgctggagccgccgatcagttaa

SEQ ID NO: 29832 - protein, 210 aa, Unknown
  Obtained from environmental sample
  misc_feature (1)..(210): Xaa is any amino acid
MDAVLRRAGHIVAQVVEAELVVGAESDIGSVGRLPLRAVGFGDVEASDGQPQKAEYFPHPIAVAPRQVVVDGDDVDAFAAEGVEVGRHSRHLRLALARFHLRYFALMEDDSPHDLNVEVGHEGNLPAGGRVGHGLAFSQNAVRGLANDGVSLREEVVERFALGDAFAELGGLGLQLVVGEGGRGGAESVYAFQYRYQLFDIALLLEPPIS

SEQ ID NO: 29833 - DNA, 681 bp, Unknown
  Obtained from environmental sample
  misc_feature (1)..(681): n is a, c, g, or t
atgtttcangtgcgggaacagtttacctttattctggaaacaacccttaccctgcaggggcataacggaaataccgctatggtgtatgtgaatgagggaatattcaaaatgatccccggaacagccattatcggtaataacagaactgacggttatggcggcgccggggtacatatggggggtggaactttcgaaatgaccggcggcactatctccggcaatactgcccgcggtgatggcgccggtgtgtatgtaggcggcggcacttttaccatgtcgggcggcatcatctccggcaatacctccagcagtaatggcggcggagtgtttggcggaactttcaccatgaccaatggcaccatctccggtaataccgccaagaatggcggcggggtgtgtaattcttcctttactatgcgcggcggcaccattacaggtaataccgcccgcgaagccggcggcggggtgtatgcgcaatggaattcctttaaaaagaccggcggtaccattacaggttataacagcgaccaagctaacggcaatgttgtaagggacgaaggcggcgacgtacttgcccgcaaaggccacgctgtgtttatcagagccgacaggcgcaaagagactaccgccgggtcaggggtaagcctggacagggataccgcggctggctgggaccaatga

SEQ ID NO: 29834 - protein, 226 aa, Unknown
  Obtained from environmental sample
  misc_feature (1)..(226): Xaa is any amino acid
MFXVREQFTFILETTLTLQGHNGNTAMVYVNEGIFKMIPGTAIIGNNRTDGYGGAGVHMGGGTFEMTGGTISGNTARGDGAGVYVGGGTFTMSGGIISGNTSSSNGGGVFGGTFTMTNGTISGNTAKNGGGVCNSSFTMRGGTITGNTAREAGGGVYAQWNSFKKTGGTITGYNSDQANGNVVRDEGGDVLARKGHAVFIRADRRKETTAGSGVSLDRDTAAGWDQ

SEQ ID NO: 29835 - DNA, 357 bp, Unknown
  Obtained from environmental sample
  misc_feature (1)..(357): n is a, c, g, or t
atggtaccgccggtctttttaaaggaattccattgcgcatacaccccgccgccggcttcgcgggcggtattacctgtaatggtgccgccgcgcatagtaaaggaagaattacacaccccgccgccattcttggcggtattaccggagatggtgccattggtcatggtgaaagttccgccaaacactccgccgccattactgctggaggtattgccggagatgatgccgcccgacatggtaaaagtgccgccgcctacatacacaccggcgccatcaccgcgggcagtattgccggagatagtgccgccggtcatttcgaaagttccaccccccatatgtaccccggcgccgccataa

SEQ ID NO: 29836 - protein, 118 aa, Unknown
  Obtained from environmental sample
  misc_feature (1)..(118): Xaa is any amino acid
MVPPVFLKEFHCAYTPPPASRAVLPVMVPPRIVKEELHTPPPFLAVLPEMVPLVMVKVPPNTPPPLLLEVLPEMMPPDMVKVPPPTYTPAPSPRAVLPEIVPPVISKVPPPICTPAPP

SEQ ID NO: 29837 - DNA, 858 bp, Unknown
  Obtained from environmental sample
  misc_feature (1)..(858): n is a, c, g, or t
gtggaagacaaccagcaggggctttgctcttcgataatagcggcgctggctctggtcaagcaggggattacgccaagccggacggtaaagctcctctttgcgtcggacgaagaaataggcagcgtctacggccttcaatggctcataaaaaatcacccggatcttttccataaaaacgacatagccatagttccggattcaggctgccgttccggggcggagattgaaatcgccgaaaaaagccatgtatgggcaacatttacaacaaagggaattcagacccacgccgcccatccggaacatggcgcaaacgcttaccttgccggtgcggatctgacagtacggctccacttcgggctttctgaaaaattctccgacagaaacccgctttttgatcctccctattctacattccagcctacaaaaaaagagccaaacatacccaacgtcaacaccgttccgggcgaggacgctttccattacgatatgcggatacttccctctgtttctgttgatgatgtgtttatggaagttgatcgcattaaggccgaagttgaagcaagacacaaagtaactattgattacaaaatagattaccgaaccgaatcccctcccactttgcaggattccccgctggtaaaatttctttccaatagcataagggaagtatacaaggttgaaaccaaaactataggcatcggcggcggaaccttcgcagcatacttgcggaaacttggcattgattgcgccgtgtgggcgcgttttgacggtactgcccaccagccaaacgagtacgcccttctggaaaatatccttggggatgcaaaggtcatggcgctgatgatgataagcgattaa

SEQ ID NO: 29838 - protein, 285 aa, Unknown
  Obtained from environmental sample
  DOMAIN (1)...(284): Peptidase family M20/M25/M40
  misc_feature (1)..(285): Xaa is any amino acid
MEDNQQGLCSSIIAALALVKQGITPSRTVKLLFASDEEIGSVYGLQWLIKNHPDLFHKNDIAIVPDSGCRSGAEIEIAEKSHVWATFTTKGIQTHAAHPEHGANAYLAGADLTVRLHFGLSEKFSDRNPLFDPPYSTFQPTKKEPNIPNVNTVPGEDAFHYDMRILPSVSVDDVFMEVDRIKAEVEARHKVTIDYKIDYRTESPPTLQDSPLVKFLSNSIREVYKVETKTIGIGGGTFAAYLRKLGIDCAVWARFDGTAHQPNEYALLENILGDAKVMALMMISD

SEQ ID NO: 29839 - DNA, 822 bp, Unknown
  Obtained from environmental sample
  misc_feature (1)..(822): n is a, c, g, or t
gtgatggatgggcaggaactactgcaaataattaataaaggtgaatcaagcaaagttcagtttaaagaacgtttgccgcatcctgatagctttgccgatgagacagaaatttacgactcaggcccgaaagaccttgatatgcggcttttttccgaatatttcaaaaaggaatttgaaatgacctatgaagaaaaggggttaactttggaagaagcgttaattgccaaaaaagccatgcgtaataatcatttaaccttagccgggcttttattttttggaaacgagcctcagtccttccgtccggcttttaccataaaaaccgttatgtatgcagggaatgacattggaggcgataattaccgcagtaagccggaggatttaaccgggactattcctgaactttttaagcagggaatgttgtatgtaaagagctgcataaagtatctgcaagacgggcagggttttaattcacacggaaaacctgaagtttcaattatttcacttgaagaagtattgcaaaacgcgctcattcaccgggattactttaagaacgcgcctgtacgtctgcttgtttttgacaatcgaatcgaattaatcagtcccgggaaactgcccaatagccttaccgttgaagagataaaatatggcaaccccgttatcagaaacaatcaaatcgcattattcgcaagcaggactctcccttacagcggtttgggatccggaatgcgccgtgcactggcaaatcaaccggatctggaattggaaatgatgtggaaggcgaacaatttattgtacgttttccgcgaagggttaatatgctga

SEQ ID NO: 29840 - protein, 273 aa, Unknown
  Obtained from environmental sample
  misc_feature (1)..(273): Xaa is any amino acid
MMDGQELLQIINKGESSKVQFKERLPHPDSFADETEIYDSGPKDLDMRLFSEYFKKEFEMTYEEKGLTLEEALIAKKAMRNNHLTLAGLLFFGNEPQSFRPAFTIKTVMYAGNDIGGDNYRSKPEDLTGTIPELFKQGMLYVKSCIKYLQDGQGFNSHGKPEVSIISLEEVLQNALIHRDYFKNAPVRLLVFDNRIELISPGKLPNSLTVEEIKYGNPVIRNNQIALFASRTLPYSGLGSGMRRALANQPDLELEMMWKANNLLYVFREGLIC

SEQ ID NO: 29841 - DNA, 762 bp, Unknown
  Obtained from environmental sample
  misc_feature (1)..(762): n is a, c, g, or t
atgaaggcgaataccaaaaaagcgcctggcgatcttcttacaacaaacgaacggaaaaaactgttgaccaatttcaggggctacgatatttcccctgacatggtacgcctttcgctggtgaacctttaccttcacggtttcagccagccccaaatatacgaatacgacaccctgaccagcgatgaacgttggaatgaatacgcagatgtgattctcgccaatccgccgttcatgtccccaaaaggaggaattaagccccacaagcggttttctgtccaaagcagccgcagcgaagtcctttttgttgactacattgccgaacaccttaacacttccggtcgcgccgctgttattgtccccgaagggatcatctttcagagcggcggagcgtataaacagctccgtaaaattctggttgaaaaatacctatatgccgtagcctccctgcccgctggcgtgtttcacccttattcgggagtgaaaacatcaattttgtttttggacccgcttcttgcccagaaaagcgattcgattttgtttgctaaaattgaaaacgacggttttagccttggcgctcaacggcgggctatcgataaaaatgacttgcctgaggcgttgaagataataaaagaatttcgaaaagagctcacgcagaggcgcagaggcgcaaaggagaagagagaggaaattttaccacgaaccacaccaaccaacactagcgataatagttatttgattgtttccaaagagaagattgcttaa

SEQ ID NO: 29842 - protein, 253 aa, Unknown
  Obtained from environmental sample
  DOMAIN (1)...(241): N-6 DNA Methylase
  misc_feature (1)..(253): Xaa is any amino acid
MKANTKKAPGDLLTTNERKKLLTNFRGYDISPDMVRLSLVNLYLHGFSQPQIYEYDTLTSDERWNEYADVILANPPFMSPKGGIKPHKRFSVQSSRSEVLFVDYIAEHLNTSGRAAVIVPEGIIFQSGGAYKQLRKILVEKYLYAVASLPAGVFHPYSGVKTSILFLDPLLAQKSDSILFAKIENDGFSLGAQRRAIDKNDLPEALKIIKEFRKELTQRRRGAKEKREEILPRTTPTNTSDNSYLIVSKEKIA

SEQ ID NO: 29843 - DNA, 498 bp, Unknown
  Obtained from environmental sample
  misc_feature (1)..(498): n is a, c, g, or t
ttgtaccccataatatacactgcactgttggctgttatgatgagtggttgctacagtttctccggcgcctccattccgccgaatgtgaaaacgtttacggtggaatttttccccaatcgggcgactatgattaaccccacgctaagctcggattttacggacggcttgcggtcctatatttcgtcccgttcaagtttgcgagaaacaggcgagggtacgcctgatattgagatttcgggcgaaataacgggctatacgcttacgccgatggctgcacaatccgatgcacaggccgctttgcagcggttcaccatcaccgttaaggttaattttgcaaacaatgtcaacacgaaagagagtttttcgcacaccttttcggtgtttcgagatttcgatagctcgttcggccttagcgaaatagaaggcggcggatttgtgaaagaagttaccgaccaattaatggatgatatttttatgaaagccttcggaaattggtga

SEQ ID NO: 29844 - protein, 165 aa, Unknown
  Obtained from environmental sample
  SIGNAL (1)...(23)
  misc_feature (1)..(165): Xaa is any amino acid
MYPIIYTALLAVMMSGCYSFSGASIPPNVKTFTVEFFPNRATMINPTLSSDFTDGLRSYISSRSSLRETGEGTPDIEISGEITGYTLTPMAAQSDAQAALQRFTITVKVNFANNVNTKESFSHTFSVFRDFDSSFGLSEIEGGGFVKEVTDQLMDDIFMKAFGNW

SEQ ID NO: 29845 - DNA, 384 bp, Unknown
  Obtained from environmental sample
  misc_feature (1)..(384): n is a, c, g, or t
gtgggctatccgatattggatttggaagcgtttcatttgtcgttgaaacagtatattttcaacattgaagagttggttatccgtacgcttggcggatatggcatcacggccgagcggttgcaaggcgccacaggcgtttggattgacagcgacaaggatacggcacgtaaaatctgcgccatcggcgtacacgccagccgttacgttaccacgcacgggtttgcgttgaacgtcaataccgatttgcgttattacgattacatcaatccctgcggatttaccaacaaaggcgttacttcaatggaaaaagaattgggacgcaaggtggatgtggaagaagtgaaagaaagattgaaggcgcagtttactaaactcctaaactaa

SEQ ID NO: 29846 - protein, 127 aa, Unknown
  Obtained from environmental sample
  misc_feature (1)..(127): Xaa is any amino acid
MGYPILDLEAFHLSLKQYIFNIEELVIRTLGGYGITAERLQGATGVWIDSDKDTARKICAIGVHASRYVTTHGFALNVNTDLRYYDYINPCGFTNKGVTSMEKELGRKVDVEEVKERLKAQFTKLLN

SEQ ID NO: 29847 - DNA, 381 bp, Unknown
  Obtained from environmental sample
  misc_feature (1)..(381): n is a, c, g, or t
ttgtatctttgcaaaatggaaattcagtcaatcaaacaacgattaggaattattaccgtcaattcggaaatgaaccgcgctatagaagtggcttgtcaggtggcagccacagatttaagcgtcttggttacaggtgaatcaggtgtagggaaagagttttttccgaaaatcattcatcaacttagccctcgcaagcatggggcgtacattgccatcaactgcggtgcaatccccgaaggtacgatagattccgaacttttcggacatgaaaaaggctcttttaccgatgctatcgccttgcacacaggcaaatttgagcaggcaaacggcggaacaatttccttgatgaaatcggcgatgtgccgccctcgatacaggtaa

SEQ ID NO: 29848 - protein, 126 aa, Unknown
  Obtained from environmental sample
  DOMAIN (17)...(126): Sigma-54 interaction domain
  misc_feature (1)..(126): Xaa is any amino acid
MYLCKMEIQSIKQRLGIITVNSEMNRAIEVACQVAATDLSVLVTGESGVGKEFFPKIIHQLSPRKHGAYIAINCGAIPEGTIDSELFGHEKGSFTDAIALHTGKFEQANGGTISLMKSAMCRPRYR

SEQ ID NO: 29849 - DNA, 543 bp, Unknown
  Obtained from environmental sample
  misc_feature (1)..(543): n is a, c, g, or t
gtgccgccctcgatacaggtaaaacttctgcgcgtgctgcaacagcgtgaaatagggcgcgttggcggaacgaaaaccatcaacgtagatgtgcgcatcatcaccgccaccaaccgcaacttagaagaaatgatgaaaagcggtgcgttccgcgaagatttttactaccgcatcaacgttttcccaatttatgtaccgccactgcgcgaacggcgggcggacattccgctgcttattgaccattttattgccaaaatcaacaagcagaaccgcatgaatatcaggcgcatcacaggcggtgcacttgatttgctgatgatgtatttctatccgggcaatatccgcgaactcgaaaatgtgattgaacgtgccacgatactcgccaccgacaacgtgatacattcgtacgatttgccaccctcactgcaaagcgctgtgtcaagcaactcggtgagcgaaggaccgcttgaccttgtgcttggcaaagtggaaaaacaaatgataattgatgcacttattgccaacaacggcaacatgttataa

SEQ ID NO: 29850 - protein, 180 aa, Unknown
  Obtained from environmental sample
  DOMAIN (1)...(118): Sigma-54 interaction domain
  misc_feature (1)..(180): Xaa is any amino acid
MPPSIQVKLLRVLQQREIGRVGGTKTINVDVRIITATNRNLEEMMKSGAFREDFYYRINVFPIYVPPLRERRADIPLLIDHFIAKINKQNRMNIRRITGGALDLLMMYFYPGNIRELENVIERATILATDNVIHSYDLPPSLQSAVSSNSVSEGPLDLVLGKVEKQMIIDALIANNGNML

SEQ ID NO: 29851 - DNA, 807 bp, Unknown
  Obtained from environmental sample
  misc_feature (1)..(807): n is a, c, g, or t
gtgatggaatcagaatcaatggattcagagtccaaattgactccaaggtctgcaatgtcagtgtcaatatactcttgtttattttcatcttcgctgccggcggcgctctcttcaacggcttcgccttcttcggaaatatcgttttcttctggaacgtcatttccttctgaaacatcgcttccttcagaagcgtcgctttctgcggaaacgtcatcgtcaagagcagacatatcgaaatcgtccatagaaagctcgctttctaaatcgtcactatcatctaaagatataacatcatccatggcaatgtcgcttgcttcagcggcggcgtttccttcagaagaagtatcttcaagggaggacatgtctaaatcatctgttgcaagctcgctttcttcggaaacagtgtcttctgtggcaatgtcgcttacttcggaaacggcgctttcttcggaaggggtgtcttcaagagcggacatgtctaaatcatctgttgcaagctcgctttcttcggaaacagtgtcttctgtggcaatgtcgtttacttcggaaacggcgctttcttcggaagtggtgtcttcaagagcggacatgtcgaaatcatctgttgcaagctcgctttcttctgaaacggtggtttctgtggtaacatcgcttacttcggaaacggcgctttcttcggaaggggtatcttcaagagcggacatgtcgaaatcgtccaatgcaagatcgctttcttctgaaacggtggtttctgtggtaacatcgcttacttcggaaagcggcgctttcttcggaaggggatcttaa

SEQ ID NO: 29852 - protein, 268 aa, Unknown
  Obtained from environmental sample
  misc_feature (1)..(268): Xaa is any amino acid
MMESESMDSESKLTPRSAMSVSIYSCLFSSSLPAALSSTASPSSEISFSSGTSFPSETSLPSEASLSAETSSSRADISKSSIESSLSKSSLSSKDITSSMAMSLASAAAFPSEEVSSREDMSKSSVASSLSSETVSSVAMSLTSETALSSEGVSSRADMSKSSVASSLSSETVSSVAMSFTSETALSSEVVSSRADMSKSSVASSLSSETVVSVVTSLTSETALSSEGVSSRADMSKSSNARSLSSETVVSVVTSLTSESGAFFGRGS

SEQ ID NO: 29853 - DNA, 975 bp, Unknown
  Obtained from environmental sample
  misc_feature (1)..(975): n is a, c, g, or t
ttggacgatttcgacatgtccgctcttgaagataccccttccgaagaaagcgccgtttccgaagtaagcgatgttaccacagaaaccaccgtttcagaagaaagcgagcttgcaacagatgatttcgacatgtccgctcttgaagacaccacttccgaagaaagcgccgtttccgaagtaaacgacattgccacagaagacactgtttccgaagaaagcgagcttgcaacagatgatttagacatgtccgctcttgaagacaccccttccgaagaaagcgccgtttccgaagtaagcgacattgccacagaagacactgtttccgaagaaagcgagcttgcaacagatgatttagacatgtcctcccttgaagatacttcttctgaaggaaacgccgccgctgaagcaagcgacattgccatggatgatgttatatctttagatgatagtgacgatttagaaagcgagctttctatggacgatttcgatatgtctgctcttgacgatgacgtttccgcagaaagcgacgcttctgaaggaagcgatgtttcagaaggaaatgacgttccagaagaaaacgatatttccgaagaaggcgaagccgttgaagagagcgccgccggcagcgaagatgaaaataaacaagagtatattgacactgacattgcagaccttggagtcaatttggactctgaatccattgattctgattccatcacggatgggcaagatgaacaggcagcggcggattctccctcagaagaatcttctgttgatctttcaactgatctttcaaccgatgtattgaatgaaagcgccgaaacggatatagatcttgatgctacaaaggatcacgatcacgaagattgggagctctgcgtaacatggcgctaccccggtaccttcccacccgagacagctcttatcttgaagagacgatcagatcaatttagatctttccgaagcggtaattga

SEQ ID NO: 29854 - protein, 324 aa, Unknown
  Obtained from environmental sample
  misc_feature (1)..(324): Xaa is any amino acid
MDDFDMSALEDTPSEESAVSEVSDVTTETTVSEESELATDDFDMSALEDTTSEESAVSEVNDIATEDTVSEESELATDDLDMSALEDTPSEESAVSEVSDIATEDTVSEESELATDDLDMSSLEDTSSEGNAAAEASDIAMDDVISLDDSDDLESELSMDDFDMSALDDDVSAESDASEGSDVSEGNDVPEENDISEEGEAVEESAAGSEDENKQEYIDTDIADLGVNLDSESIDSDSITDGQDEQAAADSPSEESSVDLSTDLSTDVLNESAETDIDLDATKDHDHEDWELCVTWRYPGTFPPETALILKRRSDQFRSFRSGN

SEQ ID NO: 29855 - DNA, 315 bp, Unknown
  Obtained from environmental sample
  misc_feature (1)..(315): n is a, c, g, or t
ttggatgcgtccagcccaccttcgccgccgccagctcctattatggtgtgcagttcgtccataaacataattatatttttatttttgcgcagttcggatagtagcgagataattctctcttcaaattgccctctgtactttgtgccagcgactaggcttgtcatatctaaagacacaagccttttatcctctaaattttccggtacctcttttgcggctattttttgtgccaagccttctatgacggctgttttcccaactccgggttcacctaccagtatagggttgttcttctttttgcgagagaggatttga

SEQ ID NO: 29856 - protein, 104 aa, Unknown
  Obtained from environmental sample
  misc_feature (1)..(104): Xaa is any amino acid
MDASSPPSPPPAPIMVCSSSINIIIFLFLRSSDSSEIILSSNCPLYFVPATRLVISKDTSLLSSKFSGTSFAAIFCAKPSMTAVFPTPGSPTSIGLFFFLRERI

SEQ ID NO: 29857 - DNA, 651 bp, Unknown
  Obtained from environmental sample
  misc_feature (1)..(651): n is a, c, g, or t
atgaaaaagaatcttttaagtttcgtattattcgtagcggtatttgttattccgtattatgcacaggctcaaggagaggatgttttccggcaggatggtattgcatcatggtatggtaaagagtttgacgggcgtccgacagcatcgggggaaatcttcgattcttctaaattaactgccgctcatccaagtctgccatttgggacaatgattgtcgtaacaaatcagcataataataaaaaagtattggtcagggtaaatgatcgaggaccgtttgttccttcaaggattattgatgtttcaatggccgctgccgaaaggcttgatatgataattaccggaacagctcctgttaaaattgaaagtatcgaaagcattgtcgtatcttctccggttacagaaactgcaaaattatcggctgatgaaacgccgaatgtaacaacaaatcagccggtaagtacaacggtgtttacatcacagccggttattacctatcctccgcagcaaataaaaataactccggcaataaaaattatgccgaataaaacatacaggttgcagcttggttcctataaaatagcaaggaatgcaatagatacttttgacagattaaaaattcaggctttaatcccgcttatgaaaggtacatag

SEQ ID NO: 29858 - protein, 216 aa, Unknown
  Obtained from environmental sample
  SIGNAL (1)...(23)
  DOMAIN (30)...(120): Rare lipoprotein A (RlpA)-like double-psi beta-barrel
  misc_feature (1)..(216): Xaa is any amino acid
MKKNLLSFVLFVAVFVIPYYAQAQGEDVFRQDGIASWYGKEFDGRPTASGEIFDSSKLTAAHPSLPFGTMIVVTNQHNNKKVLVRVNDRGPFVPSRIIDVSMAAAERLDMIITGTAPVKIESIESIVVSSPVTETAKLSADETPNVTTNQPVSTTVFTSQPVITYPPQQIKITPAIKIMPNKTYRLQLGSYKIARNAIDTFDRLKIQALIPLMKGT

SEQ ID NO: 29859 - DNA, 648 bp, Unknown
  Obtained from environmental sample
  misc_feature (1)..(648): n is a, c, g, or t
atgaataaacgcgcattgcgggctgacattttacttcttgttactgcggctgtttggggtttcggttttattgcgcagcgttccggaatggaatttatcgggccgtttgcgtttaacggaattcgttttatattggggagcatttcattgctcccttttatttttttcaggcggtttcattctgttcacgtaaccgcttctccgcgttatctgattttaccttctcttgctgcgggtatttgcctctttttagctgtcatgcttcaacagtttgggattatgtttacaactgcgggaaatgcgggtttcataacaggtctttatgtcgtattgacgccgtttttcggtatttttctggggagaaaaacaggttatgcgacatggataggctctgttcttacattgtgcggcctttattttatcagcgccgcaggccgtccttcaataaatcccggcgacattatcgtcattatcagcgcttttttttgggcttttcatgtgcttttaattgacagatttatacattctgacgcanagcataatgtttcgcaggaaactacagttgatccgctggagctttctttcggtcaatttgccgtatgcggcgtttttacgttgttaggctcttttttaatgaaccccatgtaa

SEQ ID NO: 29860 - protein, 215 aa, Unknown
  Obtained from environmental sample
  SIGNAL (1)...(27)
  DOMAIN (17)...(143): Integral membrane protein DUF6
  misc_feature (1)..(215): Xaa is any amino acid
MNKRALRADILLLVTAAVWGFGFIAQRSGMEFIGPFAFNGIRFILGSISLLPFIFFRRFHSVHVTASPRYLILPSLAAGICLFLAVMLQQFGIMFTTAGNAGFITGLYVVLTPFFGIFLGRKTGYATWIGSVLTLCGLYFISAAGRPSINPGDIIVIISAFFWAFHVLLIDRFIHSDAXHNVSQETTVDPLELSFGQFAVCGVFTLLGSFLMNPM

SEQ ID NO: 29861 - DNA, 624 bp, Unknown
  Obtained from environmental sample
  misc_feature (1)..(624): n is a, c, g, or t
gtgtccgaaactatccgatgccccttctgctccgccaagtacgagctgcggcgcgaacgtgcccgcagggaagtgaagcgcgcccgctgcgcccgctgcgggaacgacttcagcatcgtggacgcagtgtcgcagttgttcggcgatctcccccccgaagaagcacccgcgtcaccgcccgcagccatgcccagtgccgagccagaggctgcggctgcgaccgagccagaggtggtggttgctgaatcagaggcagtgaccgagcttgatgccgtgggcgagccagatgccgcagcggaaccagaggtcgtggtcgagccagagactgtgacagaaccagaggtcacaaccgaaacagaggcagcagttgagcttgagaccgtggtcgagccagacaccgtggtcgagaccgagaccgcgacagaacctggcactgttgcagagccagatccagtgatcgaatccgttgtagaatcagttgtagaggccgttgtagaggctgcggccgtgaccgaggcagtgcccacgccgaccttagtccagccacaagccgcccccgaggccgctttggaagtcaccacggaaacgaccagctttgccccagaggaatccgggccgctatag

SEQ ID NO: 29862 - protein, 207 aa, Unknown
  Obtained from environmental sample
  misc_feature (1)..(207): Xaa is any amino acid
MSETIRCPFCSAKYELRRERARREVKRARCARCGNDFSIVDAVSQLFGDLPPEEAPASPPAAMPSAEPEAAAATEPEVVVAESEAVTELDAVGEPDAAAEPEVVVEPETVTEPEVTTETEAAVELETVVEPDTVVETETATEPGTVAEPDPVIESVVESVVEAVVEAAAVTEAVPTPTLVQPQAAPEAALEVTTETTSFAPEESGPL

SEQ ID NO: 29863 - DNA, 507 bp, Unknown
  Obtained from environmental sample
  misc_feature (1)..(507): n is a, c, g, or t
ttggccatcccggaagtgtcctccgagcggaggtcgtacattccaatgggttttctggacaaaaagataatcgccggcaacacgctcttcaccgttgcgggcgcagatatgtatcactttggcgtactttcgtccaaagtccacatggcctggatgcggaaggtctgtggacggctgaagagcgactaccgctactccaaggacatcgtttacaacaacttcccatggcccagtgtcactgacgagcaaagggcaaaggtggaggagctggtcaagggggtgctggacgctagggcgcagtggcccgggaacccgctggacgccctttacgatggctcaatcatgccgcgcggactgaggaaggcgcacgaagccctcgaccgcgcagtgatgaggctctacggcttcaagaaggacgtgccggagcctgagatagtcgccaagttgatggagatgtaccgggaactgtcgggtcaatccaccagttcgacgctaaccacaaaatag

SEQ ID NO: 29864 - protein, 168 aa, Unknown
  Obtained from environmental sample
  misc_feature (1)..(168): Xaa is any amino acid
MAIPEVSSERRSYIPMGFLDKKIIAGNTLFTVAGADMYHFGVLSSKVHMAWMRKVCGRLKSDYRYSKDIVYNNFPWPSVTDEQRAKVEELVKGVLDARAQWPGNPLDALYDGSIMPRGLRKAHEALDRAVMRLYGFKKDVPEPEIVAKLMEMYRELSGQSTSSTLTTK

SEQ ID NO: 29865 - DNA, 483 bp, Unknown
  Obtained from environmental sample
  misc_feature (1)..(483): n is a, c, g, or t
atgcaaagcagaacctgttcatttcacaaaaagataataatttcaaagagcacaggttttgaagtttgcagtttgtgttggaatgttgaagacactttgcatatagttgaagagcattactcgccctctgttagaaacgagctgagaaagaccggcagggaaccaaaagcggaaactttgcacaacccgcattgccatgctaaaaaagaaggaattctattttccattgtttatcccgaaaacggcgcaaggctttttttacccagcagtgatgctttaagcgaaatgggttttatagccattgctgcgcacaagcaacgtaatgccgaactgcaatggtttttagatggaacattcctaggtgtgacaaaatccgagcataaaatggcggtgagggttggtagcggcgagcaccgcattggagttcaagatacgcttgggatttatttggaaactaggtttagggtacgagcgaagatatag

SEQ ID NO: 29866 - protein, 160 aa, Unknown
  Obtained from environmental sample
  misc_feature (1)..(160): Xaa is any amino acid
MQSRTCSFHKKIIISKSTGFEVCSLCWNVEDTLHIVEEHYSPSVRNELRKTGREPKAETLHNPHCHAKKEGILFSIVYPENGARLFLPSSDALSEMGFIAIAAHKQRNAELQWFLDGTFLGVTKSEHKMAVRVGSGEHRIGVQDTLGIYLETRFRVRAKI

SEQ ID NO: 29867 - DNA, 633 bp, Unknown
  Obtained from environmental sample
  misc_feature (1)..(633): n is a, c, g, or t
ttgtacgggctgcggcctgtgcgctttcgtttgcgcagcaggcgcaattcaggcgggcaaaaaatgacgtttaactgtatgatagcgggcgtcggaggacagggtaccgtgcttgcttccaagttaatcgccgccgccgccataaagaaaggcttcgatgtccgtaccacggagacaatcggcatggcgcagcgcggcggcagcgtgttcggccatgtccgcgtcggcgaccatgtcggcgaccatgtcggcgaaaatatattttctcccattattccccttggcagggccgacgcgctaatcggctttgagtctgctgaaacagtgcgccaactcccctttcttcgcaatgacggctctgtaattgtttataacagcggaaacatggacatgctccaatacttaaaggaaaatgtacaaaaacttgttgtcattgaagcgcagcgcatggcggcgcatagcgtaaaaacattaaacgtgtttcttttgggagccgccattcaaagcggcatactgccgtttgacgcggaaacattaaaagctgttttaacggaaatgctgcctgagcgttttcttgaaatgaatttaaaatcgtttgaagggggattgcatggacacactggacaaaattaa

SEQ ID NO: 29868 - protein, 210 aa, Unknown
  Obtained from environmental sample
  DOMAIN (32)...(204): Pyruvate ferredoxin/flavodoxin oxidoreductase
  misc_feature (1)..(210): Xaa is any amino acid
MYGLRPVRFRLRSRRNSGGQKMTFNCMIAGVGGQGTVLASKLIAAAAIKKGFDVRTTETIGMAQRGGSVFGHVRVGDHVGDHVGENIFSPIIPLGRADALIGFESAETVRQLPFLRNDGSVIVYNSGNMDMLQYLKENVQKLVVIEAQRMAAHSVKTLNVFLLGAAIQSGILPFDAETLKAVLTEMLPERFLEMNLKSFEGGLHGHTGQN

SEQ ID NO: 29869 - DNA, 438 bp, Unknown
  Obtained from environmental sample
  misc_feature (1)..(438): n is a, c, g, or t
gtggttgtgctggataactcaacaacggcaatgacgggaaaccagccgcatccgggaaccggcgttacaatgatgcacacccaaacagaaaaaatggacattgaaaaaatcgttacagcgttaaacatttccggcgtagtaagggtaaatccctttgatcaaaaagcggctaaagacgctattcgctccttgatagaacaaaaaggagtccgcgtacttttatttgaagcgccctgcgttgttgtttcaaagcctgttgggaaatcaacggtaaacgccgacaagtgtacaggctgtcagctctgcataaaaaaattaggctgtccagctttaggctttgagaacaacaaagctcttatcaactccagtctttgtacgggctgcggcctgtgcgctttcgtttgcgcagcaggcgcaattcaggcgggcaaaaaatga

SEQ ID NO: 29870 - protein, 145 aa, Unknown
  Obtained from environmental sample
  DOMAIN (118)...(141): 4Fe-4S binding domain
  misc_feature (1)..(145): Xaa is any amino acid
MVVLDNSTTAMTGNQPHPGTGVTMMHTQTEKMDIEKIVTALNISGVVRVNPFDQKAAKDAIRSLIEQKGVRVLLFEAPCVVVSKPVGKSTVNADKCTGCQLCIKKLGCPALGFENNKALINSSLCTGCGLCAFVCAAGAIQAGKK

SEQ ID NO: 29871 - DNA, 1497 bp, Unknown
  Obtained from environmental sample
  misc_feature (1)..(1497): n is a, c, g, or t
ttgaactactacggccagctcggcctcggcaatacagtaaacaggtacacccccacccgcgtgggcacgctagcctactgggcggccgtgtcggcgggcgtcgaccacaccctggccctcaagaccgacggcagtctctgggcgtgtggacgaaacaataagggccagctcggcctcggcgacagcgacttcaatgcacaccccacccccacccgcgtgggtcagggcgccaactggacggcagtgtcggctaactttgaacacgcactcgccctcagggccgacggcagcctctgggcgtggggaaacggcccactcggtcagctcggccttggtgccaccaacggatacaggaacacccccacacgcgtgggcacggacgccgactgggcgaccgtgtcggcgggcggcagccacaccctggccctcaagaccgacggcagcctctgggcgtgggggcacaacggctacggcctgctcggcatcggcaccagcgactacaatgcacaccatacacccacccgcgtgggcacggatgccaactgggcggccgtgtcggctggctacatccacaccctcgccctcagggccgacggcagtctctgggcgtgggggagcaactattacggccagctcggcgatggcacaaatacaggccggaacgcccccgcccaagtgggcgcggacaatgactgggcatccgtatcggcaggcgatcggtacacgatggccctcaagactgacggcagcctgtgggcatggggaaataatgaagatggtcagctcggtgatggcaccacgacaaaacgcagcgtccccacccgcgtaggtacggcgaatgactgggcggcagtgtcgactggcccttctcactcacttgccctcaagaaagatggcacgctctgggcatggggatcgaataaatacggccagctcggcgacgggacaactacaaacagaacctcccccgtccgtgtgggcacggacaatgactgggcggcagtgtcggagggtaacagacacacgatagccatcaagaccgatggcaccctctgggcatggggaagtaatgattgcggccagctcggcgatggcacaaatacagatcggtacgcccctgtccgtgtgggcgcggacaatgattgggcggccgtgtcggcgggtgtcctccactcgttcgccatcaagtccgatggcagcctctgggcgtggggatggaatcaatatggcaagctcggcgatggcacagatacagatcggaacacccccgttagggtagtcagggtgagcgccgcccccgttaatgactgctgggtggcgatatcggcatcggtgcacgcgcttgccattaaggcagacggtagcctatgggcatggggagcaaatggttatggcggtgcgctcggaatcgactcaagccgcgccgagagtaatcgcgcgacacccgatcttgtaggtcaggggaggtggtacggcaattggaacaactggtattga

SEQ ID NO: 29872 - protein, 498 aa, Unknown
  Obtained from environmental sample
  DOMAIN (348)...(395): Regulator of chromosome condensation (RCC1)
  misc_feature (1)..(498): Xaa is any amino acid
MNYYGQLGLGNTVNRYTPTRVGTLAYWAAVSAGVDHTLALKTDGSLWACGRNNKGQLGLGDSDFNAHPTPTRVGQGANWTAVSANFEHALALRADGSLWAWGNGPLGQLGLGATNGYRNTPTRVGTDADWATVSAGGSHTLALKTDGSLWAWGHNGYGLLGIGTSDYNAHHTPTRVGTDANWAAVSAGYIHTLALRADGSLWAWGSNYYGQLGDGTNTGRNAPAQVGADNDWASVSAGDRYTMALKTDGSLWAWGNNEDGQLGDGTTTKRSVPTRVGTANDWAAVSTGPSHSLALKKDGTLWAWGSNKYGQLGDGTTTNRTSPVRVGTDNDWAAVSEGNRHTIAIKTDGTLWAWGSNDCGQLGDGTNTDRYAPVRVGADNDWAAVSAGVLHSFAIKSDGSLWAWGWNQYGKLGDGTDTDRNTPVRVVRVSAAPVNDCWVAISASVHALAIKADGSLWAWGANGYGGALGIDSSRAESNRATPDLVGQGRWYGNWNNWY

SEQ ID NO: 29873 - DNA, 684 bp, Unknown
  Obtained from environmental sample
  misc_feature (1)..(684): n is a, c, g, or t
gtggacgaaacaataagggccagctcggcctcggcgacagcgacttcaatgcacaccccacccccacccgcgtgggtcagggcgccaactggacggcagtgtcggctaactttgaacacgcactcgccctcagggccgacggcagcctctgggcgtggggaaacggcccactcggtcagctcggccttggtgccaccaacggatacaggaacacccccacacgcgtgggcacggacgccgactgggcgaccgtgtcggcgggcggcagccacaccctggccctcaagaccgacggcagcctctgggcgtgggggcacaacggctacggcctgctcggcatcggcaccagcgactacaatgcacaccatacacccacccgcgtgggcacggatgccaactgggcggccgtgtcggctggctacatccacaccctcgccctcagggccgacggcagtctctgggcgtgggggagcaactattacggccagctcggcgatggcacaaatacaggccggaacgcccccgcccaagtgggcgcggacaatgactgggcatccgtatcggcaggcgatcggtacacgatggccctcaagactgacggcagcctgtgggcatggggaaataatgaagatggtcagctcggtgatggcaccacgacaaaacgcagcgtccccacccgcgtag

SEQ ID NO: 29874 - protein, 227 aa, Unknown
  Obtained from environmental sample
  misc_feature (1)..(227): Xaa is any amino acid
MDETIRASSASATATSMHTPPPPAWVRAPTGRQCRLTLNTHSPSGPTAASGRGETAHSVSSALVPPTDTGTPPHAWARTPTGRPCRRAAATPWPSRPTAASGRGGTTATACSASAPATTMHTIHPPAWARMPTGRPCRLATSTPSPSGPTAVSGRGGATITASSAMAQIQAGTPPPKWARTMTGHPYRQAIGTRWPSRLTAACGHGEIMKMVSSVMAPRQNAASPPA

SEQ ID NO: 29875 - DNA, 1194 bp, Unknown
  Obtained from environmental sample
  misc_feature (1)..(1194): n is a, c, g, or t
gtgagcgtttccatagacctgaggaaaggcgtacagggcggcgaaaaggggatattaagctgggacatacagtttcccgaagacgcccaaagcgccgttatggaactgctgactcttgacgggaaactcttggcagccgaagacctgaaggcccagccgaaaggcgaaatggcgcttaacgtgggtaattaccttgtcaccctaacccttgacggaaggcagtccagaaccgaagcgctgtatattaacggcagcatgaccagccgcatagagcggggtttattcagagttccagcctttaacagcgtaagcgaactggctgattttttaagcagtttccccgccaataccgcagacagcccttgcgatattatcctgtacggtttgaatgtagaaactgactttgttcagagcggtgactcgctgggcaaactgttcggcgcattaaagggaaaatatgtaaaccttgatatgggcgcctgttcaggacaagttataccaaatacagagtttcctcattataacaacaggcctgatattgggaaaattaccgctcttaagctgccgtctgagctaaccagcatcggggctaatgcttttactcgctgtagcgggcttaccggcatcaccatacccgacagcgtgaccagcatcggggcttatgcttttattcgcagcgggcttaccagcgtcaccatagggaacagcgtgaccagcatcggggcttatgctttttcctattgcagcgggcttaccgggcccccttatcatacccgacagcgtgaccagcatcggggattatgcttttactattgcagagggcttaccggcccccttaccatacccaacagcgtgaccagcatcgggagggatgcttttcactactgcagcgggataaccagcgtgaccatagggaacagcgtgaccagcatcgggtttggggctttttccggctgcagcaggcttaccagcgtcaccatacccaacagcgtgaccagcatcgggtatagggcttttgaaggctgcaacgggcttaccagcgtcacctttggcggcgctattcctgcgtctgatttttcaacggacagtccattccccggagatttgcgggcaaagtattttgccgcaggcggagggccgggaacctttacaacggcaaatccgggggataatccggtgtgggtgaaacaatga

SEQ ID NO: 29876 - protein, 397 aa, Unknown
  Obtained from environmental sample
  misc_feature (1)..(397): Xaa is any amino acid
MSVSIDLRKGVQGGEKGILSWDIQFPEDAQSAVMELLTLDGKLLAAEDLKAQPKGEMALNVGNYLVTLTLDGRQSRTEALYINGSMTSRIERGLFRVPAFNSVSELADFLSSFPANTADSPCDIILYGLNVETDFVQSGDSLGKLFGALKGKYVNLDMGACSGQVIPNTEFPHYNNRPDIGKITALKLPSELTSIGANAFTRCSGLTGITIPDSVTSIGAYAFIRSGLTSVTIGNSVTSIGAYAFSYCSGLTGPPYHTRQRDQHRGLCFYYCRGLTGPLTIPNSVTSIGRDAFHYCSGITSVTIGNSVTSIGFGAFSGCSRLTSVTIPNSVTSIGYRAFEGCNGLTSVTFGGAIPASDFSTDSPFPGDLRAKYFAAGGGPGTFTTANPGDNPVWVKQ

SEQ ID NO: 29877 - DNA, 345 bp, Unknown
  Obtained from environmental sample
  misc_feature (1)..(345): n is a, c, g, or t
ttgcgtctattaagtacggcggttgaaaaaaagttccacgcccctgctgccctgggggttatgttttacgatgccgctttccactttatgcgtcccgctgtttatgtccgctctgtcgatacgatggtttttgaatccagctgcggttccggctccgcagctttggggatatggttatgccgggaaatagcagatggcacagcatattacgccatagcccaggacggtggcgttatagaaacagaagttgtaaaaaaggcaggacaggttgttaaagtaacgattgggggggaagtgaggcttggagaggaggaattgcttataaaccctgatttatacaaatga

SEQ ID NO: 29878 - protein, 114 aa, Unknown
  Obtained from environmental sample
  misc_feature (1)..(114): Xaa is any amino acid
MRLLSTAVEKKFHAPAALGVMFYDAAFHFMRPAVYVRSVDTMVFESSCGSGSAALGIWLCREIADGTAYYAIAQDGGVIETEVVKKAGQVVKVTIGGEVRLGEEELLINPDLYK

SEQ ID NO: 29879 - DNA, 981 bp, Unknown
  Obtained from environmental sample
  misc_feature (1)..(981): n is a, c, g, or t
atgtacttaccaagcaagcacccggttattagggctttttcggatattaaagtaaacgagccccgtatatccaaatttgtagttttcctcgccaaattgttagccaggttgtatctttttctttttcttggcgtggccaggacggttttacagggagaaaaacacctgtttaaggcgtttgagcgggcattgtccggaaaaagccgttgtataattgccttccgccatccaaacggcggagaaccccaattgttgtcctggtttttccttttcaagcttagaaaaatcgcgtcaaaagcgggcgtcaaattcgcgcgctggccccatgccgtatttgtgtacggctacgaagtagtccgctggggcggttgggtagcgaggttcatcatgcccaatatgggtgccatgcctattcatcatgccaaaatggacagcaggggaatggccagaattttcaccgccatcgccaacggcccgtatccggtcgcgctggcccccgagggccaggtctcttatacagccgacgctgttccaaggctggaaccaggtgttatccgcattggtttccaggcggccaagcagctcgcggcaaaaggtttggattgccctttggaaatttttcccatatcggtacatttccgtttcgggtcctggggcaactttacgctcgaattgctcctaaaaagaattgaaaagctttgcggactttccggcgcagacaggaagaaaatgcttttcaccgaaagggtaaagcaatgcanggatcacattcttaaggttatcgagaaacgctaccaaataacatcagattccgttgcttccgcatcctttgaggaacgtcttgacagggtaattaacatagccctggagacttcggagcggatgttgggtgaaaagggcgagggagattttttcgccagaatgtataaggtgcgccagatctgctnggatcgtattttccttcccgaggtgacattttag

SEQ ID NO: 29880 - protein, 326 aa, Unknown
  Obtained from environmental sample
  misc_feature (1)..(326): Xaa is any amino acid
MYLPSKHPVIRAFSDIKVNEPRISKFVVFLAKLLARLYLFLFLGVARTVLQGEKHLFKAFERALSGKSRCIIAFRHPNGGEPQLLSWFFLFKLRKIASKAGVKFARWPHAVFVYGYEVVRWGGWVARFIMPNMGAMPIHHAKMDSRGMARIFTAIANGPYPVALAPEGQVSYTADAVPRLEPGVIRIGFQAAKQLAAKGLDCPLEIFPISVHFRFGSWGNFTLELLLKRIEKLCGLSGADRKKMLFTERVKQCXDHILKVIEKRYQITSDSVASASFEERLDRVINIALETSERMLGEKGEGDFFARMYKVRQICXDRIFLPEVTF

SEQ ID NO: 29881 - DNA, 699 bp, Unknown
  Obtained from environmental sample
  misc_feature (1)..(699): n is a, c, g, or t
atgtcccgcgacgttaaaacaaaactgaacagttcaggcgatattgaattatttgaatacagagggaaaaaagccgcccttcttgaattggctttttcgctccagggggcaggccgcatgtcaggctgggcgctctgcatggaactcgcgcagccaaaccaaacgtccgcgaataacgcttcatcttcaaaccccctgcttttggcaatggcctatggccctgctggaaaacagggacttgaggttctgcatttatcagccctcgattcaatcgccccggaatgggcggataaacttgcccccggccccattaccgagtatagctacccaagggaaaaccgcgtcaagacttcgatttttgggcttgattgtgaagcctggatttttgaggaagacgccgaagccgcccaggcccttatcgacagggagtttcaggttctgcgccgttttcaaaattctcctgactggaaagaagcgtggataaggttttaccgcgccatttaccgcgactcttttgaaagacttgtagacattgcctttcagttagagcgaaaacttaacgtccctccgctggaagaccgggactttgccaatcaggcgctaaagtgggttcaatcatttgaatacgagcgggatttatttttcagcgattttatcaacctcgtcagcgccgccgtgaaggcagctcggccaatctga

SEQ ID NO: 29882 - protein, 232 aa, Unknown
  Obtained from environmental sample
  misc_feature (1)..(232): Xaa is any amino acid
MSRDVKTKLNSSGDIELFEYRGKKAALLELAFSLQGAGRMSGWALCMELAQPNQTSANNASSSNPLLLAMAYGPAGKQGLEVLHLSALDSIAPEWADKLAPGPITEYSYPRENRVKTSIFGLDCEAWIFEEDAEAAQALIDREFQVLRRFQNSPDWKEAWIRFYRAIYRDSFERLVDIAFQLERKLNVPPLEDRDFANQALKWVQSFEYERDLFFSDFINLVSAAVKAARPI

SEQ ID NO: 29883 - DNA, 825 bp, Unknown
  Obtained from environmental sample
  misc_feature (1)..(825): n is a, c, g, or t
atgacagatcggcacgaggaccaccgaaaactcaccatctggtttaacgaagacattcatgacctgaaggcggatgacatcaaattaaacgcgccttttgttatactaaaacacgattttaccaggaaacatccggcggtctatgagcttggcataacgccgggagctgccggtgcggttaaagtgggccttgatccgtataacccggcaggctggaaatggaaagcgataaccgtcaacgtgtctgctgttttccattttatgggaacatcgtccgcaaccgttgcgcttaccggttataacggagaagggggcgaactggaaataccggaacagatagaaggaatgtatgtcaccgctgtcacaaacagtgcgttctataataaatccctgacaggtattaccattcctgacagcgtcgtttccatcgggcctcatgcattcgcgaacaaccggttaaccgacgttgccatttccgagaatgttatttctatcggagaaagcgcgttcgagaacaatcagttaacttctgttgatattcctgaaaaaatcgaaaccatagagtatggcctgtttttatataatctgctgggcagcgtgacgattccaggcaatgtcacttccattggggactatgcctttgcctacaaccaactggtgagtgcggacatccccggcagcgtcattaacatcggggacaggtcctttttcttcaatatgcttcccggtgttacgttttcagacggtcttgaatccatagggaactacgcgtttgcgtataacaggctggagaccgtaaggcttcccgacagcttaaaatcataa

SEQ ID NO: 29884 - protein, 274 aa, Unknown
  Obtained from environmental sample
  misc_feature (1)..(274): Xaa is any amino acid
MTDRHEDHRKLTIWFNEDIHDLKADDIKLNAPFVILKHDFTRKHPAVYELGITPGAAGAVKVGLDPYNPAGWKWKAITVNVSAVFHFMGTSSATVALTGYNGEGGELEIPEQIEGMYVTAVTNSAFYNKSLTGITIPDSVVSIGPHAFANNRLTDVAISENVISIGESAFENNQLTSVDIPEKIETIEYGLFLYNLLGSVTIPGNVTSIGDYAFAYNQLVSADIPGSVINIGDRSFFFNMLPGVTFSDGLESIGNYAFAYNRLETVRLPDSLKS

SEQ ID NO: 29885 - DNA, 798 bp, Unknown
  Obtained from environmental sample
  misc_feature (1)..(798): n is a, c, g, or t
atgggcttgcttgctccaatgcttttgttttttttggtgattggaattattgggaatttatctcaggtgggtttgcattttacgctggaaaaattgcaaccaaaattatcaaatgttttttccttatctgggttaaagcaaatgtttgggaaaaatgcatggattgagcttttaaagggtttgattaaaataaccatagtgggaataattgcttatactgtgataaaaaagcattacgacgatgttttatacatggcagatatgcaaataggggttttctgtgcttatatgatagatattctggttgaaatgcttttgaagatactggtgtttttaataatatttggagctgcggatttaatttatcaaaaaagaaaaactttcaacgaaatgaaaatgactaagaacgaggttaaagatgaacacaaaaattccgaaggcgacccaaaagttatagcagctcgcaaacgcgccatgtatcaaatgcaccagcggtttatgatgaaagaagttcctagtgcaactgtggttataaccaaccccactcacttggcaatagccttgcgctacgagcgcggcaaagaccaggttccgcttgttgttgcaaagggtgcagacaaaactgccgagcgaataaaagaaattgcaacagaaaacgacgtgcctatagttgaaaacaaaccgcttgcccgtgctatgtacgatgttgtggaaattggcgatcctttgcctgcggaattcttttcggcagtcgccgaaattttggctcttatattcaggcaaaaagaggcgggataa

SEQ ID NO: 29886 - protein, 265 aa, Unknown
  Obtained from environmental sample
  DOMAIN (1)...(259): FlhB HrpN YscU SpaS Family
  misc_feature (1)..(265): Xaa is any amino acid
MGLLAPMLLFFLVIGIIGNLSQVGLHFTLEKLQPKLSNVFSLSGLKQMFGKNAWIELLKGLIKITIVGIIAYTVIKKHYDDVLYMADMQIGVFCAYMIDILVEMLLKILVFLIIFGAADLIYQKRKTFNEMKMTKNEVKDEHKNSEGDPKVIAARKRAMYQMHQRFMMKEVPSATVVITNPTHLAIALRYERGKDQVPLVVAKGADKTAERIKEIATENDVPIVENKPLARAMYDVVEIGDPLPAEFFSAVAEILALIFRQKEAG

SEQ ID NO: 29887 - DNA, 645 bp, Unknown
  Obtained from environmental sample
  misc_feature (1)..(645): n is a, c, g, or t
atgatagaagcgaaggaagttaatttcttttacggtgattttcatgcattaaagaatatttccttgtgtgctacgaaacacaatgtcactgcgtttatagggccttctggttgcggcaaatcaactttcttgcgccttttgaaccgcatgaacgatttgattccagacactaaattaaccgggaaatgccttgtaaatggagaagacatctatagcaagagtactaatgttgacgaattgcgaaaaaaggttggcatggttttccagaagccaaatcctttcccaaaaactatttttgagaacgttgcgtacggtttgcgcgtaaatggaataaaagataaaaagtttatacaagagcgggttgaggaatcactggtaggtgccgccttatgggaagaggtaaaagacaaattgagtaaatccgcttatgacttgtctggagggcagcagcagaggctttgcatcgctcgtgctttggccattaaaccggatattttgctgatggatgagccagcgtccgctctagacccaatttctacttctaaaattgaggatttgatttataaccttaaaactaaatacaccataataatagtcactcacaatatgcaacaagcggcgagagtgagcgtgggatcctcctga

SEQ ID NO: 29888 - protein, 214 aa, Unknown
  Obtained from environmental sample
  DOMAIN (27)...(212): ABC transporter
  misc_feature (1)..(214): Xaa is any amino acid
MIEAKEVNFFYGDFHALKNISLCATKHNVTAFIGPSGCGKSTFLRLLNRMNDLIPDTKLTGKCLVNGEDIYSKSTNVDELRKKVGMVFQKPNPFPKTIFENVAYGLRVNGIKDKKFIQERVEESLVGAALWEEVKDKLSKSAYDLSGGQQQRLCIARALAIKPDILLMDEPASALDPISTSKIEDLIYNLKTKYTIIIVTHNMQQAARVSVGSS

SEQ ID NO: 29889 - DNA, 1287 bp, Unknown
  Obtained from environmental sample
  misc_feature (1)..(1287): n is a, c, g, or t
gtggttgctttggagcctcagccaagagatatgatagatttgcatgccaagatgttcaaaaaacacggtatgacacgcattcgcaattttgatgccttgaacgatgtgaataatcttatatattcggggcagtgcataaccgatgcgggcttggagcacgaggttgttgtaactatgatggaactgccacgccactgtgagggcaagggtgcgcacgaacctgaattttacattgaaacactgaaaaagattttggattccggcgttccttttgtgagcgtatgctttaaagatgcaagcggcacggcaaatccacgcaaggttcacgaaacctttaaacaggcacgcaaacttcttggcgacaaagtggaacttcgcatacattcccacgatacctgcggaacaggcattgcccaatatgtggctgccattgaaggcggcgcagacggcgtttgctgcggcagagcacctctcagcggtggaacagcacaacctgatttgctttctctttggcacgctttaaaaggcacagactacactttggatattaatgttgaaaaaattatggaagcaaatcaagtgagcaaggaatgtttcaaagaatacgactttccacccgaagctctagctattgaacctgaagttattttcagcccaatgccgggcggtgccttaacagcaaacaccttgatgatgcgcgaaaccaaaacattccacctttacccgcaagtgattaaaaatatggcagagtgcgtggctcgcggtggatttggttcaagcgttacccctgtttctcagttctatttccagcaggcttatgcaaacacagttcaaggcccttggaaaaaaataacagatggctatggcaatatggttcttggctatcttggcaaaacacccagagacccagatccggaaatagtgaaaattgcaagcgaacagatgaaaaaacctgtgttcaccggaaatcccttggatgttttggagccaggcattccaaaagcgaaaaaagttttagaagataaccatctgcccgtaaccgatgaaaatattttcataattggcgcaatggcaacaaaaggcggcaacaagggcttggatttcttgcaaggaaaagcgagagttagcgttcccaaaaagaaacctgctgctccagcggccgccgcacctgctgctgcgccagctgcaactgctgcatccccactagtttttgcgcccattagcggcaccgtcaattatggtgttactgttagcggaaaaacattcaatgtgcaggttagcgggtaa

SEQ ID NO: 29890 - protein, 428 aa, Unknown
  Obtained from environmental sample
  DOMAIN (5)...(201): HMGL-like
  misc_feature (1)..(428): Xaa is any amino acid
MVALEPQPRDMIDLHAKMFKKHGMTRIRNFDALNDVNNLIYSGQCITDAGLEHEVVVTMMELPRHCEGKGAHEPEFYIETLKKILDSGVPFVSVCFKDASGTANPRKVHETFKQARKLLGDKVELRIHSHDTCGTGIAQYVAAIEGGADGVCCGRAPLSGGTAQPDLLSLWHALKGTDYTLDINVEKIMEANQVSKECFKEYDFPPEALAIEPEVIFSPMPGGALTANTLMMRETKTFHLYPQVIKNMAECVARGGFGSSVTPVSQFYFQQAYANTVQGPWKKITDGYGNMVLGYLGKTPRDPDPEIVKIASEQMKKPVFTGNPLDVLEPGIPKAKKVLEDNHLPVTDENIFIIGAMATKGGNKGLDFLQGKARVSVPKKKPAAPAAAAPAAAPAATAASPLVFAPISGTVNYGVTVSGKTFNVQVSG

SEQ ID NO: 29891 - DNA, 348 bp, Unknown
  Obtained from environmental sample
  misc_feature (1)..(348): n is a, c, g, or t
ttgaaaggcattcttttagctggaggtgcgggttctagactttaccctttgagcgcagttgcgagcaagcaactgcaacccgtgtacgataaaccaattatttattaccctctttccacgcttatgctcggtgggataagggatattttgctgataagcacacccgttgatttgccgcgctttgaaagcttgcttggcaacggaaaccaatggggtttaaacattcaatatgccgctcaaccgcgtccagaaggtatagcgcaggcttttttgatagcagaagattttattaaagaccaaacttgcacattgattttaggcgataatattttttatgggggcttttga

SEQ ID NO: 29892 - protein, 115 aa, Unknown
  Obtained from environmental sample
  SIGNAL (1)...(21)
  DOMAIN (2)...(115): Nucleotidyl transferase
  misc_feature (1)..(115): Xaa is any amino acid
MKGILLAGGAGSRLYPLSAVASKQLQPVYDKPIIYYPLSTLMLGGIRDILLISTPVDLPRFESLLGNGNQWGLNIQYAAQPRPEGIAQAFLIAEDFIKDQTCTLILGDNIFYGGF

SEQ ID NO: 29893 - DNA, 585 bp, Unknown
  Obtained from environmental sample
  misc_feature (1)..(585): n is a, c, g, or t
atgaatttcaacatattaatcgcaggtgttggcgggcagggcacactccttgcgagcaaaatttttggcaactatgcacagttgataggcaaagactgcaaagtatccgaagtgcatggaatggctcaacgcggcggcagcgttgtgacttatgttagaatagcagacaaagtttatagccccttgtttgataaaaagcaagccgatgttgtgctggcttttgaggaacttgaagccttgcgttctgctgaatatgttaaagacgatggaattataattgtcaataagcagaatatatatccaatgccgtgcgctttgggtatggctgaatatcctagcgagatttatgagcagttggcaggctgtaaggcagcgattcacaaaatagatgcgattagcattgctactaaattgaataacattcgcacggttaatatcgctatgctcggtttttgtgctgcggtgttggggtttgagaaagatgtttttgcggatgcgataaagagaagcgtgggtggggatacgttggaggttaatctaaaggcgtttgaggggggatgggctgtaaaatcaataagcctttaa

SEQ ID NO: 29894 - protein, 194 aa, Unknown
  Obtained from environmental sample
  DOMAIN (11)...(188): Pyruvate ferredoxin/flavodoxin oxidoreductase
  misc_feature (1)..(194): Xaa is any amino acid
MNFNILIAGVGGQGTLLASKIFGNYAQLIGKDCKVSEVHGMAQRGGSVVTYVRIADKVYSPLFDKKQADVVLAFEELEALRSAEYVKDDGIIIVNKQNIYPMPCALGMAEYPSEIYEQLAGCKAAIHKIDAISIATKLNNIRTVNIAMLGFCAAVLGFEKDVFADAIKRSVGGDTLEVNLKAFEGGWAVKSISL

SEQ ID NO: 29895 - DNA, 345 bp, Unknown
  Obtained from environmental sample
  misc_feature (1)..(345): n is a, c, g, or t
ttggcaaaacctttttctcttgccgaccttgaataccgtttcagaagtatactccagccaaggctcatgcgctttgacgaggccagggacgtccttttggaaaatatgcacgaaaagacagccgagctcaggcgcaggctggacttggcaaggacaggccttgaagccgccagccccctttccgctttgcagaagggttactcggtggtaatgccgcttcgcggcggaaagcttcaaacgcccatacgcagggcggaggatgtgaagccaggcgaaactttggttatccggccccttgagggactaattactgctgttgcggaaaaaattaacagcacgaaataa

SEQ ID NO: 29896 - protein, 114 aa, Unknown
  Obtained from environmental sample
  misc_feature (1)..(114): Xaa is any amino acid
MAKPFSLADLEYRFRSILQPRLMRFDEARDVLLENMHEKTAELRRRLDLARTGLEAASPLSALQKGYSVVMPLRGGKLQTPIRRAEDVKPGETLVIRPLEGLITAVAEKINSTK

SEQ ID NO: 29897 - DNA, 1356 bp, Unknown
  Obtained from environmental sample
  misc_feature (1)..(1356): n is a, c, g, or t
atgaaaaacacggcgaaacttctactcgcttccctggcactcggggcagcggtctcctgcgggagcggcaaatggggcgaaagttggggctgggagggcgggagcagcaacgccgccaaccagggcggaatcaaggcaccgcttccgccagtccgcgaccaggatccattcgggacgtgctggagcttctcagcgctggcgtcaatcgagtccaacctgatgaagtccaacccgaacgccaacaaagacctgtccgagtggcacctagcttggttcgcttacaacccgctcaatggtatgcctgccttcacaaaaaatgctcctggctatggcgaggacagcacatttgaccaaggcggcaacgccacaaaggcaatcgccatactgtcacgcggcacggggccggtggacgaggcatccgccccgtaccagaatacaagaaactacccccaaagtaccattcccaccgggaacgagccaagggttctgggcctcaaagatgtctttcgctatgactcccttgcaaaggaagacgtcaagtacatggtgcagacctacggcgccctcaccatgtcaatgtactgggacgatgaccgctacagcgacgcanacaaggctttcagatacgtgcagggcggcgataaaatcagcaccaaccacgccgtgaacatagtcggctgggacgacgattttgccagggccaatttcccgtctggcaaccagccagccgcaaacggcgcctggattgtccgcaacagttgggggccaagctggggggacggcggatatttctacgtctcttatgacaccaagctgggggatttcacgatttttgaggccgacgatgaagttggccaaaaagtctatcagtacgacatgcacggaagggtctataacattaccggttccttagagcatgagataggaaaggggtgggtaccccaggattattgctacatggccaatatttttcaggccgatggctatgaaacgataacggacgtggctttttatacgcataccaagaacgccccttacacgataaccatcaaaaccggcatcaatggcaaagatatcaacaccggcacctgggcatatataccttggtgggttgacaggcacgtcagcgacgcgaggtacccgggacaaatactatttccgtacagacccaagtattattataatagcggttacgcaaattatgaaacggcggaattgcccggatatcacaaggttaagttaaaaacgccagtcagcgtcaatcccggcgaaaatttcgctgtgataatccacacgtgggaaaaagagctatctttatcctgccgccgccggcggcattttgcctggatattctga

SEQ ID NO: 29898 - protein, 451 aa, Unknown
  Obtained from environmental sample
  SIGNAL (1)...(21)
  DOMAIN (45)...(280): Papain family cysteine protease
  misc_feature (1)..(451): Xaa is any amino acid
MKNTAKLLLASLALGAAVSCGSGKWGESWGWEGGSSNAANQGGIKAPLPPVRDQDPFGTCWSFSALASIESNLMKSNPNANKDLSEWHLAWFAYNPLNGMPAFTKNAPGYGEDSTFDQGGNATKAIAILSRGTGPVDEASAPYQNTRNYPQSTIPTGNEPRVLGLKDVFRYDSLAKEDVKYMVQTYGALTMSMYWDDDRYSDAXKAFRYVQGGDKISTNHAVNIVGWDDDFARANFPSGNQPAANGAWIVRNSWGPSWGDGGYFYVSYDTKLGDFTIFEADDEVGQKVYQYDMHGRVYNITGSLEHEIGKGWVPQDYCYMANIFQADGYETITDVAFYTHTKNAPYTITIKTGINGKDINTGTWAYIPWWVDRHVSDARYPGQILFPYRPKYYYNSGYANYETAELPGYHKVKLKTPVSVNPGENFAVIIHTWEKELSLSCRRRRHFAWIF

SEQ ID NO: 29899 - DNA, 474 bp, Unknown
  Obtained from environmental sample
  misc_feature (1)..(474): n is a, c, g, or t
atgaaggtaagacgtgaagtcagggaggcctgcgccgcagacaaatgcggagcttacgggaaaagctggtcgtgcccgccggcctgcgggactcttgatgaatgtgaaaagcgcctggcaggataccaatccggccttatcctgcaaaccaccggcaataccgaagattcttttgattttgaatccatgacccgcataggggaagagcataacggccatttgtatttattccaggaaaagctgaattcctttttttcaggggataaatcatggctgcttttgggaagcggccgctgtaaaatctgcgatcaatgttcatacccggaatcactttgtaattaccctgagaaaatgatcgtcccggtggaggcgatgggcatagttgtaagcgatctttgcgaggccaataatgccccctactattggggcccgggaacccttacatatacaggctgcgtccttcttcgcggttaa

SEQ ID NO: 29900 - protein, 157 aa, Unknown
  Obtained from environmental sample
  misc_feature (1)..(157): Xaa is any amino acid
MKVRREVREACAADKCGAYGKSWSCPPACGTLDECEKRLAGYQSGLILQTTGNTEDSFDFESMTRIGEEHNGHLYLFQEKLNSFFSGDKSWLLLGSGRCKICDQCSYPESLCNYPEKMIVPVEAMGIVVSDLCEANNAPYYWGPGTLTYTGCVLLRG

SEQ ID NO: 29901 - DNA, 861 bp, Unknown
  Obtained from environmental sample
  misc_feature (1)..(861): n is a, c, g, or t
atggccgagaatatctccggctggcttctcatgctgccgtcgcttatcctgtttgtcttttttgtttgggaacccctgttcgaaagcgtgcggctctccctgtaccgcgccaacgggatacgtttaatccagtttgccggatttcaaaattacgtcagcgtgtttcagcatcccgatttcctgccggccttgcggaatactttcagctataccgcatggtcgctggttatcggttttgtcattcccataatactggcggtgatcattaacgaaatcagggccggcaagtcctttgttaaaaccagcgtgtacattcccaatgtggttcccggcatggcaatggtgctgctctggggttttattttcaggcccggagagacgggtattctaaatattcttttaagcaaatcaggcattggcccccagccctggctgaccaatccccagtggactatcccgttaatcgtcatcaccctgacatggaaaggggcgggcgcgacaacccttttgtatatcgccgggctgcaggggattgattccgaattgtacgaggcggcgatcattgacggcgccggtatatttaagcggttccggtatataactttgccctgcatttacaaccttgcccgcacattgctgatcctgcaggtaattgccgtattccaaattctctacgaacccctggtgttgactaacggggggccgaacaatgcttccatttccattatgcagctggtattcaaattcgcttttgaacgattcgattatccgcgggccgcggcagtttcggtaatcatcagctttattcttattgcccttacgctggtgtatttcaaaatcagcaaacggcaggacgcataa

SEQ ID NO: 29902 - protein, 286 aa, Unknown
  Obtained from environmental sample
  DOMAIN (60)...(286): Binding-protein-dependent transport system inner membrane component
  misc_feature (1)..(286): Xaa is any amino acid
MAENISGWLLMLPSLILFVFFVWEPLFESVRLSLYRANGIRLIQFAGFQNYVSVFQHPDFLPALRNTFSYTAWSLVIGFVIPIILAVIINEIRAGKSFVKTSVYIPNVVPGMAMVLLWGFIFRPGETGILNILLSKSGIGPQPWLTNPQWTIPLIVITLTWKGAGATTLLYIAGLQGIDSELYEAAIIDGAGIFKRFRYITLPCIYNLARTLLILQVIAVFQILYEPLVLTNGGPNNASISIMQLVFKFAFERFDYPRAAAVSVIISFILIALTLVYFKISKRQDA

SEQ ID NO: 29903 - DNA, 507 bp, Unknown
  Obtained from environmental sample
  misc_feature (1)..(507): n is a, c, g, or t
ttggagaataaggtgacgctctgtgtgcctaaaggcaacccggccggtataatcggctttgccgatttggcggacaaactggcgaataacaatatctatactccccactccccactctccactcccaatattttatttgccatgggaaacagcgacgtgcctgtcgggcagtatacgcagaggattttaaagttttttaatctggatgaaaaagcgctggcaaacagcggcaagatcacatacggcacgaatgtaaaggaagttaccacgcagatcgcggcggccagcgtaagctgcggagtcgtatattgtaccgacgcttacagcgccggacttgaaattgtggattatgcaactgtcgagatgtgcgggcaggttatttaccccgccgcagttatgaaagcaagcaaaaacccggaggtggcaacggccttcctggaatatcttaaaacagacgaagccatggctgtttttgagaaggttggcttcacggcggcatggaggtga

SEQ ID NO: 29904 - protein, 168 aa, Unknown
  Obtained from environmental sample
  misc_feature (1)..(168): Xaa is any amino acid
MENKVTLCVPKGNPAGIIGFADLADKLANNNIYTPHSPLSTPNILFAMGNSDVPVGQYTQRILKFFNLDEKALANSGKITYGTNVKEVTTQIAAASVSCGVVYCTDAYSAGLEIVDYATVEMCGQVIYPAAVMKASKNPEVATAFLEYLKTDEAMAVFEKVGFTAAWR

SEQ ID NO: 29905 - DNA, 480 bp, Unknown
  Obtained from environmental sample
  misc_feature (1)..(480): n is a, c, g, or t
atggaggtgaccttggactggtatcccttatggaactctttacgcatagcggccataagctgtattatcgtttttttcctggggttatgttgcgcttactatatcgcgaagctgccgcgccttgtcaaaggtgttattgatgtaataatgacattgcccctggttttgccgcctacggttatgggttatcttctgctgctgcttctgggagtaaggcggcccttgggcgtttttctgctgcaattcggaatcaaattcgtgatgacctggtacggcgggatattgaccgcagccgtggcggcgtttccctcatgtaccgcacggcgcgaggcgcttttgaaagcttcgatgacacattggcacatgccggtcaaacgctgggacttccgaattcttatattttttgcgtatccgtatgccgtactgccgtcaggggatactggccggagtagtactgggattcgcgcgcgccatgggtga

SEQ ID NO: 29906 - protein, 159 aa, Unknown
  Obtained from environmental sample
  misc_feature (1)..(159): Xaa is any amino acid
MEVTLDWYPLWNSLRIAAISCIIVFFLGLCCAYYIAKLPRLVKGVIDVIMTLPLVLPPTVMGYLLLLLLGVRRPLGVFLLQFGIKFVMTWYGGILTAAVAAFPSCTARREALLKASMTHWHMPVKRWDFRILIFFAYPYAVLPSGDTGRSSTGIRARHG

SEQ ID NO: 29907 - DNA, 600 bp, Unknown
  Obtained from environmental sample
  misc_feature (1)..(600): n is a, c, g, or t
atgctctcggtaaatattcaaaaaaaacttggcgcgttcaggctgaatgtgtcgtttaacgccgctgatggcgtaacggggatccttggcgcgtcaggctgcggcaaaagtatgacgctccgttgtattgccggcattgacaagccggatcaggggcgcataacgcttgacgacgcggtattgttcgacagcgaaaaagggatcaatcttcagccgcagcagcgcaaagttgggtatttgttccagagttacgcgctgttccccaacatgaccgttgaaaaaaatattttatgcggattataccatgagaaggacaaggcggagcgaaagcggatcctggaagacacgattcatctgctgcaactggatggcctggaaaaacgcctgccgtcccagctttcgggcggccagcagcagcgcgcggcccttgcgcggattcttgtaaacaagccccggctgttaatgctggacgagccgtttgcggctctggacagccatttgcgcggccagcttcgaatccagatgaaaaaacttcttgagcaatacggcaactcgacgcttttagtgacgcataacagcgataagctcgtgccgatctga

SEQ ID NO: 29908 - protein, 199 aa, Unknown
  Obtained from environmental sample
  DOMAIN (23)...(199): ABC transporter
  misc_feature (1)..(199): Xaa is any amino acid
MLSVNIQKKLGAFRLNVSFNAADGVTGILGASGCGKSMTLRCIAGIDKPDQGRITLDDAVLFDSEKGINLQPQQRKVGYLFQSYALFPNMTVEKNILCGLYHEKDKAERKRILEDTIHLLQLDGLEKRLPSQLSGGQQQRAALARILVNKPRLLMLDEPFAALDSHLRGQLRIQMKKLLEQYGNSTLLVTHNSDKLVPI

SEQ ID NO: 29909 - DNA, 660 bp, Unknown
  Obtained from environmental sample
  misc_feature (1)..(660): n is a, c, g, or t
atgacaaaaaaaaatgaaagtttgcttgcgaattgtacgagcgggggctgcggcgcgaagatagggccgggggagctttccgctttattgggcaaatttcagacaggcggggacgagcgtctgctggttggttttgactgctctgacgacgcggcggtgtacgctctggacaacggcgcgtcacagggcgacggcgcgtcgcagggcgacgcgatggccatagtatcaaccgttgattttttctcccctatgattgacgatccttttgttttcgggcagattgccgccgccaacgcgttaagcgatatttacgcgatgggggcgacgccgtttttggcgttgaaccttgtttgctttccggaaaaactcccgaagtccatactcgccgatatactcgccggaggggccgataaaatcgccgaggccggcgccgtactgggcggcggccattcgatttacgataaggaggccaaatacggccttgcagttaacggtcttatcgaaataaaaaaccttatccgtaacaacacgccgcgcatagggtacagcctgattctgacaaagcccctgggcgtaggtcttgtcatggcggccgaaagggtaggagcggcaagcgcggacgccatgcaaaaagccgtaaacagnncatgcgcaggctga

SEQ ID NO: 29910 - protein, 219 aa, Unknown
  Obtained from environmental sample
  DOMAIN (13)...(168): AIR synthase related protein, N-terminal domain
  misc_feature (1)..(219): Xaa is any amino acid
MTKKNESLLANCTSGGCGAKIGPGELSALLGKFQTGGDERLLVGFDCSDDAAVYALDNGASQGDGASQGDAMAIVSTVDFFSPMIDDPFVFGQIAAANALSDIYAMGATPFLALNLVCFPEKLPKSILADILAGGADKIAEAGAVLGGGHSIYDKEAKYGLAVNGLIEIKNLIRNNTPRIGYSLILTKPLGVGLVMAAERVGAASADAMQKAVNXXCAG

SEQ ID NO: 29911 - DNA, 579 bp, Unknown
  Obtained from environmental sample
  misc_feature (1)..(579): n is a, c, g, or t
atgctggacgaaccgttttccgccctggacagccatttgcgcggccaactgcgaatccagatgaaacagcttcttgagagttatagcggctcgactctgatggtgacgcataaccgcgatgaagcctacaatttatgccagcggatcgcgctgatggacgcggggacaattttgtcgctgaaagcgacgaaggaactgtttagtaaccccgaatcggttacgggagccgtgataacaggctgtaagaatatttgttcagccagaaagaccggcgagtatgaggttgaagtcccggattggggtatacgccttgtcacgtcacagcccctgcgcgagggcctgtgcgccgttggaatccgcgcccattattttgatcctgaaatcaggaagaaccgttttccggtacgcttcaccggcgagatggaggagccttttgagttttgtctgcaattccgttatgaaaaccaaaaggataacacacaggatattttatggctgttcccgaaagaaaaaaaaagcgccggcgtaccggcaacgcttggcgttaagcctgagaatgttttgccgctgtatgattaa

SEQ ID NO: 29912 - protein, 192 aa, Unknown
  Obtained from environmental sample
  misc_feature (1)..(192): Xaa is any amino acid
MLDEPFSALDSHLRGQLRIQMKQLLESYSGSTLMVTHNRDEAYNLCQRIALMDAGTILSLKATKELFSNPESVTGAVITGCKNICSARKTGEYEVEVPDWGIRLVTSQPLREGLCAVGIRAHYFDPEIRKNRFPVRFTGEMEEPFEFCLQFRYENQKDNTQDILWLFPKEKKSAGVPATLGVKPENVLPLYD

SEQ ID NO: 29913 - DNA, 315 bp, Unknown
  Obtained from environmental sample
  misc_feature (1)..(315): n is a, c, g, or t
ttgcgattgatgcaacccaacctactcattccggctacaacggctctggggacgatcgacgccaccggacgggagcgcgggattcttgccggagccaacgtggtaatgcccaacctgtcgccggtggaggtacgcgataagtacctgctctacgataacaaaatctgcacgggggacgaagcggcggagtgcgtaaactgtatgcggatgcgaatcagaagcatcgggtacgaacttgcagtgtcgcggggggattttgtggaaaggcaatgtacaatgtacaatgtacaatgtacaaataaagtcaacatataa

SEQ ID NO: 29914 - protein, 104 aa, Unknown
  Obtained from environmental sample
  misc_feature (1)..(104): Xaa is any amino acid
MRLMQPNLLIPATTALGTIDATGRERGILAGANVVMPNLSPVEVRDKYLLYDNKICTGDEAAECVNCMRMRIRSIGYELAVSRGDFVERQCTMYNVQCTNKVNI

SEQ ID NO: 29915 - DNA, 462 bp, Unknown
  Obtained from environmental sample
  misc_feature (1)..(462): n is a, c, g, or t
ttggagacttactccgccccgctcttccaagccgccggcatagacaatgtcttcgtccaagacaaccactcccgctctctggaacgaaacgtaattcgcggcctgcactttcagaagccgccctttgagcagagcaaactcgtacgcgtgatccgcggatctatcttcgacgttgcggtggacatccgccgcgattcggctacctacggacagtggcaaggcttcgaactaagcgaacgtaacttcgacatgctcttcatcccccgcggtttcgcgcacggcttctgtacgcttgaggagggcacggaggtcgtctacaaagtggacaacatttattcacgcgaacacgacgccggaattgcgtggaacgatccgtctatcggagttaactggccgcatagcggagttgacccaatattatcagacaaagacaaagcgttaccccccctaaacccctattga

SEQ ID NO: 29916 - protein, 153 aa, Unknown
  Obtained from environmental sample
  DOMAIN (1)...(153): dTDP-4-dehydrorhamnose 3,5-epimerase
  misc_feature (1)..(153): Xaa is any amino acid
METYSAPLFQAAGIDNVFVQDNHSRSLERNVIRGLHFQKPPFEQSKLVRVIRGSIFDVAVDIRRDSATYGQWQGFELSERNFDMLFIPRGFAHGFCTLEEGTEVVYKVDNIYSREHDAGIAWNDPSIGVNWPHSGVDPILSDKDKALPPLNPY

SEQ ID NO: 29917 - DNA, 735 bp, Unknown
  Obtained from environmental sample
  misc_feature (1)..(735): n is a, c, g, or t
gtggtatttagtatgataacatgtgaaaatctttctaaaatattcagttctaactcgggaattaaaaatattaaccttcaatttacaccgggtataatttacggcattatcggctataatggggcgggaaaaacaacattgtttaactgcattgaaggtctttatactccgacatcgggatctgtttcccataataatattaaaacggcaaatgaggaagaattccttccttaccgaaaaaatatcgcttttctgccaaacgatgattatttgtatccgtatttgacttgtatggaaaatattgagttggcgacaatcttaaaaaccggaaagaatgagctgttgaatgaaactgatgaattaatccgttattttgaaatagatgaatatctgcataaaatattcaaggaatgttctaccgggatgaaaaagaaagtgcagatgattatcagtttaatcggagatataaataccattatttgggacgagccgaataacgggcttgatattgtttcaaatataaaaattaaaaatttactcaaccattataaaagtaaaaatacaaccatactattttcaagccatgttattgaatttcttgaaaatttcgtggatcattgcatattaatacataagggagaggtaattgaaaataatgacgtgcaaaacatcggatcattggagaaactgtttcttaagaatataccggagaatgaattaattttgaatatataa

SEQ ID NO: 29918 - protein, 244 aa, Unknown
  Obtained from environmental sample
  DOMAIN (31)...(213): ABC transporter
  misc_feature (1)..(244): Xaa is any amino acid
MVFSMITCENLSKIFSSNSGIKNINLQFTPGIIYGIIGYNGAGKTTLFNCIEGLYTPTSGSVSHNNIKTANEEEFLPYRKNIAFLPNDDYLYPYLTCMENIELATILKTGKNELLNETDELIRYFEIDEYLHKIFKECSTGMKKKVQMIISLIGDINTIIWDEPNNGLDIVSNIKIKNLLNHYKSKNTTILFSSHVIEFLENFVDHCILIHKGEVIENNDVQNIGSLEKLFLKNIPENELILNI

SEQ ID NO: 29919 - DNA, 939 bp, Unknown
  Obtained from environmental sample
  misc_feature (1)..(939): n is a, c, g, or t
atgtgggtatgtatcctgagacaaataccttacctaaacaaccataccccgtccgctctgcggcggggttggttgattgccgccgactgcggcgattccggctgggatcgcatacaggttcccggcgtctggcagcttcagggcaataattacggttcgccctattattatgccaactcctacccccaggcaatagatacaaaacatatcccgcgaatcagccgcgcgctgcaggaaacaggcgtataccgccggatatttattttaccggaacaatttttggggaatgaggtttttctgcattttggcgcggttaaagcggcgcttgaagtgtatgtgaacgggcagtacgcaggtttttccaaaggttccatgaccccgcatgaattcaatgtaactacattgttacagccgggagaaaaccggctaacagcccttgtccggcgctattccgacggaacctatcttgaagatcaggacatgtggtttttcagcgggatataccgcgatgtctttctctttattgagccaaagatcagcgtgagggatttttacatgcgcgccgatttagacgggaatatgcacaatgccgaaacaaaactgacactgtatctggaaaacaggacggagtcagtgtcctcaatgaaagttattgtaagggcctccataccggagattgggatcagcctgggcgagaaaaaaatttttatggaaagaggcaaggcatccgctgagttatgcgtcattgtttcaaatcctgggctgtggagccatgaacggcctaaactctacacagtgcttgttgagtgggaattcgcgggacagcgttattacaaggcttttcgttttggcttcaggaaaattgagattcgcggtaatgtcctgtaccttaacgggaaacggcttattatacgaggcgtgaacctcggccaatcttga

SEQ ID NO: 29920 - protein, 312 aa, Unknown
  Obtained from environmental sample
  DOMAIN (6)...(177): Glycosyl hydrolases family 2, sugar binding domain
  misc_feature (1)..(312): Xaa is any amino acid
MWVCILRQIPYLNNHTPSALRRGWLIAADCGDSGWDRIQVPGVWQLQGNNYGSPYYYANSYPQAIDTKHIPRISRALQETGVYRRIFILPEQFLGNEVFLHFGAVKAALEVYVNGQYAGFSKGSMTPHEFNVTTLLQPGENRLTALVRRYSDGTYLEDQDMWFFSGIYRDVFLFIEPKISVRDFYMRADLDGNMHNAETKLTLYLENRTESVSSMKVIVRASIPEIGISLGEKKIFMERGKASAELCVIVSNPGLWSHERPKLYTVLVEWEFAGQRYYKAFRFGFRKIEIRGNVLYLNGKRLIIRGVNLGQS

SEQ ID NO: 29921 - DNA, 645 bp, Unknown
  Obtained from environmental sample
  misc_feature (1)..(645): n is a, c, g, or t
atgaaccagcggaaggaacttttcggcgagcggctgctgtttgccgcgctgaacgccaacaaagattgtgcgcctaaagaattgttatccgccgtcaagcgggaagttgataactttgcggaaggaaccgaacaggccgacgatattaccatgcttgtattgaaggtaaatgatgctgcggtacattccgaagaaataccgcccaatgcgatgaagaagctggaaattaaagcaagctttgaaaatctggataaggcgctggactttataaacacggagcttgaacagcgcggatgcccgcaggacatacagggtaaaatcgaagttgccgtggaagagatttttgtaaacattgcggattacgcctacgcagccgacggcggcgacagccctgataccggagacggcggcgccgatggcgccgttgtcatatttatttccgttaccgataaaatcgtcatcaggtttgaagatacgggcaaatcttataaccctcttgagaagcccgatccggatctggacaaaccgctgatggaacgcgatataggcggattgggcgttttccttgtaaagaagcttatggacaatgtggaatatagccgtgttggggataagaatgttttggtgatgaccaaaaccaaataa

SEQ ID NO: 29922 - protein, 214 aa, Unknown
  Obtained from environmental sample
  misc_feature (1)..(214): Xaa is any amino acid
MNQRKELFGERLLFAALNANKDCAPKELLSAVKREVDNFAEGTEQADDITMLVLKVNDAAVHSEEIPPNAMKKLEIKASFENLDKALDFINTELEQRGCPQDIQGKIEVAVEEIFVNIADYAYAADGGDSPDTGDGGADGAVVIFISVTDKIVIRFEDTGKSYNPLEKPDPDLDKPLMERDIGGLGVFLVKKLMDNVEYSRVGDKNVLVMTKTK

SEQ ID NO: 29923 - DNA, 684 bp, Unknown
  Obtained from environmental sample
  misc_feature (1)..(684): n is a, c, g, or t
atgattgagtacgttgtcccgttaaatattgatgatcgggcgctggcaaaagcgacgcgggttctggaaaacggcgggcttgtcgccttgcccaccgatacgagctggagcattgtgtgttcgcttaagtccccaaacggcgttaaaaagcttaggaagttgtccggcgagagggacgaacggcattttaccctgctctgctccggtatttcgcagtttggggagttgtgcagcctggacaacagccgcttccgcctgataaaccgcctttcgcccggcccttatgtgtttattttaaaaacgcttctgggtactgaaaaagccctggacatacgccgcaaagaagtcggggtcaggattcccgatcattccatcccccttgcccttattaacacgcttcaacagcccctttactcaataacagccaaaaagagcatgcaggataatggcccttatgactctgatggctccgaggaagatgagacaggcggagataaaaccgagcttccgcccattcccgaagagaacctttttgaaggcggctgggagcttgacgggatcgacggcctggacctgattttatacggcggcgaggagcgcgagcgtattttttccactattctggatttatccggcgacgatgtcaaactgctaagacaaggcgccggcaaatggcccgtttaa

SEQ ID NO: 29924 - protein, 227 aa, Unknown
  Obtained from environmental sample
  DOMAIN (19)...(221): yrdC domain
  misc_feature (1)..(227): Xaa is any amino acid
MIEYVVPLNIDDRALAKATRVLENGGLVALPTDTSWSIVCSLKSPNGVKKLRKLSGERDERHFTLLCSGISQFGELCSLDNSRFRLINRLSPGPYVFILKTLLGTEKALDIRRKEVGVRIPDHSIPLALINTLQQPLYSITAKKSMQDNGPYDSDGSEEDETGGDKTELPPIPEENLFEGGWELDGIDGLDLILYGGEERERIFSTILDLSGDDVKLLRQGAGKWPV

SEQ ID NO: 29925 - DNA, 921 bp, Unknown
  Obtained from environmental sample
  misc_feature (1)..(921): n is a, c, g, or t
ttggaatttatagaggaaatgcacagcaaaggcaccaaaacagcaggcttgctcacagaattttctgaaatgctttacaaggcaagcacagatataaacaacgaaatcgttaggaacaaatttgtggatcaactcaaagacaaactgcgcattattaaaaacagcgtgaataatgaattaaagccaaataaaattgaaatagcctttttcccctacaaagcttctatgtgggacagccttgaaagcatttacctcgccgcaaaagatgacccagcttgcgatgcttatgttgtacctattccctattacgaccgcttgcctggcggagcatttggagagatgcactatgagggcatggaatacccaagcaatattccggttgcagactggcaagcctacaatgtagaggaacgcagacccgatattatttttgtgcataatccttatgacgatagcaattacgtaacgagtgttcacccaaatttttattgccaacggttgatgaatttaactgactgcttggtatacataccgtattttgtgtgcagtggagacgaaatttcagagcatttttgcgcattgccgggtactttctatgcgcacaaggtaattgtgcaatcggagagtataaggcaaagctatattaaatatttcaaggaatttgaaaaaaagaataattgccgagcggtatttggcaagccagaagataaattcgtggcacttggctctccgaaatttgacaaggctataaattccaaaccagaagattttgtattgccaccggaatggcaacgattgattatgaagccggacggcacaaaaaagaaagtatttttttataatacgaccatagctgcaattttggaaggtgatgaaaaatattgcaaaaaattcgccatgtttggggtattctgtcgataa

SEQ ID NO: 29926 - protein, 306 aa, Unknown
  Obtained from environmental sample
  misc_feature (1)..(306): Xaa is any amino acid
MEFIEEMHSKGTKTAGLLTEFSEMLYKASTDINNEIVRNKFVDQLKDKLRIIKNSVNNELKPNKIEIAFFPYKASMWDSLESIYLAAKDDPACDAYVVPIPYYDRLPGGAFGEMHYEGMEYPSNIPVADWQAYNVEERRPDIIFVHNPYDDSNYVTSVHPNFYCQRLMNLTDCLVYIPYFVCSGDEISEHFCALPGTFYAHKVIVQSESIRQSYIKYFKEFEKKNNCRAVFGKPEDKFVALGSPKFDKAINSKPEDFVLPPEWQRLIMKPDGTKKKVFFYNTTIAAILEGDEKYCKKFAMFGVFCR

SEQ ID NO: 29927 - DNA, 393 bp, Unknown
  Obtained from environmental sample
  misc_feature (1)..(393): n is a, c, g, or t
gtgatactgattgtcttcgaggtgaagatggggcccgtgacgggcatgatcaacttggccatacccagcatcatccttgagcctgtggccaacaagttcgaccaggagatgttcaccgggtacaagaagagcgccacattcgaggaggcgaagctgctggtgaagagcctgaagcactgcagcatggaggtttcggccgagatacgcggcacttcgctgctgatggccgacgtgctgcaactgcaggtcggcgacatgatcacgctttccaaaaaatacgacgacttccttgacctcaccgtggacgggattccgcgaatgaagggactggtagccatcaacccccaccacaagcgggtcttccaggtgacgaagggggcggaggaatactga

SEQ ID NO: 29928 - protein, 130 aa, Unknown
  Obtained from environmental sample
  misc_feature (1)..(130): Xaa is any amino acid
MILIVFEVKMGPVTGMINLAIPSIILEPVANKFDQEMFTGYKKSATFEEAKLLVKSLKHCSMEVSAEIRGTSLLMADVLQLQVGDMITLSKKYDDFLDLTVDGIPRMKGLVAINPHHKRVFQVTKGAEEY

SEQ ID NO: 29929 - DNA, 465 bp, Unknown
  Obtained from environmental sample
  misc_feature (1)..(465): n is a, c, g, or t
atgataagctcaattaaggtagataataacatgtcaaattttaaacgcatcggtcacattgcgcttcgagccagggacattgacgcgactatcgtcttttaccgcgatatgctgggcatggaagaagcattcaggatgtacaatgaaagtggcaaactcagtacaatttacctttgccttgcgccggggcagtttattgaaatttttccggacggtcttgtggaacgaaagatcgataacgataccataggctattcccatctatgtatcgaagtcgaagacgccactaaaacgctggaaactctccgcgccataggactgccggtggacagggaactacaaacaggtttatccaaatgcaagatgttctggactcacgaccccgacggcaaccgcattgaattcatggaattgactcccgaaagccttcaggcccaggctattaaacgcctggaagcattatga

SEQ ID NO: 29930 - protein, 154 aa, Unknown
  Obtained from environmental sample
  DOMAIN (16)...(135): Glyoxalase/Bleomycin resistance protein/Dioxygenase superfamily
  misc_feature (1)..(154): Xaa is any amino acid
MISSIKVDNNMSNFKRIGHIALRARDIDATIVFYRDMLGMEEAFRMYNESGKLSTIYLCLAPGQFIEIFPDGLVERKIDNDTIGYSHLCIEVEDATKTLETLRAIGLPVDRELQTGLSKCKMFWTHDPDGNRIEFMELTPESLQAQAIKRLEAL

SEQ ID NO: 29931 - DNA, 444 bp, Unknown
  Obtained from environmental sample
  misc_feature (1)..(444): n is a, c, g, or t
atgaaagatttacttcttccgccactgttctccgacgggatggttatgcaacagggagttgctttccccatccgtggatacgcctcctccatggtgacagtcacctttttgggcaaaacctatcagtcgcaggcagacgcggatggcaagtggcaggtgattctcgatcccgttcaggcaggcggcccatttacaatggatatagaatcagcggagacaagagtttgcataaaggatatttattcaggcgaggtatggctttgtgccggccaatctaatatggaacatcccatgcaacgccatagggacaattatcaagacgaatggacggcgcangctttcccccccatcggcaattcaggcgcccaggagtgggatttttcggtcccgcgaagaactaagcggcggcggctggactgtcgcgactgcggaaactctccatga

SEQ ID NO: 29932 - protein, 147 aa, Unknown
  Obtained from environmental sample
  misc_feature (1)..(147): Xaa is any amino acid
MKDLLLPPLFSDGMVMQQGVAFPIRGYASSMVTVTFLGKTYQSQADADGKWQVILDPVQAGGPFTMDIESAETRVCIKDIYSGEVWLCAGQSNMEHPMQRHRDNYQDEWTAXAFPPIGNSGAQEWDFSVPRRTKRRRLDCRDCGNSP

SEQ ID NO: 29933 - DNA, 471 bp, Unknown
  Obtained from environmental sample
  misc_feature (1)..(471): n is a, c, g, or t
atggcaaagccccgaaaccagtctatccacatccggctgggaacgatatannnaccctgnnccagngnagaantntntntgncgggnaaaaaaanccccgggggaaacccccaagggggaaaagcccccccaaaaaaaataaaaaaagagcgcccccccccccccccctttttttttttttttcccccggggggggggggggtttttttttttttcctaatttccccggggggcgccccccccccgggggnnnnnttttttttttttttttttttttttttttttctctttttttgggggggggggggcgcatttttttttttttttttttttttttacccccccccccccccccccccgccggggggggggggggggggnnnnaaaaaaaaaaaaaaattttttttttttttttttttttttttttttttagtnccgnngggcaaaaaaaagagaaaaggaaaattttaa

SEQ ID NO: 29934 - protein, 156 aa, Unknown
  Obtained from environmental sample
  misc_feature (1)..(156): Xaa is any amino acid
MAKPRNQSIHIRLGTIXXPXXXXEXXXXGKKXPGGNPQGGKAPPKKIKKERPPPPPFFFFFPPGGGGVFFFFLISPGGAPPPGXXFFFFFFFFFFLFFWGGGGAFFFFFFFFYPPPPPPPPGGGGGGXKKKKKFFFFFFFFFFLVPXGKKKRKGKF

SEQ ID NO: 29935 - DNA, 696 bp, Unknown
  Obtained from environmental sample
  misc_feature (1)..(696): n is a, c, g, or t
atgttttcgtataacctgctggacaaggtgaagattcccggcaaagtcacaaatatcgggaactctgcttttgactacaaccaactgaagagcgtagtcattcctgacagcgtcacttccatcgggaacagggcctttgccagcaatatgcttgccaatgttacgttttcaggcggcgttgaaaccatagggagcggcgcgttcgcgtacaaccaactcaagggcattacgcttcctgtcagcgtaaaatccataatggacggcgcttttgagaacaactatctgacccagatcgttattccggtcggcgttacattaatcaaaaaaaacgcgtttgcgaacaataaattgacaagcataaccattggaaacagcgttacttccattgaagattatgcttttgcgtacaataatttaacgagtataaccattggcggcggcgttacatcaattggggcttatgcctttatggacaaccaactggccaatgtcaccattcccaggagtgttacttccatcggagaacacgcgttccggaacaaccaactcacccgcgtaaccattggggaaggagtatctcttggcggagatccattcggagacgggtttgaagctttctatagtgccaggagaaaggccgccggcgtttatacgcgggccggcgacggctggaatttcagcgcccgcggtatttag

SEQ ID NO: 29936 - protein, 231 aa, Unknown
  Obtained from environmental sample
  misc_feature (1)..(231): Xaa is any amino acid
MFSYNLLDKVKIPGKVTNIGNSAFDYNQLKSVVIPDSVTSIGNRAFASNMLANVTFSGGVETIGSGAFAYNQLKGITLPVSVKSIMDGAFENNYLTQIVIPVGVTLIKKNAFANNKLTSITIGNSVTSIEDYAFAYNNLTSITIGGGVTSIGAYAFMDNQLANVTIPRSVTSIGEHAFRNNQLTRVTIGEGVSLGGDPFGDGFEAFYSARRKAAGVYTRAGDGWNFSARGI

SEQ ID NO: 29937 - DNA, 636 bp, Unknown
  Obtained from environmental sample
  misc_feature (1)..(636): n is a, c, g, or t
atgtcacataacagccctgcccgtggcggtaaatctccagtgccacgccagccgcgtcgccaggacggagttataatggaaacgaaaattatacagctaacaactcctttaagccgcgcggatattgccggtcttgagatcggcgatgtcgttgagcttagcggttttatttttaccgccagggacgcggcgcacaagcgtatggaaagcgcgtggaaacagaagctgccactgccggtagatcttaaagggcagcttgtcttttacgcgggtccctgtcccgctaaacccgggcacgccgtcggctccatcgctccgacaaccagcatgcgcatggacggctttgtcgagatgacctttgaactgggccttataggtatgataggcaaaggagatcgttctgcttttgttccgggcctctgtaaaaaacactgcggaatctatttcctcggcacaggaggcgcatccgcgctgatctcaaaacaggttaagagctgcgaagtggtcgcgtgggaagaccttggaacagagtccgtcaaaaaactggaagtcgaaaaattacgcctgatagtcgggatagattcacagggacgtgttttccaggacagggagatcgctaaataccgcgggcgctga

SEQ ID NO: 29938 - protein, 211 aa, Unknown
  Obtained from environmental sample
  DOMAIN (4)...(206): Fumarase C-terminus
  misc_feature (1)..(211): Xaa is any amino acid
MSHNSPARGGKSPVPRQPRRQDGVIMETKIIQLTTPLSRADIAGLEIGDVVELSGFIFTARDAAHKRMESAWKQKLPLPVDLKGQLVFYAGPCPAKPGHAVGSIAPTTSMRMDGFVEMTFELGLIGMIGKGDRSAFVPGLCKKHCGIYFLGTGGASALISKQVKSCEVVAWEDLGTESVKKLEVEKLRLIVGIDSQGRVFQDREIAKYRGR

SEQ ID NO: 29939 - DNA, 531 bp, Unknown
  Obtained from environmental sample
  misc_feature (1)..(531): n is a, c, g, or t
atggcggggaaaacggtcaggaaatggacgggccgggaacaccttgagtaccggtactggcggcataacggggtagagatacgggaagagcagccgacgctttcggtgaatattttctcattggagatatggaaccgggagaaagggaaagcaacataccggaacaattgggtaacggatcttgatgtcgacgaaaagaacattcaggaaatgacggagtgtgcgcgggcggggtggaaaatagagaatgaacacaataaggtgttgaaacatcacgggtatcatcttgagcataactttggacacggtcaagagaactcgtgtgaaatctatgcagtactgaacttgccggcgtttcagatgcacgggatactgttgctgttggacgaagagtatcaaaaggcgcgggcctccgtccgccgccttgacgagtttttcggcggcttacggctcatattcagccggttcttgttccagacatgggaggattttatcggctttatagtccaggatgatgagccggatgggtaa

SEQ ID NO: 29940 - protein, 176 aa, Unknown
  Obtained from environmental sample
  misc_feature (1)..(176): Xaa is any amino acid
MAGKTVRKWTGREHLEYRYWRHNGVEIREEQPTLSVNIFSLEIWNREKGKATYRNNWVTDLDVDEKNIQEMTECARAGWKIENEHNKVLKHHGYHLEHNFGHGQENSCEIYAVLNLPAFQMHGILLLLDEEYQKARASVRRLDEFFGGLRLIFSRFLFQTWEDFIGFIVQDDEPDG

SEQ ID NO: 29941 - DNA, 432 bp, Unknown
  Obtained from environmental sample
  misc_feature (1)..(432): n is a, c, g, or t
ttggttgatgccaacattaccgtgaaagaccataaggcaaagaatattccggcgctgggcgatgcggtattggacgaataccgcgcccgttacgatgagattctgaacagggggcgccctgagttttttcaaaaagaaaagaaggataacaacagcgaagacgtgaagcttttgcggcggctgaaagaatataaaagcgaacacttgaggttcctgtcagatttccaggttccgtttgacaacaatcttgcggaacgggatctgaggatgataaaaagcaagacaaaagtgtccggctgtttcaggggcgatgagggcggcaccgtttttgcaaatatcaaaagctacacctcaactttgagaaagaatgccaggaatattttcaacggcttaaaaaatgccttcttgggtctgcctttttcctgggcttga

SEQ ID NO: 29942 - protein, 143 aa, Unknown
  Obtained from environmental sample
  misc_feature (1)..(143): Xaa is any amino acid
MVDANITVKDHKAKNIPALGDAVLDEYRARYDEILNRGRPEFFQKEKKDNNSEDVKLLRRLKEYKSEHLRFLSDFQVPFDNNLAERDLRMIKSKTKVSGCFRGDEGGTVFANIKSYTSTLRKNARNIFNGLKNAFLGLPFSWA

SEQ ID NO: 29943 - DNA, 1008 bp, Unknown
  Obtained from environmental sample
  misc_feature (1)..(1008): n is a, c, g, or t
gtggagccgggttcttccgagttgctgggatatggaggatatacttgtcagcccggatttgaaaataaaaaactgattaaagacctgttgcttgaagagcgtaacactcttaacgcgtcgattatccactccgggcacagtttcgctatctcggacgcggcggcgggcctgtcgaggagccgcaaactagacgatatgctcggcggcatagcgcagttgcgttttttggacgagataatcaaaaacgaagactacgacttggcggcgagggcgtgcgggagtttgcactacgctatgataaaccgcagaacctgcgtggtgtctatgaccgccggcgatccgtcgaagttcgcggggcggcttgagccgtttatcggcaatctgccgtcgcaagcaaaggtgggtgagaggccggtggacaccataaacggctacagcgacgagtggttggagctgttctcggactccgacgttttcgcccgccgcgaggccgacagcccgacgacgagctacaaaggcatagagataaactccgccgtaaacttcgcggccagagcttggagactgccggacacgggcgccgccgagaagggccgcgcatatttgctgtcgcgcaacctgtcgaccggctacctctgggacaagatacgggtggagggcggggcgtacggggggatgtccggcatgtcggttggccacccgatcttttcgtgcgcctcctaccgcgacccgaacctggagtccacgctggagcacttcaccggcggtctgagacaggtcgccggcctcatcccaaagaagcaggtcgatcagtccataataggagcgataggccgcatagaccagccgaagcccccgcatacgctgggattctccaaaacgctggaaatcctctcaggctacacggaggagtaccgccaacaattcagagagacggtcctgaatgcgacgcctgaggatctgaaacgcgcggcggaacgtgtgtggccgcaaatgagtccgccgtaa

SEQ ID NO: 29944 - protein, 335 aa, Unknown
  Obtained from environmental sample
  misc_feature (1)..(335): Xaa is any amino acid
MEPGSSELLGYGGYTCQPGFENKKLIKDLLLEERNTLNASIIHSGHSFAISDAAAGLSRSRKLDDMLGGIAQLRFLDEIIKNEDYDLAARACGSLHYAMINRRTCVVSMTAGDPSKFAGRLEPFIGNLPSQAKVGERPVDTINGYSDEWLELFSDSDVFARREADSPTTSYKGIEINSAVNFAARAWRLPDTGAAEKGRAYLLSRNLSTGYLWDKIRVEGGAYGGMSGMSVGHPIFSCASYRDPNLESTLEHFTGGLRQVAGLIPKKQVDQSIIGAIGRIDQPKPPHTLGFSKTLEILSGYTEEYRQQFRETVLNATPEDLKRAAERVWPQMSPP

SEQ ID NO: 29945 - DNA, 1413 bp, Unknown
  Obtained from environmental sample
  misc_feature (1)..(1413): n is a, c, g, or t
atgaataatcagataaattcggaaaaattaacagctcttaaagccgccgctctggacgccccttcggaaccgggggtctatataatgaaggatatcgacggggaaatcatctatatcggcaaagctaaatcgcttaaaaacaggataaagtcgtatttttcgggaaaaaaggacacaaagaccaccgcccttctccagcgtatcaactcattcgagaccattattgtccaaagcgaatacgacgcccttttactggaaaacaccctgataaaacagcattcgcccaagtacaatatcagcttgaaagacggtaaatcctaccctcttattcgtataacgcatgaggattttccccgtgttttccgcacacgcagaataatacaggataaaagcctttatttcggaccttttccgaatatgcaaagcgtaaatacgatgatggatttaatcgacaagctttaccctctgcgncaatgcaaaacgattaaaaaaaacggaccgtgtatgtactaccacatcgggcgctgtatggctccctgctgcggcaagatagccccggagaagtatcgccgccatgtcgaacgggtacagcggctgttgtccggcgaaacggaaccgcttattatcgaactgaccgaaaaaatgcacgaggcggccaaagcgctgcaatttgaatgggccgcccggatacgaaacgcgatcaaggcgattgaagaccttgtcggggaagacagcgccgtggtggattttgaccccgaaagcagggattacatcgcttgggccgccgaaggggtgttggcgacgtttaccgttttttccatgcgaggcggcaaaatgaccggcagggaactgtaccgtacccgttccgccgcggaggaaggggaatcgctggaattgtttatcactacctattacgatcccacccgtccgccgccgcccaagatttatctgcaaccgggaacaagtactgccgccgttatgcataacgattcactgatgaactggttcaagacccaatggggccacgagccggagttgatacagccggaggaaaagcaccatgtggcaattcttgccatggcgcgccagaacgcgctggaagatatccgtaaacggttgaaggaacggggagccggtcccgctctggatgaactggcccgcgtgttacagttaccgggcaggccggaacgaatcgaagggtttgacattgcccagcttgacggcaaacatccggtcgcgtcgctggtgtctttcaaaaacgggattcccgacaaaaaaaattaccgttatttcaaactccgcagcgtgattggcgtcgtggatgattttgccgccatgcgcgaagcggtacagcggcgttattcccggcttatccgcgaaggcgggggaaatccccgaccctgtgtaaattga

SEQ ID NO: 29946 - protein, 470 aa, Unknown
  Obtained from environmental sample
  DOMAIN (205)...(240): UvrB/uvrC motif
  misc_feature (1)..(470): Xaa is any amino acid
MNNQINSEKLTALKAAALDAPSEPGVYIMKDIDGEIIYIGKAKSLKNRIKSYFSGKKDTKTTALLQRINSFETIIVQSEYDALLLENTLIKQHSPKYNISLKDGKSYPLIRITHEDFPRVFRTRRIIQDKSLYFGPFPNMQSVNTMMDLIDKLYPLRQCKTIKKNGPCMYYHIGRCMAPCCGKIAPEKYRRHVERVQRLLSGETEPLIIELTEKMHEAAKALQFEWAARIRNAIKAIEDLVGEDSAVVDFDPESRDYIAWAAEGVLATFTVFSMRGGKMTGRELYRTRSAAEEGESLELFITTYYDPTRPPPPKIYLQPGTSTAAVMHNDSLMNWFKTQWGHEPELIQPEEKHHVAILAMARQNALEDIRKRLKERGAGPALDELARVLQLPGRPERIEGFDIAQLDGKHPVASLVSFKNGIPDKKNYRYFKLRSVIGVVDDFAAMREAVQRRYSRLIREGGGNPRPCVN

SEQ ID NO: 29947 - DNA, 912 bp, Unknown
  Obtained from environmental sample
  misc_feature (1)..(912): n is a, c, g, or t
atggaacgtgaatacaataattttaccgttctggatgaatatttttctcagggaaacggtaattaccgcgatgtaaatcagaacaggagaagcgatgtcttttttaacaaagatgtaggtgatgacaatatccgtttttttatgaatcttattcaaagcgacggctttaacccgcttaaagttcttggtgtcagttttatatttaaaaccgatgaaaacagacggcgttttattgacgaagattttaaaacaaacgcatttaatataaaagaatttcccggttttattgacaaacttgcattctttacatcaaagtcttttactattggcagtctttttcattttattgaagaaaacaaaataaaaatttctaatcgtaaaaccctgcttgcatcgcttttaaaatatacaaaaaaaataaaccttgcggaacatggcgaagggtattggtcggatcattggcattacaataccgatctaatcgaaaattaccttgctatttttcctgatcgtctcaaacaacttctccttgaggcatgcgactacactttttttgatgattgttattttgttgaaccacgtagtgttaaatatgttttattcaggggaatgccaagacaaatccgcgccgtgcgccgtgacccagaaaaagcggctcttattacatcgcgtacaaacaatcctaacgtattgcgaacagattttggcttaggtaaagaatactacacaaaccttttaggcaagcttctttgcgtgatcgcgaataaatacgcttcgcttgaccctgaatgtcttggcgtggaaatggaaggagacaaaccaaactggtgcgatgccttaaacgggcttccgggtctctttggctcttccagcgcgaaagccttgagttacttaggcttatctcttttctaa

SEQ ID NO: 29948 - protein, 303 aa, Unknown
  Obtained from environmental sample
  misc_feature (1)..(303): Xaa is any amino acid
MEREYNNFTVLDEYFSQGNGNYRDVNQNRRSDVFFNKDVGDDNIRFFMNLIQSDGFNPLKVLGVSFIFKTDENRRRFIDEDFKTNAFNIKEFPGFIDKLAFFTSKSFTIGSLFHFIEENKIKISNRKTLLASLLKYTKKINLAEHGEGYWSDHWHYNTDLIENYLAIFPDRLKQLLLEACDYTFFDDCYFVEPRSVKYVLFRGMPRQIRAVRRDPEKAALITSRTNNPNVLRTDFGLGKEYYTNLLGKLLCVIANKYASLDPECLGVEMEGDKPNWCDALNGLPGLFGSSSAKALSYLGLSLF

SEQ ID NO: 29949 - DNA, 705 bp, Unknown
  Obtained from environmental sample
  misc_feature (1)..(705): n is a, c, g, or t
ttgtcaaaactcccgtcgcgccttaaaacagaatgggacggcgaaattgacaaatggaaaacccatctgccccagacgtatacgcatgaggttacgtttgccaagaacgcccttcacccccgttttattattgaagaaaccgcgaaggcgcttggaagcgaaacaatagccgttaccgacgtgggccagcatcagatgtgggccgcgcagtttttccccgcggagaagccgagatcatttataagctccggcggtcttggaaccatgggcttcggccttggggcggcctgcggcgtgaaagtggccaaccccaaaagacccgttgtgcttttcacaggggacggcagtttcagaatgaactgcgccgagatggcgaccctcaccaacaataagctccctcttttgataatcgtttttaacaacggggttctcggcatggtaaggcaatggcagagtttcttttacgaaaaaagatactcgcagacaactcttggaacggccccggactttattaaattatgcgaagcgtacggcgttactggtttccgcgcaaacaacagggaatctttcaagaaagctctccacgccgccggcgaagaattatccgccggaagggcagcgctgatagaagccgacatagaccgcgacgaaaacgtcctgccgatggtcccgtcaggaaaaccaatagacgagcagatattataa

SEQ ID NO: 29950 - protein, 234 aa, Unknown
  Obtained from environmental sample
  DOMAIN (60)...(211): Thiamine pyrophosphate enzyme, C-terminal TPP binding domain
  misc_feature (1)..(234): Xaa is any amino acid
MSKLPSRLKTEWDGEIDKWKTHLPQTYTHEVTFAKNALHPRFIIEETAKALGSETIAVTDVGQHQMWAAQFFPAEKPRSFISSGGLGTMGFGLGAACGVKVANPKRPVVLFTGDGSFRMNCAEMATLTNNKLPLLIIVFNNGVLGMVRQWQSFFYEKRYSQTTLGTAPDFIKLCEAYGVTGFRANNRESFKKALHAAGEELSAGRAALIEADIDRDENVLPMVPSGKPIDEQIL

SEQ ID NO: 29951 - DNA, 384 bp, Unknown
  Obtained from environmental sample
  misc_feature (1)..(384): n is a, c, g, or t
atgatcaaagaagccaggcggcccctgctctacgcgggagggggagtcatcagctccggcgcggaagaagaacttgtcgcgctcgcggaaaaacttaacgcccccgtcgcgttgagcctcatgggaattggcgccatcccaaaagatcacaggctctgtaccgggcttatcggaatgcacggaaccgtggcgagcaacaaggcgacgcaaaaaacggatctgctcatcgcgattggggcgcgtttttccgaccgcgttacaagcaaagcggatatgttcgcaagcaccgcaaaggtgattcactttgacattgacccggctgagataagcaaaaacatagaaaccccacgcctgggtaattggaaatttaaaagacacccttaa

SEQ ID NO: 29952 - protein, 127 aa, Unknown
  Obtained from environmental sample
  DOMAIN (1)...(125): Thiamine pyrophosphate enzyme, central domain
  misc_feature (1)..(127): Xaa is any amino acid
MIKEARRPLLYAGGGVISSGAEEELVALAEKLNAPVALSLMGIGAIPKDHRLCTGLIGMHGTVASNKATQKTDLLIAIGARFSDRVTSKADMFASTAKVIHFDIDPAEISKNIETPRLGNWKFKRHP

SEQ ID NO: 29953 - DNA, 519 bp, Unknown
  Obtained from environmental sample
  misc_feature (1)..(519): n is a, c, g, or t
ttggaaaaaagcaagattgtaaaaaagcaaagagggacaggcatgaaaagaggcctgtccttctttgtgtttatggcggtatcgtttataaccgtaataagttcctgtgacatgggcccccatcttacaatttataactggacttattatacgccggatacggttatcagaaaatttgaaaaagaatacaatgttaaggttatttacgatcagtttgcctccaatgaagagttatacgccaaacttaaaagtggtgcatcaaagtacgacattgtttttccgtccggggattacgtatcaataatgatccggcagaatatgctggagaaaatcgacaagtcaagaatgaccaatctggggaacatcgatcctgatgtgctacggaaggcggtctacgatccggacatggattacgcggttccttattactacggcgcagccggtataatagtaaataccgccagggttcccgattatgaaaaaagctggtcaatctcagccggggctcggccaatctga

SEQ ID NO: 29954 - protein, 172 aa, Unknown
  Obtained from environmental sample
  misc_feature (1)..(172): Xaa is any amino acid
MEKSKIVKKQRGTGMKRGLSFFVFMAVSFITVISSCDMGPHLTIYNWTYYTPDTVIRKFEKEYNVKVIYDQFASNEELYAKLKSGASKYDIVFPSGDYVSIMIRQNMLEKIDKSRMTNLGNIDPDVLRKAVYDPDMDYAVPYYYGAAGIIVNTARVPDYEKSWSISAGARPI

SEQ ID NO: 29955 - DNA, 1104 bp, Unknown
  Obtained from environmental sample
  misc_feature (1)..(1104): n is a, c, g, or t
ttgcagcaaaatagaaccttgtggttttatatatttttacagaggaaggtagaaaagatgaatatgaaaaggcacatcgtctttcctgtggttttggcggctctgttgtccgccacggtattgggttgcggcaagaagcagcagctctttatttacaactggacctattacacgccggattcagtcattgagaaattcgaagaagagtacaaggttaaggtgctctacgatgaatttgcctcgaatgaggatatgtatgcgaagatcaaggccgggggttcgggctatgacatcgtgttcccatccggggattatgtgtcaatcatgatccaccagaacatgctggagaaaatcgacaagtccaaaattcccaacattgtcaacgtcgatcccgcggtgttgaaaaagtccagctttgatccgaacatggaatattcggttccttactactacggcgcagcgggcgtgctggtaaataccgcgagggtgcctgattttgaaagaagctggtcaatctttggccgcgaggatctccgcaaccgcatgacaatgctggacgatatgcgggaagtgatgggcgacgcccttaaattcctcggttattcggtaaacaccaaagaccccgcccagattaaggaagccagagatcttattaacaattcatggaaacccaatttaataaagtttgacgccgacgcttttggtaaaggttatgccaatggcgatttctgggttgtacagggctacgccgaagtggtgtatgaggaaatcatggataacgcgcagcttatgaaggatacggttttctttatcccnaaagagggcggccccgcctatctgnacagcatgtgtattctcaagggctcaaagaatattgaccttgcccacaagttcattgattttatccatcgtcctgaaatttacgcggagttcgccgacagtttcggttttcccgcgacggcgaatattcccgcccgccaatacaaaacgggcgattcctggtactccgccgaagatttgaccaataccgagttaaaggacgatcttggcgaagcgctggatctcttcaacgacgcctggtttaactcaatcagggtggattaa

SEQ ID NO: 29956 - protein, 367 aa, Unknown
  Obtained from environmental sample
  misc_feature (1)..(367): Xaa is any amino acid
MQQNRTLWFYIFLQRKVEKMNMKRHIVFPVVLAALLSATVLGCGKKQQLFIYNWTYYTPDSVIEKFEEEYKVKVLYDEFASNEDMYAKIKAGGSGYDIVFPSGDYVSIMIHQNMLEKIDKSKIPNIVNVDPAVLKKSSFDPNMEYSVPYYYGAAGVLVNTARVPDFERSWSIFGREDLRNRMTMLDDMREVMGDALKFLGYSVNTKDPAQIKEARDLINNSWKPNLIKFDADAFGKGYANGDFWVVQGYAEVVYEEIMDNAQLMKDTVFFIPKEGGPAYLXSMCILKGSKNIDLAHKFIDFIHRPEIYAEFADSFGFPATANIPARQYKTGDSWYSAEDLTNTELKDDLGEALDLFNDAWFNSIRVD

SEQ ID NO: 29957 - DNA, 1575 bp, Unknown
  Obtained from environmental sample
  misc_feature (1)..(1575): n is a, c, g, or t
atggtggagaatgacggcactgttacgataaataatggggacacggtggtcatttctaccgatgactgttttaccacggcggcgggcaatggtgcgcccgcgcatatttcattatcatggaaagaagcgggggaaaaactgaaacccggacaccgcgttcttattgcggacggacttcttgagcttgaagtgacggataacgccggcggaatcaagtgccgcgcaaacaataccgccgttattgggagcaagaaaaacgtcaaccttatcggcgtacacgccgggcttcccattatggccgagcaggacaaaaaagacctggaattcggcatttcaatggatcttgattatgtcgccgcgagttttttgagctttccccatgaggtaatcgagataagaaaattccttgaaggccactcctcccatatgaaaatcatagccaaaattgaaagcggcgaaggcctggaaaacataaaagaaattgcccggcttgcggacggtgtcatggtagcaagaggggatcttggccaacaagtccccattgagcaaattcccctggcgcaaaaacacattatcaatacatgccgccgggcgggaaaaccggtcattaccgcgacccaaatgctggactcgatgatacataatccgcgtcccacccgcgcggaactgaccgacgtggcaaacgcgatactcgacggaaccgacgcgatcatgctctccggcgagaccgctcaagggtcatatccggtggaagcggtaaaaacgatgcacaaaatagcgtgcgtcattgaacagtcagacgaattccgcatgcgtatgagaaatttccacgatgaatgtcattccgaagtgcataacccaaaagaagatatgggcatcatcgtgtcgcggtcgggagttgaaaccgcgacggcggtaaacgcgaaagccatagttacgccgacccgcagcggcaataccgcgcgaatcatcagcgtattcaggccggatgaacctatccttgccgtaacaaccgacaagcgttccgaacgttttatgcagttgtactggggcgtaaatacctgtatcactccggaagtcggcgattcggacaccatgatacacaacaccatggagcttgtttcaaagagcggcgtggcgggcatatcggataaaatagttctcatcgccggcctgccgcttgaaagcccgaacatgataaataccgtccgcgtcgtcattatcgggacggttctcgcgcgttcaagcgccggcggttacgcgaatcccgaccttatccgcgcgcacggaaggataatccacgccgcgaccgccgatgaggccagcaaaaaactcatgtcttccggcggaatattaatttgcaaagagattaacgatgaatacatgcctgttcttcgcatggctcagggaatcatttgcgaaggggtttcggttatcagcgaagagaagatacgcgtcatcaatcccaatcttgtctggcttacccacatcagggacgcggcaaagaaactcgaagccggtttaacggtgacaatagacgggaaggaactgcttgtgtatgaaggtataatttaa

SEQ ID NO: 29958 - protein, 524 aa, Unknown
  Obtained from environmental sample
  DOMAIN (295)...(407): Pyruvate kinase, alpha/beta domain
  misc_feature (1)..(524): Xaa is any amino acid
MVENDGTVTINNGDTVVISTDDCFTTAAGNGAPAHISLSWKEAGEKLKPGHRVLIADGLLELEVTDNAGGIKCRANNTAVIGSKKNVNLIGVHAGLPIMAEQDKKDLEFGISMDLDYVAASFLSFPHEVIEIRKFLEGHSSHMKIIAKIESGEGLENIKEIARLADGVMVARGDLGQQVPIEQIPLAQKHIINTCRRAGKPVITATQMLDSMIHNPRPTRAELTDVANAILDGTDAIMLSGETAQGSYPVEAVKTMHKIACVIEQSDEFRMRMRNFHDECHSEVHNPKEDMGIIVSRSGVETATAVNAKAIVTPTRSGNTARIISVFRPDEPILAVTTDKRSERFMQLYWGVNTCITPEVGDSDTMIHNTMELVSKSGVAGISDKIVLIAGLPLESPNMINTVRVVIIGTVLARSSAGGYANPDLIRAHGRIIHAATADEASKKLMSSGGILICKEINDEYMPVLRMAQGIICEGVSVISEEKIRVINPNLVWLTHIRDAAKKLEAGLTVTIDGKELLVYEGII

SEQ ID NO: 29959 - DNA, 366 bp, Unknown
  Obtained from environmental sample
  misc_feature (1)..(366): n is a, c, g, or t
atgatcgcgtcggttccgtcgagtatcgcgtttgccacgtcggtcagttccgcgcgggtgggacgcggattatgtatcatcgagtccagcatttgggtcgcggtaatgaccggttttcccgcccggcggcatgtattgataatgtgtttttgcgccaggggaatttgctcaatggggacttgttggccaagatcccctcttgctaccatgacaccgtccgcaagccgggcaatttcttttatgttttccaggccttcgccgctttcaattttggctatgattttcatatgggaggagtggccttcaaggaattttcttatctcgattacctcatggggaaagctcaaaaaactcgcggcgacataa

SEQ ID NO: 29960 - protein, 121 aa, Unknown
  Obtained from environmental sample
  SIGNAL (1)...(18)
  misc_feature (1)..(121): Xaa is any amino acid
MIASVPSSIAFATSVSSARVGRGLCIIESSIWVAVMTGFPARRHVLIMCFCARGICSMGTCWPRSPLATMTPSASRAISFMFSRPSPLSILAMIFIWEEWPSRNFLISITSWGKLKKLAAT

SEQ ID NO: 29961 - DNA, 1197 bp, Unknown
  Obtained from environmental sample
  misc_feature (1)..(1197): n is a, c, g, or t
gtgatctgtactggaaaaaatccgcatttttttgataaaccggtagtcaaagtgattaccgggatgaggcgaagcgggaaaagcgttatccttagattgctccgcgaggaactgttgaaaaataatgttccacaggagaatattatataccttgattttgaatcgatgggtacaatcccgcttgccaatactgacgagttatattcttatgttatcaaaaaagccaatcgtaaaaagaaacgcctgtacattatgctggatgaaattcaacaaatacagggctgggaaaaggtaatcgcgtctttgcgtgtcgacattaattgtgatatttacattactggttccaatagcgggcttttgtcagcggatattgccgccgctcttgcgggccgttatgtacagatcagaatacatacgctttcatttatggaacatctggattttactgccgcaatgggggaagaccggggaaaagaccgtaaccgccagtttgcggattttctgcgttgcggcggcttaccgggcattcatgaaatgaatatcaatactaacgctgtttctccgtatcttttggatatttacaattcggtattgttaaaagacgttatcagccgttaccatattcgtgatattgaacttcttgaacggacaattcatttcctgatgcttaatgttgggaatatcttttcagctaaacgaatttcggattttctgaaaaaccaaaacaggcgtttgagcgtagaaactatttataattatcttgacgcgcttgaatcggcttttcttatccacaaggtaagccgttgggatataaaaggaaaacgtgtgctggaaacactggaaaaatattactttgaggacttcggcctgaaaaacgaggttctgggctacagcgaaggttctattgcgggtctcctggaaaacgtggtatttctggaattgcagcgccggggttacgaagtgtatgttggtcaaggcacaaactgcgaaatagattttattgcccgccgccgggatgaaaccgcgtacttccaggtaacctatttactcgcctcggacgaaacaattgaacgggaattttcatctttactgcagatccgtgataattaccccaaatacgttctttctatggatgaatttaactttggtcgtcaaggtattttgcatcggaatatccgggactggcttttggattag

SEQ ID NO: 29962 - protein, 398 aa, Unknown
  Obtained from environmental sample
  misc_feature (1)..(398): Xaa is any amino acid
MICTGKNPHFFDKPVVKVITGMRRSGKSVILRLLREELLKNNVPQENIIYLDFESMGTIPLANTDELYSYVIKKANRKKKRLYIMLDEIQQIQGWEKVIASLRVDINCDIYITGSNSGLLSADIAAALAGRYVQIRIHTLSFMEHLDFTAAMGEDRGKDRNRQFADFLRCGGLPGIHEMNINTNAVSPYLLDIYNSVLLKDVISRYHIRDIELLERTIHFLMLNVGNIFSAKRISDFLKNQNRRLSVETIYNYLDALESAFLIHKVSRWDIKGKRVLETLEKYYFEDFGLKNEVLGYSEGSIAGLLENVVFLELQRRGYEVYVGQGTNCEIDFIARRRDETAYFQVTYLLASDETIEREFSSLLQIRDNYPKYVLSMDEFNFGRQGILHRNIRDWLLD

SEQ ID NO: 29963 - DNA, 492 bp, Unknown
  Obtained from environmental sample
  misc_feature (1)..(492): n is a, c, g, or t
gtgcagactataattctcgggcacagcgaaagacggcacaattacaaagaagacgacgcccttattaataaaaaggttaaacttgcccttaaacacgggttcgaggtaatcctgtgcataggcgagctcttggaagaacgcgaagccggcaaggttgaagaagtctgcgaaaggcagacggtaaagggccttgaaggagtaagcgccgacgctttatcgaatattgttatcgcttacgaacctgtctgggcgattggcaccgggaaaacagccacgccgcaggacgcggaggcggttcacgcttttgtacgcaaagtaataggaaagctctacggcgaagacgctgcaaaaaaaataattatccagtacggcggttccgtaaagccggataacgccgcccagcttatggcgatggaaaacattgacggcgcgcttgtcggcggcgcttcgttaaagacggatacctttgtgcccatagccaaattttcctga

SEQ ID NO: 29964 - protein, 163 aa, Unknown
  Obtained from environmental sample
  DOMAIN (1)...(160): Triosephosphate isomerase
  misc_feature (1)..(163): Xaa is any amino acid
MQTIILGHSERRHNYKEDDALINKKVKLALKHGFEVILCIGELLEEREAGKVEEVCERQTVKGLEGVSADALSNIVIAYEPVWAIGTGKTATPQDAEAVHAFVRKVIGKLYGEDAAKKIIIQYGGSVKPDNAAQLMAMENIDGALVGGASLKTDTFVPIAKFS

SEQ ID NO: 29965 - DNA, 594 bp, Unknown
  Obtained from environmental sample
  misc_feature (1)..(594): n is a, c, g, or t
atgcctgattggctttattcagatactgttaaggagcattttaccaatccccgtaatgttcttttggaagacgagagtacttttaactataatgccaagggacagacaggaaacattaaatgcggagatcagatgctgatgctccttaaaattgataatgatgttatcaccgacgtgcgttggagaacatacgggtgcgccagcgccatcgcgtcaacaagcatgctgtcggatgtaataaagggcatgaaaattgaggatgcctacaaagtaaagccggaagaccttgttgaaaaactgggcggcctgccctcatacaagatccactgctccgtgctgggcgacaaggcactccgcgccgccattgatgattatctggtaaagaccggaagacctggaatgttacaggaagaggccacagaaatttgccactgtcttggcattaccgacaaggacattgaaaacgccttccaaaacggcgcccgcaactgggaagatttgcagcaggcaaccaagatcggcactgtctgcgggagctgcaaaacaaaagcgatggaacttctgcacggcctggaacacatctacgggatgtaa

SEQ ID NO: 29966 - protein, 197 aa, Unknown
  Obtained from environmental sample
  DOMAIN (140)...(192): BFD-like [2Fe-2S] binding domain
  misc_feature (1)..(197): Xaa is any amino acid
MPDWLYSDTVKEHFTNPRNVLLEDESTFNYNAKGQTGNIKCGDQMLMLLKIDNDVITDVRWRTYGCASAIASTSMLSDVIKGMKIEDAYKVKPEDLVEKLGGLPSYKIHCSVLGDKALRAAIDDYLVKTGRPGMLQEEATEICHCLGITDKDIENAFQNGARNWEDLQQATKIGTVCGSCKTKAMELLHGLEHIYGM

SEQ ID NO: 29967 - DNA, 990 bp, Unknown
  Obtained from environmental sample
  misc_feature (1)..(990): n is a, c, g, or t
atgcgaggtttttttctcggagatcgaatcgaatacgccgtgtttcaaacgatgaggcagcttgcttcagctcctaacagcagcccgctgaaagagggccgttgcgaattcatcaccagttccatagagcacccctgcgtgcttaactccgcgaaaaacctgcaagacttgagttttaaagtttattttatacaggttgacggatacggcaaaattgacatagacgctttcaaaaaagcgttaagcgataaaaccctttttgtgtctgtaatgatggctaacaacgaaataggaaccatacaggatattaaggagatagcctcgctcgcgaaagcatcgggcgcgtggatacacacagacgcggtgcaggcgctcggcaagatacccgtcaatgtagacgatcttggaatggattaccttactgcgtcggcgcacaagatttacggaccaaaaggggttggcgccctctacgcgcgcaaaggctcgccgctgttcccgttgatccatggagggcatcaggaagaaggcctaagagccggaacctacaacaacatcggtatactgggcttcggtaaagcggcaaaaatcgctttagacgaacttgataaatacgagaaggaaatcgcgcctctgagaaaccgcctgcgcgacggtcttgtaaaaacgattcccaatataaaaataaacggtcatcctgcggatgtgcttccaaatacattgaacgtttcattccccggcgcggaaggggaagctatactcctctccatggatctagccggaatagaggcctcaaccggatcggcctgcgcttcaggcagccttgaaccgtcccacgtgcttatggctaccggcgtagggcctgaactggctcacggctcaatccgtttcagtctgggctgggggataacaactgatgatattgattatataatagaaacattgccgcctataatcgcccggcttagggcgatgggaggaatttatgcctga

SEQ ID NO: 29968 - protein, 329 aa, Unknown
  Obtained from environmental sample
  DOMAIN (1)...(310): Aminotransferase class-V
  misc_feature (1)..(329): Xaa is any amino acid
MRGFFLGDRIEYAVFQTMRQLASAPNSSPLKEGRCEFITSSIEHPCVLNSAKNLQDLSFKVYFIQVDGYGKIDIDAFKKALSDKTLFVSVMMANNEIGTIQDIKEIASLAKASGAWIHTDAVQALGKIPVNVDDLGMDYLTASAHKIYGPKGVGALYARKGSPLFPLIHGGHQEEGLRAGTYNNIGILGFGKAAKIALDELDKYEKEIAPLRNRLRDGLVKTIPNIKINGHPADVLPNTLNVSFPGAEGEAILLSMDLAGIEASTGSACASGSLEPSHVLMATGVGPELAHGSIRFSLGWGITTDDIDYIIETLPPIIARLRAMGGIYA

SEQ ID NO: 29969 - DNA, 648 bp, Unknown
  Obtained from environmental sample
  misc_feature (1)..(648): n is a, c, g, or t
atggcagtcaacatatccgaagctatggccgaaaccgcagatagggtgctcttcctagacgccgaccgcgaacacgccgagaccgccgcggcgcggcttgacaaagtggaagtcctgttcggcgacgccaccgacacaaacttcctgcaagaggtaaatgtggcgggatgcgacttctacctggcggccggaaaagacatggaagacaacatcatgtcgtgcttcctagccaaagcggagggcacgcgccgcgtcatcgccctacgcgacgacgaccgccacttcgaccgttttatggcgctgggcatagaccacgtgataagcccgcgtttagtcacaatgcagagaattatcgagagcattcaaatcgcccccatagactcgctactcaaattgaaagacgccggcctgagcatcgtgcgggccatagtctcaaagcacaattccgccgtcggcaaaccgctgtcaaaactctacaatatcttcaaaaagggaaccatcgtaggcgcggtcgtcagggacaagacaatcatcatcccaaagggcggcacggaaatcgcggcgggagacgagctgataataatctgctacgaacataatatcccgttagtcaacagaatcttcaaagccgacttcaaggaatcatga

SEQ ID NO: 29970 - protein, 215 aa, Unknown
  Obtained from environmental sample
  DOMAIN (139)...(209): TrkA-C domain
  misc_feature (1)..(215): Xaa is any amino acid
MAVNISEAMAETADRVLFLDADREHAETAAARLDKVEVLFGDATDTNFLQEVNVAGCDFYLAAGKDMEDNIMSCFLAKAEGTRRVIALRDDDRHFDRFMALGIDHVISPRLVTMQRIIESIQIAPIDSLLKLKDAGLSIVRAIVSKHNSAVGKPLSKLYNIFKKGTIVGAVVRDKTIIIPKGGTEIAAGDELIIICYEHNIPLVNRIFKADFKES

SEQ ID NO: 29971 - DNA, 474 bp, Unknown
  Obtained from environmental sample
  misc_feature (1)..(474): n is a, c, g, or t
ttgttgggtgttagtataaatggggattttatatataacatgaccgaacaaataacccacaataaccaaatcctcgcaataataattagccatgactattcaaacaaaggcattacattttttaccccagatgatttttcccaacagcttgcctacatgaatcacccgcaaggtaaaataatccagccgcatgtgcataatatcgtaaaacgcgaagtcctgtatacaaaagaagtcctgtttattaaaaaaggaaaagtaaaaacagatttttactccgatgaccgggaatatatatgctcaagaatactggaaacaggcgatataatactgctggcggcaggcggtcatggttttgaaatgcttgaagatacggaaatgttcgagattaaacaggggccttacgccggagaaaatgataaaacccggtttgagggaaaaaacaatgcaaagaaagaaagtattcataagtag

SEQ ID NO: 29972 - protein, 157 aa, Unknown
  Obtained from environmental sample
  misc_feature (1)..(157): Xaa is any amino acid
MLGVSINGDFIYNMTEQITHNNQILAIIISHDYSNKGITFFTPDDFSQQLAYMNHPQGKIIQPHVHNIVKREVLYTKEVLFIKKGKVKTDFYSDDREYICSRILETGDIILLAAGGHGFEMLEDTEMFEIKQGPYAGENDKTRFEGKNNAKKESIHK

SEQ ID NO: 29973 - DNA, 810 bp, Unknown
  Obtained from environmental sample
  misc_feature (1)..(810): n is a, c, g, or t
gtggtcttaccgcagccagattcgcctaccaggccgaaaatttctccccgccctatttcaaagctcacgttgttaagcacgggctttttttcttttttgcctatgatgcccaagggccttgaggtatatatgtttgaaacagagcggacacttagaaacggctggttgctattctgtggcatcataaactttgtttccaatatttctcacaaaggcacgaagtacacagaggacacaaaggaaaacaagaaaagtctaagatttttagattattcgtcttctctctgtgttcttagtgttctctgtgcctttgtgagatgtatttttctatgtttgtttattgcttttccggcttatgcggaaagccctgttgctcaatcagggaaaaacctgacactggatgaggcattaaacgccctgggtaaagcggctgaactacgctgggatccgtttttttcctccggggcgctgatctttggaacgcatgaagtcgccttcgcttccggtaacgaaggagaaagcggcgctgttctccttgaccaccgggatatattgacgcttcccctgccgtttttagaacaaggggcacttaagtttcccgaggcttttattaatcaggtaaaaagcgccttcaaccgctacatggaagaagatcgcgacaggttcaggatagcggcaataatagtagacccgggccacgggggcaaagaccccggcgcttcctgggaccacacagttcagggcaaaaccttaaaatccgtggaaaaggatattaccttaaaagtttcacgcctgtgtattccgccctga

SEQ ID NO: 29974 - protein, 269 aa, Unknown
  Obtained from environmental sample
  misc_feature (1)..(269): Xaa is any amino acid
MVLPQPDSPTRPKISPRPISKLTLLSTGFFSFLPMMPKGLEVYMFETERTLRNGWLLFCGIINFVSNISHKGTKYTEDTKENKKSLRFLDYSSSLCVLSVLCAFVRCIFLCLFIAFPAYAESPVAQSGKNLTLDEALNALGKAAELRWDPFFSSGALIFGTHEVAFASGNEGESGAVLLDHRDILTLPLPFLEQGALKFPEAFINQVKSAFNRYMEEDRDRFRIAAIIVDPGHGGKDPGASWDHTVQGKTLKSVEKDITLKVSRLCIPP

SEQ ID NO: 29975 - DNA, 315 bp, Unknown
  Obtained from environmental sample
  misc_feature (1)..(315): n is a, c, g, or t
ttgccctgccatcgccgcgttcatcccctggccctggataaaggcaaaatcgatcccgcctacatcacggagcaggaagagattttccgcaaacagatggagaaagacgaaaaactccagggcaaaccggccaacgtgcttgaaggcatacttaaaggcaagatcaacaagcacctttcggaagtctgccttcttgagcagagttacgtgaaggacgaaaagcacaccgtcgcccaggcgctggaaaatgtcgccaaacaggcgggggcgaagctggagatcgctgagtatgtttacttcaaagtaggggtatga

SEQ ID NO: 29976 - protein, 104 aa, Unknown
  Obtained from environmental sample
  DOMAIN (4)...(104): Elongation factor TS
  misc_feature (1)..(104): Xaa is any amino acid
MPCHRRVHPLALDKGKIDPAYITEQEEIFRKQMEKDEKLQGKPANVLEGILKGKINKHLSEVCLLEQSYVKDEKHTVAQALENVAKQAGAKLEIAEYVYFKVGV

SEQ ID NO: 29977 - DNA, 558 bp, Unknown
  Obtained from environmental sample
  misc_feature (1)..(558): n is a, c, g, or t
atgatgcaggctgttatagacgcgaccgaagagaaaatgaaaaagatcgcggcaaacctgaaagactcgtttgccgcgttgcgtacagggcgggcctcggccgccctgtttgacaagctccgcgtggattattacggcgagaagtccccgcttaaccaggtggcgaatatctccattccggaagcgcggctcatagtcatccagccctgggacaagaaactcatcggcgaaatcgagaaagcgatccgcatgtcggagttgtcgcttaacccctccaacgacgggaaggtcatacgcgttgccgttccgccgcttaccgaggatcgacgcaaggaacttgccaaactggccaaaaaccaggcggaacagtcccgcgtatcgattcgcaacacgcgcagagacggcattgatgatttgaaaaaaatgctgaagggctcctcaattacagaggacgatgaaagcaagggcgccgcaggcttgcaaaaacttaccgacagctatatagagaaggtgaatcagatcctcgcggaaaaagaaaaagaaatcatggaagtgtga

SEQ ID NO: 29978 - protein, 185 aa, Unknown
  Obtained from environmental sample
  DOMAIN (19)...(183): Ribosome recycling factor
  misc_feature (1)..(185): Xaa is any amino acid
MMQAVIDATEEKMKKIAANLKDSFAALRTGRASAALFDKLRVDYYGEKSPLNQVANISIPEARLIVIQPWDKKLIGEIEKAIRMSELSLNPSNDGKVIRVAVPPLTEDRRKELAKLAKNQAEQSRVSIRNTRRDGIDDLKKMLKGSSITEDDESKGAAGLQKLTDSYIEKVNQILAEKEKEIMEV

SEQ ID NO: 29979 - DNA, 525 bp, Unknown
  Obtained from environmental sample
  misc_feature (1)..(525): n is a, c, g, or t
atgaaaaaaacggctgttcttggcgctacaggctcaatagggaaaaacgcccttgatgtaatcgcgcgcagtaaaggcgattttaagcctgttcttttaagcgcccacaacaacagggacggtcttgaggaagcgggcaaggcttggcccgaggccaaaaagattcttagcggacagccgggaggcagggaaaagctccttgccgcgattgccgactgcggcgcggatattacaattaacggcatttccggcgcggcggggcttgagccttcaatggcggcgatagaagccggttccgatctcgccctggcaaacaaggaaaccctggtaatggcgggaccccttgtccttaaacgggcaaatgaaaaaaacgttgccgttattccggttgattccgagcactcatgcgtctttcacctgctggaagctcattgcaaagcagacatgaataaccttgacgagatcatccttaccgcgtcaggcggcccgttcaggaattttctatcgaagaaatctcggccataa

SEQ ID NO: 29980 - protein, 174 aa, Unknown
  Obtained from environmental sample
  DOMAIN (127)...(167): 1-deoxy-D-xylulose 5-phosphate reductoisomerase C-terminal
  misc_feature (1)..(174): Xaa is any amino acid
MKKTAVLGATGSIGKNALDVIARSKGDFKPVLLSAHNNRDGLEEAGKAWPEAKKILSGQPGGREKLLAAIADCGADITINGISGAAGLEPSMAAIEAGSDLALANKETLVMAGPLVLKRANEKNVAVIPVDSEHSCVFHLLEAHCKADMNNLDEIILTASGGPFRNFLSKKSRP

SEQ ID NO: 29981 - DNA, 384 bp, Unknown
  Obtained from environmental sample
  misc_feature (1)..(384): n is a, c, g, or t
atgggtttggggatggcgtttggcaaggaaaacaaggggcttgtaccggcaagcccgaacaagagcgttgccggcttcatcggggcaatcctcgccccaatcatcgtgggtgtcggcgccgtcctgcttctgcctgatgtgtttgttctaaatcgctgttctataattggcaatccggttgtcgcggcatgtattctgggactgttaaccggagtggcggcgatactgggcgatcttggagaatcagctataaagcgaagctccggcatcaaggattcgggcagcgttatccccggcaggggcggtgtgcttgactccattgattctctggcactggccgctccggtgttttatttggtcttttctatgctgtttatcatttaa

SEQ ID NO: 29982 - protein, 127 aa, Unknown
  Obtained from environmental sample
  DOMAIN (1)...(124): Cytidylyltransferase family
  misc_feature (1)..(127): Xaa is any amino acid
MGLGMAFGKENKGLVPASPNKSVAGFIGAILAPIIVGVGAVLLLPDVFVLNRCSIIGNPVVAACILGLLTGVAAILGDLGESAIKRSSGIKDSGSVIPGRGGVLDSIDSLALAAPVFYLVFSMLFII

SEQ ID NO: 29983 - DNA, 687 bp, Unknown
  Obtained from environmental sample
  misc_feature (1)..(687): n is a, c, g, or t
ttgcgaaactttctatattttaaattgtctatgactcccctcaaactatataaaaaactcttttccctctatggggcgcaaggatggtggcctgtacgtagcgagcacaaggggagggggtatcacccgaatgaatttggtttgccaaaaacgagaaaaggcagatttgaagtttgcatgggcgcaattttaacccaaaacaccgcttggactcaagtggaaaaagccttaataaacctctccgccgcaaagataaataccccagaaaaaatcctaaaaacagacgaaaaaaccatagcaacactgataacccccgccggctatagaaaccaaaaaaccaagtatttaaaaaacatcgcagagtggttcataaataactctccactctccactctccactctccactagaaccagttcgtagcaatttacttaaagtaaaaggtgttggcagagaaaccgcggactccattttgctctacgcttttcatttgcccacttttgtcatagatacatacacaaaaagagcacttgccgcgttaaaaatttttgacgaaaaaactccttacgaaactttgcggttgtggtttatggagaatttagagctatctgtgccgctatttcaagaatatcacgctttatttgtggagctggggaagaatagagaatattcaaaactttttccttaa

SEQ ID NO: 29984 - protein, 228 aa, Unknown
  Obtained from environmental sample
  DOMAIN (131)...(160): Helix-hairpin-helix motif
  misc_feature (1)..(228): Xaa is any amino acid
MRNFLYFKLSMTPLKLYKKLFSLYGAQGWWPVRSEHKGRGYHPNEFGLPKTRKGRFEVCMGAILTQNTAWTQVEKALINLSAAKINTPEKILKTDEKTIATLITPAGYRNQKTKYLKNIAEWFINNSPLSTLHSPLEPVRSNLLKVKGVGRETADSILLYAFHLPTFVIDTYTKRALAALKIFDEKTPYETLRLWFMENLELSVPLFQEYHALFVELGKNREYSKLFP

SEQ ID NO: 29985 - DNA, 633 bp, Unknown
  Obtained from environmental sample
  misc_feature (1)..(633): n is a, c, g, or t
atggaaaaaacaaaagaattaccagcataccccagaggtataacttttgagcaagtttgggcggctttaatggaagaccgggaacggcagaaggaaaccgaccggcagatgaaggaagtttttcaggaaatttccgaactgcagaaggaaaccgaccagttcctgaaggaaaacgcccgggaaatgaaggaaaacgcccgggaaatgaaggaaaacgtccgggaaataaaccgggaaataaaagaagccgagcgggtagtaaaagcggtaagcatgcagatgggcggcctgcataacagctttggggaaatggcggagtttatggtcgctccgggcgtcgccgatctgtttaccgaaattggttttcatattacggaatacccgatatgcaacagaaaaatcaaggatgagaataagagaaccttgacggaaatagacctgttgatgggaaacggggattatgtaatcgcggtagaagtgaaaaccagtctgggggaaaaagatatagaagaacatcggaaacggcttgagatattacataaacatatcagcaagacgggagacccgcataaagatacttggcgggatggcggtagctgtaccggacgaagacggcagaaaagcgatacttga

SEQ ID NO: 29986 - protein, 210 aa, Unknown
  Obtained from environmental sample
  misc_feature (1)..(210): Xaa is any amino acid
MEKTKELPAYPRGITFEQVWAALMEDRERQKETDRQMKEVFQEISELQKETDQFLKENAREMKENAREMKENVREINREIKEAERVVKAVSMQMGGLHNSFGEMAEFMVAPGVADLFTEIGFHITEYPICNRKIKDENKRTLTEIDLLMGNGDYVIAVEVKTSLGEKDIEEHRKRLEILHKHISKTGDPHKDTWRDGGSCTGRRRQKSDT

SEQ ID NO: 29987 - DNA, 843 bp, Unknown
  Obtained from environmental sample
  misc_feature (1)..(843): n is a, c, g, or t
atggcggcgcgaatcgaaaccacggagttcagcctggaaagcggagaggcgggcaatacgctggttacagtggaaatctcccccgatcttgcgccggggggatatgaaaaacaggctatcagcgttttatctgacgggaaccccgccggagagattatcttttatacgggacgcgcccttcaccatccatttttatacggaacagaagaggattttaagaaggttgaaaaaaagatcgcttcctgcgattgggcttctgaacgctttaacgattataaacgccaggcggcggaattggtaatcgacgaaattgctccggaaaaaccttatttatatcagaccgataaaccctatatcgcgtattgggcggcggtggtctggacactgaagggggatgaaacctgcgccgccaaagccatcgccctcctgcgccgggtctgcgatcctcaaatgggttggcttagaacaaaaaagggatgcaatcaggaactggttcacgaagggatattctttaaataccttgccatgatctacgatctgctttattaccacaatgggctcggcgtggaggatcggaaaaacattgaagtaactctgcgggcctacatggaattgatcgattttgagctggtgcaggggcatctttcaaattggactctgtgggaactgacgggagcactgttttccgctgaggttttgcaggatcgggagcagatggaacggttcatctacggcccgggaggctttaccgaacatttgtctgcaggcgtactagatgacgggtggtggtacgaggtatctatcagctataacctgatggtagcggggctttttacaccatag

SEQ ID NO: 29988 - protein, 280 aa, Unknown
  Obtained from environmental sample
  misc_feature (1)..(280): Xaa is any amino acid
MAARIETTEFSLESGEAGNTLVTVEISPDLAPGGYEKQAISVLSDGNPAGEIIFYTGRALHHPFLYGTEEDFKKVEKKIASCDWASERFNDYKRQAAELVIDEIAPEKPYLYQTDKPYIAYWAAVVWTLKGDETCAAKAIALLRRVCDPQMGWLRTKKGCNQELVHEGIFFKYLAMIYDLLYYHNGLGVEDRKNIEVTLRAYMELIDFELVQGHLSNWTLWELTGALFSAEVLQDREQMERFIYGPGGFTEHLSAGVLDDGWWYEVSISYNLMVAGLFTP

SEQ ID NO: 29989 - DNA, 360 bp, Unknown
  Obtained from environmental sample
  misc_feature (1)..(360): n is a, c, g, or t
ttgaatcgagaatctttaggcgtttggcattatccgtttggggtaagtgaaaacatcactccggtaaaactgttcagttccggtgaagcggaattttttgaagaaaactctgcgctaccttttaaatgtacagatattacttcacgaaaaacaaagcgtggctttgtaattgaaatcccaataaaaaacgatgaagatttttacggatttggtctccagtttcattcattcaaccattccggacgcaggcgttttttgaaagtaaacagcgacccggtttgtaataccggagaaagtcacgggccggttccgttttatgtatccagtgccggatacggattgttgtctcggccgatctga

SEQ ID NO: 29990 - protein, 119 aa, Unknown
  Obtained from environmental sample
  misc_feature (1)..(119): Xaa is any amino acid
MNRESLGVWHYPFGVSENITPVKLFSSGEAEFFEENSALPFKCTDITSRKTKRGFVIEIPIKNDEDFYGFGLQFHSFNHSGRRRFLKVNSDPVCNTGESHGPVPFYVSSAGYGLLSRPI

SEQ ID NO: 29991 - DNA, 324 bp, Unknown
  Obtained from environmental sample
  misc_feature (1)..(324): n is a, c, g, or t
atggctgaagcgttgcataaatttaaacttaaaaaagaagatactgtccaagtaattaccggcaaagacaagggaaaacgaggcagaatcttaaaaataaatcgcgacactgacagagttgttgttgaaggcataaacatagtcaagaaagcgatgaagaaaagaaaacagcaagacccgggcggaatagccgaaattgaagcggcgattcattcgtccaacctgatgattgtttgcaaaaaatgcggacctacccgcatcggttacaaacttgacggggataaaaaggtcagattttgcaagaaatgcggggaggtattataa

SEQ ID NO: 29992 - protein, 107 aa, Unknown
  Obtained from environmental sample
  DOMAIN (10)...(43): KOW motif
  misc_feature (1)..(107): Xaa is any amino acid
MAEALHKFKLKKEDTVQVITGKDKGKRGRILKINRDTDRVVVEGINIVKKAMKKRKQQDPGGIAEIEAAIHSSNLMIVCKKCGPTRIGYKLDGDKKVRFCKKCGEVL

SEQ ID NO: 29993 - DNA, 333 bp, Unknown
  Obtained from environmental sample
  misc_feature (1)..(333): n is a, c, g, or t
ttgactatgtttatgccttcaacaacaactctgtcagtgtcgcgatttatttttaagattctgcctcgttttcccttgtctttgccggtaattacttggacagtatcttcttttttaagtttaaatttatgcaacgcttcagccatgtcctactcctataaaacctctggggcgagagaaacgattttcataaattcgcttttctcccctcattcacgcgcaacaggtccgaagatacgctttcctttcggatttaaggcggcgtcgataatgacgcaggcgttatcatcaaacctgatatatgtcccatcggggcggcggaaactcttatga

SEQ ID NO: 29994 - protein, 110 aa, Unknown
  Obtained from environmental sample
  misc_feature (1)..(110): Xaa is any amino acid
MTMFMPSTTTLSVSRFIFKILPRFPLSLPVITWTVSSFLSLNLCNASAMSYSYKTSGARETIFINSLFSPHSRATGPKIRFPFGFKAASIMTQALSSNLIYVPSGRRKLL

SEQ ID NO: 29995 - DNA, 1017 bp, Unknown
  Obtained from environmental sample
  misc_feature (1)..(1017): n is a, c, g, or t
ttgttggcggcacttccaataatcatcgtcaagtcggcttcaggctggcctaagggcaatgccaagaactcagccaaagaagacgacattggaagtgaattatggactacagcggctcttccaagttccagtaccccaaacgccagccgggtgaccaagattgagctgaacaaaaaaatccttaatttggaagtcggccaatccgaaacgctgaggtcaaccattttgccaattcaagcggcagaaaaaaatgtgtactggactagcagcaacacttcagtggctgctgtgtccgccagcggctccaatgcgcttgaatgcatcgtgagggccgttggcaatggctatgcgacgataatggtgcagagcagggatggcgggtttattgcgtcctgcgacgtcacagtcaaagcccccccaatcacaggcatcaggctggatacgcgctcggaggagcttgtcataggggcggcgggcatggagacgctgaccttgtatgccgccatcaatcccccacaggcggcgaacaaaagaatgcagtggagcagcagagacacctctgtggccacggtgtcccccagcggccccaatgcggctgagggcatcgtgagggccgttggcagtggcagcacggtgataactgtgaagagcagcgacggcgcgtttcaacaaagctgcaacatcacagttcgagtcctcgtcacgagcatcggactaaaatcctcagagacgctgaaggttgggcaaacgcgaaaccctgtacccgacattccagccgagtggagccacgaacaaaaacttggcttgagcttccgaacccgaaaatgtggcatcggtggatggcaaaggccgcgttacggcaatcagccgaggcagggcagtgataaccgccaccgcggcagatggcagcagcgtatctgcacgagtagtcctaacagtcgagccaaacgaggcgcagttgagggccgagcgagagcgggccgccgaagaagaagccaagcgcaaggctgccgatga

SEQ ID NO: 29996 - protein, 338 aa, Unknown
  Obtained from environmental sample
  DOMAIN (140)...(228): Bacterial Ig-like domain (group 2)
  misc_feature (1)..(338): Xaa is any amino acid
MLAALPIIIVKSASGWPKGNAKNSAKEDDIGSELWTTAALPSSSTPNASRVTKIELNKKILNLEVGQSETLRSTILPIQAAEKNVYWTSSNTSVAAVSASGSNALECIVRAVGNGYATIMVQSRDGGFIASCDVTVKAPPITGIRLDTRSEELVIGAAGMETLTLYAAINPPQAANKRMQWSSRDTSVATVSPSGPNAAEGIVRAVGSGSTVITVKSSDGAFQQSCNITVRVLVTSIGLKSSETLKVGQTRNPVPDIPAEWSHEQKLGLSFRTRKCGIGGWQRPRYGNQPRQGSDNRHRGRWQQRICTSSPNSRAKRGAVEGRARAGRRRRSQAQGCR

SEQ ID NO: 29997 - DNA, 468 bp, Unknown
  Obtained from environmental sample
  misc_feature (1)..(468): n is a, c, g, or t
atgaacccggacggatcggttaaccggcgcttgctcaaggagaaggtctttgggaaaaaaagtgaaattaccgcactggaagcgattgtccacccgcagaccgaccgtatggcgcttgaatggattgcctcgcataagggcaaaccctgcgttataaacgcggcattgctccatagaatggcggtttttgggcaacttaactgccttttactggttgacgccccgttttttgtccggctgttacgggcaaagcgcagagacaggctctcatgggtttcaattttaaggataatgaagaaccagaagcgttttacccttcaatatttggccgtaaatgccgatatttacatagtagagaactcgaaaaaaaaaggttttttaccatgttccgccgccaatgaaacaaaactggaacggcagatcagcgagatcctgtcaaaaatggaacttgaaaacaaatcaatttag

SEQ ID NO: 29998 - protein, 155 aa, Unknown
  Obtained from environmental sample
  misc_feature (1)..(155): Xaa is any amino acid
MNPDGSVNRRLLKEKVFGKKSEITALEAIVHPQTDRMALEWIASHKGKPCVINAALLHRMAVFGQLNCLLLVDAPFFVRLLRAKRRDRLSWVSILRIMKNQKRFTLQYLAVNADIYIVENSKKKGFLPCSAANETKLERQISEILSKMELENKSI

SEQ ID NO: 29999 - DNA, 1176 bp, Unknown
  Obtained from environmental sample
  misc_feature (1)..(1176): n is a, c, g, or t
atgaccgaagagcggaaaaagattatcgtagtagacgataatctcgaagacctgaccgccctcaaatataccttgaaagacctttacggggtatatccctgccaatccacggtaaatatgttcgatttgcttgaacatattaaacccgatttaattctgcttgatgtggagatgccggacatgaacggttatgaggcggcaaggaaacttaaaaacaacgctcaataccgggaaataccccttatcttcctgacttccatgaacgacccgacaagcgaaatggaaggcctaaagctgggcgccgttgattatatctccaaaccttttctcgcccctttgctgctccagcggataaagacgcatctgtctctgatggagcatcaaatggaagcgcagaacgcgtcccgcgccaagggcgagttcctttcgcacatgagccatgaaataaggtccccgttaaacgccgttataggcatgataaacatagcgaccgatgaaaatgacattgactcgataaaactttatatcgggaaggcggacaacgcggcaaagcacgtgctgggcgttatcaacgacattcttgacatgtctaaaattgaggctgataaacttgatctttccaacggcgaatttgacttcgggaaaatgatggccaacattgtcgacgtaaccggcatccgcgccagggagaaacaccagcaaattgtcgtcaacatgaatcccaatattccgtctttcgtaatcagcgacgaattgcggctgtcgcaggttattaccaacctgatgacaaacgcgataaaattcacccctgaaaacggcaaggtgacgctgagcgcggaaaagctggaagaaaaagacggcgatattaccataaaaatcgaagtcgcggattcaggcatcgggatttcaccggaacagcaggaaaaacttttccaggcatacaatcaggccgactcaagcatcaccagcaaattcggcggcaccggccttgggctggtcattaccaaacggattatagaactgatgcggggcgcgatatggattgagtcggaacttggcaaaggggcgaaatttatatttaccataaaagtaaaacagggggcgcagaccaaaaccgcggcctcgggcagtgcgccctcgggcggcgcgcccgttctcggccgattttgtacatga

SEQ ID NO: 30000 - protein, 391 aa, Unknown
  Obtained from environmental sample
  DOMAIN (137)...(202): His Kinase A (phosphoacceptor) domain
  misc_feature (1)..(391): Xaa is any amino acid
MTEERKKIIVVDDNLEDLTALKYTLKDLYGVYPCQSTVNMFDLLEHIKPDLILLDVEMPDMNGYEAARKLKNNAQYREIPLIFLTSMNDPTSEMEGLKLGAVDYISKPFLAPLLLQRIKTHLSLMEHQMEAQNASRAKGEFLSHMSHEIRSPLNAVIGMINIATDENDIDSIKLYIGKADNAAKHVLGVINDILDMSKIEADKLDLSNGEFDFGKMMANIVDVTGIRAREKHQQIVVNMNPNIPSFVISDELRLSQVITNLMTNAIKFTPENGKVTLSAEKLEEKDGDITIKIEVADSGIGISPEQQEKLFQAYNQADSSITSKFGGTGLGLVITKRIIELMRGAIWIESELGKGAKFIFTIKVKQGAQTKTAASGSAPSGGAPVLGRFCT

SEQ ID NO: 30001 - DNA, 714 bp, Unknown
  Obtained from environmental sample
  misc_feature (1)..(714): n is a, c, g, or t
ttgtttattgaaaaaaacgtggaacacgaaaagataaaaagcgccgaggatgaagcgcggggtatactgcatgacgcggaagcggcgcgggaaaaagcggagcggactatctccgagatcaacacccagcgcgaatatgaagcgcttgataaagaacgccatgccgccgaagaaaaagagcagttgtaccgcaaagaggtgcagcagaaggaaaggcagctcctggaactggatgaacagataaagcagtatgccgccctcattgaacagcaggaaaaagaacttgccgagaaaaaggcgggcattgaagaggaagtcactgaaaagaaaaaacaggttgaaaccctgttgaaaaaagaaaaaaaactgaccgatgatctggattcggaagtggtgtttaagtttgagcggattatcagaaacaagatgggcctgggaattgtcgccattaaaggcaatgtctgcatgggctgtcacatgatccttcccgcgcaattttcaaataatgtgcgcctgggcgaagaatttattttctgcccttattgttcgcggattttatattacgaagaatcgtccgagggtgaagaactcttctttgatactgaagattcaggcgctttgtatgattctgaagaaatggaagaagaagaatttgaggaagaggacgacaaagaagaagagaaagtaggcaatattgattttgaagaagcgtaa

SEQ ID NO: 30002 - protein, 237 aa, Unknown
  Obtained from environmental sample
  DOMAIN (1)...(190): Uncharacterized ACR, COG1579
  misc_feature (1)..(237): Xaa is any amino acid
MFIEKNVEHEKIKSAEDEARGILHDAEAAREKAERTISEINTQREYEALDKERHAAEEKEQLYRKEVQQKERQLLELDEQIKQYAALIEQQEKELAEKKAGIEEEVTEKKKQVETLLKKEKKLTDDLDSEVVFKFERIIRNKMGLGIVAIKGNVCMGCHMILPAQFSNNVRLGEEFIFCPYCSRILYYEESSEGEELFFDTEDSGALYDSEEMEEEEFEEEDDKEEEKVGNIDFEEA

SEQ ID NO: 30003 - DNA, 603 bp, Unknown
  Obtained from environmental sample
  misc_feature (1)..(603): n is a, c, g, or t
gtgcacgccggggagaagtccgtcgtcatcctattctcctccacggagtggacgctcatcgaggccccggccaaagaggccggcatagacaaatttatcccaaagccgatcttcccgtcaagcatagtcgactcgataaacgaggtaatgggcatacgcagggtacaccggtcacaggacgaggtacgcgacatcaccggcattttcgccgactaccgcgtgctcttggcggaggacgcggagataaacgccgagatcgtgaaaagcctcttagaaccgacaagcatctccatagactgcgccgcaaacggaacggaggcggtcaaactcttctcggaagcgccggacaagtacgacttaatcttcatggacgtacagatgccggagatggacggcttggaagccacacggcgtataagagccctggacacgccgcgggccaagagcataaccatcgtagcgatgacggccaacgtcttcaaggaagacgtggacatgtgcatagaggcggggatggacgaccatgtcgggaagccgattgatatggatgaactgattgggaagttgaataaatatttgagggcggcgacaaataatacataa

SEQ ID NO: 30004 - protein, 200 aa, Unknown
  Obtained from environmental sample
  DOMAIN (72)...(190): Response regulator receiver domain
  misc_feature (1)..(200): Xaa is any amino acid
MHAGEKSVVILFSSTEWTLIEAPAKEAGIDKFIPKPIFPSSIVDSINEVMGIRRVHRSQDEVRDITGIFADYRVLLAEDAEINAEIVKSLLEPTSISIDCAANGTEAVKLFSEAPDKYDLIFMDVQMPEMDGLEATRRIRALDTPRAKSITIVAMTANVFKEDVDMCIEAGMDDHVGKPIDMDELIGKLNKYLRAATNNT

SEQ ID NO: 30005 - DNA, 300 bp, Unknown
  Obtained from environmental sample
  misc_feature (1)..(300): n is a, c, g, or t
atggtaaaaacggcgaacttaagcatacgaattgacccacagacaaaaaagggagcagaacaattattctccaattttggaatcaccatatccgatgcggtgaacatcttcttgcgccaatcgcttatggtaggcggtctgccatttgaaatgaaacagccccgttacaacgccgaaactgaggccgccatgcaggaagcgcgtgatattatgagcggaaagaaaaaggcaaaaagttattctaacgccgatgaattgtttgtggaattggacgcggagtacgaagcggaaaacagttaa

SEQ ID NO: 30006 - protein, 99 aa, Unknown
  Obtained from environmental sample
  DOMAIN (4)...(90): RelB antitoxin
  misc_feature (1)..(99): Xaa is any amino acid
MVKTANLSIRIDPQTKKGAEQLFSNFGITISDAVNIFLRQSLMVGGLPFEMKQPRYNAETEAAMQEARDIMSGKKKAKSYSNADELFVELDAEYEAENS

SEQ ID NO: 30007 - DNA, 300 bp, Unknown
  Obtained from environmental sample
  misc_feature (1)..(300): n is a, c, g, or t
atgttaaccttacatacaaccaatcaattccgcaaagatgagaaacttgcccgaaaacgaggcttaaatacagctctcttaaaatcggtaatccaaaccctgctggaagaaaaacctttagccccaaagtacaaggatcatccgctcgttggaaattatatcggctttcgggagtgtcatattctaccgaactggcttttaatttacgctgtagataaaggccgtctgatacttaccgcttcccgaacaggaacgcacaccgaccttttcgataaaaagaaacggcaaagaaaaagttga

SEQ ID NO: 30008 - protein, 99 aa, Unknown
  Obtained from environmental sample
  DOMAIN (4)...(90): Plasmid stabilisation system protein
  misc_feature (1)..(99): Xaa is any amino acid
MLTLHTTNQFRKDEKLARKRGLNTALLKSVIQTLLEEKPLAPKYKDHPLVGNYIGFRECHILPNWLLIYAVDKGRLILTASRTGTHTDLFDKKKRQRKS

SEQ ID NO: 30009 - DNA, 495 bp, Unknown
  Obtained from environmental sample
  misc_feature (1)..(495): n is a, c, g, or t
ttgatggacgaaagcctggagtggaacatagcttttggagtcatgcagatcaagggccataatttgaaaaactttttcggcgggcttttcagcctgcgggacgaaaaggccatgcgccgccttgccgaggaatacatcaaaaaactggaaataaaatgcaccggatcaaagcaggccgccaaggagctttccggcggcaatcagcagaagatctgcctttccaaggcctttgccctggaaccgaaactgctctttgtttgtgagcccacgcggggcatagacgttggcgcgaaaaaaatcgtgctggataccctgcgcttctacaatcagagcaggggaacgaccattgtgatgatctccagcgagcttgaggagcttcgttcaatctgcgacagaatcgccatagtggacgaagggaagatcgcggggatactgccgcccgaagcgcctgccgcggagttcggtttgttaatgtccggagagaagatagcatga

SEQ ID NO: 30010 - protein, 164 aa, Unknown
  Obtained from environmental sample
  DOMAIN (12)...(139): ABC transporter
  misc_feature (1)..(164): Xaa is any amino acid
MMDESLEWNIAFGVMQIKGHNLKNFFGGLFSLRDEKAMRRLAEEYIKKLEIKCTGSKQAAKELSGGNQQKICLSKAFALEPKLLFVCEPTRGIDVGAKKIVLDTLRFYNQSRGTTIVMISSELEELRSICDRIAIVDEGKIAGILPPEAPAAEFGLLMSGEKIA

SEQ ID NO: 30011 - DNA, 945 bp, Unknown
  Obtained from environmental sample
  misc_feature (1)..(945): n is a, c, g, or t
atgaaaaaacgcattgtaattgccctgggggggaacgccctcggggataacctgaaagagcagatggaggcggccagggtaacttccggcgccatagcggatctggttgaggagggccatgagatcgttgtggttcacggcaacggcccgcaggtgggtatgattgaaaccgcctttgagaccgccgccaaagccgacaggcattttccggtgctgcccatgtcggtctgcgttgccctgagccagggttatatcggctacgatttgcagaacacgatccgcatggagcttgacaacaggaacatgaagaaacaggtcgctacaattatcacgcaggttgaggttgacccccgtgacaaggcctttgaaaacccgaccaagcctatcggcggctttatgagcagagaagaggcggaagttctcaagtcaaagggcgttccggtgatggaagacgcgggcaggggctggcggcaggtggtggcctcaccgaaaccggttaacattatcgaagcccagaccatcaaggcgctattggccgcggggcatatccccattgccgcgggcggcggagggattcccgtcgccatgaaggacggccagtaccggggcatgagcgccgtgattgacaaggatttttccgcggccaaactcgctgagcttatcgacgcggatatgctgatcattttaaccgccgtagaaaaagtcgcgattaactttggcaagccggatcaaaagtggctggacagcatgactgtcgcgcaggcggagaagtatattgccgaaaaccagtttgccaaaggctcaatgcttcccaaggttcaggcctccgtcgcttttgtaaaatcccgcgccccgcagacagaggcgcacagcgccctgatcaccctgcttacaaaggcccgcgacggaattgccggtaagacaggtacaagaataacgccgtaa

SEQ ID NO: 30012 - protein, 314 aa, Unknown
  Obtained from environmental sample
  DOMAIN (3)...(296): Amino acid kinase family
  misc_feature (1)..(314): Xaa is any amino acid
MKKRIVIALGGNALGDNLKEQMEAARVTSGAIADLVEEGHEIVVVHGNGPQVGMIETAFETAAKADRHFPVLPMSVCVALSQGYIGYDLQNTIRMELDNRNMKKQVATIITQVEVDPRDKAFENPTKPIGGFMSREEAEVLKSKGVPVMEDAGRGWRQVVASPKPVNIIEAQTIKALLAAGHIPIAAGGGGIPVAMKDGQYRGMSAVIDKDFSAAKLAELIDADMLIILTAVEKVAINFGKPDQKWLDSMTVAQAEKYIAENQFAKGSMLPKVQASVAFVKSRAPQTEAHSALITLLTKARDGIAGKTGTRITP

SEQ ID NO: 30013 - DNA, 507 bp, Unknown
  Obtained from environmental sample
  misc_feature (1)..(507): n is a, c, g, or t
ttgcccgagtgccaccaaaggatcaactcgctcgaaaagacgctaaagggcgcaaagcccattcgcgtccttagcgccggggtatatccatacatctctggctcggacacatctttccaagacctctgcgaccacgcaggggccataaacgcagccgccgaagcaggaatagtcggtgtagtgccaacgccctcagaaaagatgctgtcttggcagattgatgtcttggtagggccaacggagcacagtcaaggcaaggacgggccaaaactggccgaccgcctaaaagacattgccccataccgctacttggacgcatacaaaaagggccgcgtcatagagattcctagtgccctcttcgccgccaccagtcaccacagaatagacgcctacgaaatgcttgcaaaggcattgcatccagagaggtttgggggaagtggcggcgagggtaaggtagctgtatccgaatctccatcaatcgggcttgaaaaacccgcgtggaactga

SEQ ID NO: 30014 - protein, 168 aa, Unknown
  Obtained from environmental sample
  misc_feature (1)..(168): Xaa is any amino acid
MPECHQRINSLEKTLKGAKPIRVLSAGVYPYISGSDTSFQDLCDHAGAINAAAEAGIVGVVPTPSEKMLSWQIDVLVGPTEHSQGKDGPKLADRLKDIAPYRYLDAYKKGRVIEIPSALFAATSHHRIDAYEMLAKALHPERFGGSGGEGKVAVSESPSIGLEKPAWN

SEQ ID NO: 30015 - DNA, 690 bp, Unknown
  Obtained from environmental sample
  misc_feature (1)..(690): n is a, c, g, or t
ttgaacgccacaatagaggcggctagtgctggcgaggcaggcaaaggctttgcggttgttgctggtgaaataaaagagcttgccaaccaaagcgcacaaagcgcagacgacatagcaatgcgcatagatggcatacagtctggcactagcaaggcggtgacggttataaaagatgtttcgcagataatagaaaaaataaacgaaggtgtagatgcaatatccaaaaacgttaagcagcagacaaaggcaagcgacgagattgcaaggaacgttgcgcaggcaaactcaggtgccaagcgcgttgccggtgccataagcgaggtagccagtggtagcaaagacatagccaagaatgccggtcaagcgagcaacaatgccaagcgcgtttcagattccatagttgaggtagccaaaggtagcaaggacatagcgcgcaacgcaggcgaggcagctaagggcgtagatcgcgtttccagatccgtaaacgaggtagccaaaggcagcaaagacatagcacgcaacgcaggcgaagccgcaaagggtgcaaacaatgtaagttcaaatgttaccggcatgaatcgggcggcaaaagagagttcgcaagaagtttcgcgagtgaaacaaagcgcagataacctatccaaaatggcggggcagttgcgtactgctatggataagtttaaggtgtaa

SEQ ID NO: 30016 - protein, 229 aa, Unknown
  Obtained from environmental sample
  DOMAIN (36)...(228): Methyl-accepting chemotaxis protein (MCP) signaling domain
  misc_feature (1)..(229): Xaa is any amino acid
MNATIEAASAGEAGKGFAVVAGEIKELANQSAQSADDIAMRIDGIQSGTSKAVTVIKDVSQIIEKINEGVDAISKNVKQQTKASDEIARNVAQANSGAKRVAGAISEVASGSKDIAKNAGQASNNAKRVSDSIVEVAKGSKDIARNAGEAAKGVDRVSRSVNEVAKGSKDIARNAGEAAKGANNVSSNVTGMNRAAKESSQEVSRVKQSADNLSKMAGQLRTAMDKFKV

SEQ ID NO: 30017 - DNA, 510 bp, Unknown
  Obtained from environmental sample
  misc_feature (1)..(510): n is a, c, g, or t
ttggctatgtctttgctaccactggctacctcgcttatggcaccggcaacgcgcttggcacctgagtttgcctgcgcaacgttccttgcaatctcgtcgcttgcctttgtctgctgcttaacgtttttggatattgcatctacaccttcgtttattttttctattatctgcgaaacatcttttataaccgtcaccgccttgctagtgccagactgtatgccatctatgcgcattgctatgtcgtctgcgctttgtgcgctttggttggcaagctcttttatttcaccagcaacaaccgcaaagcctttgcctgcctcgccagcactagccgcctctattgtggcgttcaaagcgagaagattggttttgtcggctatcttctttataacatcggtaacctgccctatttccttggcggctgcacctcagcttgttcatcactccagtggcattgttagattttattgtagcttcatttgccaccttgtttgcttcccctgcattgcttga

SEQ ID NO: 30018 - protein, 169 aa, Unknown
  Obtained from environmental sample
  SIGNAL (1)...(20)
  misc_feature (1)..(169): Xaa is any amino acid
MAMSLLPLATSLMAPATRLAPEFACATFLAISSLAFVCCLTFLDIASTPSFIFSIICETSFITVTALLVPDCMPSMRIAMSSALCALWLASSFISPATTAKPLPASPALAASIVAFKARRLVLSAIFFITSVTCPISLAAAPQLVHHSSGIVRFYCSFICHLVCFPCIA

SEQ ID NO: 30019 - DNA, 1014 bp, Unknown
  Obtained from environmental sample
  misc_feature (1)..(1014): n is a, c, g, or t
gtgctgcacaacttaaaggtttggaggaaccaattactttttgaaggaatttataccaagcaaaaagaattggttttttggaagcaggaaaaaattttgggcgatttgcagattgccgctgacaagtatgttgctgaagtgcataatttcccaaaaaaagcaaaaattgcccctattactggactttgctcggaagttttttcacctgaagtattgaaagcggcaaacgaaatgtgtaaagcccttgatactgccgtggaaagaagagttgacttaaccaaagagttatcagacgaggcttcaaaacgtaccgaccatgacagaaagatagcgattatgcttttaattgttgttttgctcatttctataatttctagcatattcattatgctttccataacaaaacccttgcacacggttgtaaatgctctttccaaaatagagaaaggagacatgaccgtccatattggcttggaacgcaaagacgagcttggaacgctttccaatgcaatggacaacctatcggcaaagttgcagagcatattcaagagcctccggcaagattcggatgctttggcagacgatgccaaaaaactttcagcaataggcaaagagtcatcggagacagcagagaaaaatttgtccagcagcgtgactatagccagcgaagccgaggaagcctccgtgaatgtgaacgcgatggcgagcggagccgaagaagcctcggtgaatgctaacgaggttgcaggggcggcagagcagatgtccactaatatgaacaccatagctgcggcagttgaggaaatgagcgcgagcataaaacaaatatcaagcaatgcaggggaagcaaacaaggtggcaaatgaagctacaataaaatctaacaatgccactggagtgatgaacaagctgaggtgcagccgccaaggaaatagggcaggttaccgatgttataaagaagatagccgacaaaaccaatcttctcgctttgaacgccacaatagaggcggctag

SEQ ID NO: 30020 - protein, 337 aa, Unknown
  Obtained from environmental sample
  DOMAIN (111)...(180): HAMP domain
  misc_feature (1)..(337): Xaa is any amino acid
MLHNLKVWRNQLLFEGIYTKQKELVFWKQEKILGDLQIAADKYVAEVHNFPKKAKIAPITGLCSEVFSPEVLKAANEMCKALDTAVERRVDLTKELSDEASKRTDHDRKIAIMLLIVVLLISIISSIFIMLSITKPLHTVVNALSKIEKGDMTVHIGLERKDELGTLSNAMDNLSAKLQSIFKSLRQDSDALADDAKKLSAIGKESSETAEKNLSSSVTIASEAEEASVNVNAMASGAEEASVNANEVAGAAEQMSTNMNTIAAAVEEMSASIKQISSNAGEANKVANEATIKSNNATGVMNKLRCSRQGNRAGYRCYKEDSRQNQSSRFERHNRGG

SEQ ID NO: 30021 - DNA, 354 bp, Unknown
  Obtained from environmental sample
  misc_feature (1)..(354): n is a, c, g, or t
atgaggatttatttagataattgttgttttaaccgtccctttgatgctcaaagcgatatgattgtgtatttagaaacgaaatctaaactggctatccaaggaatgataaaaaataaacatttggaattagtttggtctgatgttttggattttgaaaataatgaaaatccttttgaagaacgaaagattaaaattttagaatggaagttactagcggttgagaatgtagaaatgaatgatttgattttggaaacagctagaaaattgctgagtttggggttgaggcaaaaagatgcttctcatattgcttgtgcaatttttggcaagagtggattttttcgttacaacggataa

SEQ ID NO: 30022 - protein, 117 aa, Unknown
  Obtained from environmental sample
  misc_feature (1)..(117): Xaa is any amino acid
MRIYLDNCCFNRPFDAQSDMIVYLETKSKLAIQGMIKNKHLELVWSDVLDFENNENPFEERKIKILEWKLLAVENVEMNDLILETARKLLSLGLRQKDASHIACAIFGKSGFFRYNG

SEQ ID NO: 30023 - DNA, 819 bp, Unknown
  Obtained from environmental sample
  misc_feature (1)..(819): n is a, c, g, or t
atgaccgaagtcaaaactaatcgcaatcacaaagatagcgttttcacattgctgttcagcgagccacctgccgcattggaactctacaatgcagtgacagggcaaaactacccgccagacacgaaaatagagatagtgactctttcaaataccatcttcaaaggacaactgaacgatgttgctttcgtagttgacgacaggcttgtagtcttgattgagcaccaatcaaccgtgaataacaatataccactcaggatgcttatgtacttgggaagggaatacgagcgaataacgaagggcaaagatttgtacagagaaaacccgataaaaattcctgcaccggagttcatagttctatacaacggcagggatgagtttcccgatttcaaggagcttaggctttccgattcttttaaaaccaaaggcaagggcaatcttgaacttgtcgcaaacgtttacaacatcaacaaaggcaggaacgctgagatagcgagcaaaagtcctgttttgaacggctacaacgagcttatagcagaggtgaacaagaatcgcgagactatggaactagcggaagccgtagaagcagcaataaagaactgcgttgagcgtaacattttagtatatttcttggagaagcacgcttcggaggtgttgaatatgctttttactgaatggaatttagacgatgccattgaggttgcgaaggaagaggctcgcgaggatagagatgaggaaattctagacctcatagagaaaggttatactgttgccgatattaaaaaccaccttcgcaaacaaacccacccagcaactgcatag

SEQ ID NO: 30024 - protein, 272 aa, Unknown
  Obtained from environmental sample
  misc_feature (1)..(272): Xaa is any amino acid
MTEVKTNRNHKDSVFTLLFSEPPAALELYNAVTGQNYPPDTKIEIVTLSNTIFKGQLNDVAFVVDDRLVVLIEHQSTVNNNIPLRMLMYLGREYERITKGKDLYRENPIKIPAPEFIVLYNGRDEFPDFKELRLSDSFKTKGKGNLELVANVYNINKGRNAEIASKSPVLNGYNELIAEVNKNRETMELAEAVEAAIKNCVERNILVYFLEKHASEVLNMLFTEWNLDDAIEVAKEEAREDRDEEILDLIEKGYTVADIKNHLRKQTHPATA

SEQ ID NO: 30025 - DNA, 660 bp, Unknown
  Obtained from environmental sample
  misc_feature (1)..(660): n is a, c, g, or t
gtgattatggcggaaatagagaaaattgaaatagcggttcgttctaaaatagcatatattctgtctttatccaacggctctttttggcttgaaaaagaaaacctgttttctgattctgaaatgtatgcaaccataatgtcaaatatagaagaggaagtcaatagaagtcacgagagttttatactatctttcaaaaaagaatattcaaacgatattccacctgcatttatggcattggaaacagtatcttttggaacattatccaagttatataaatttttgaagctggataaatataagcaagaaatcgcacagtttttctgtttgtccgatgtagcctttgaatcgtggttgcacagcttagtttatgtaaggaatatatgtgcacaccacgctaggttatggaataggcaaatgaggattagtcctttgcctttaaaaaagtataagaatatatggcttgaaaacaagcaaatttctaataatcgcatatattttatattatccataattatttacctgctgaatgtcataaatcccgaacattcttttaagcaaaaattgaatttcttatttgcgaaataccccagcatagacaaggtcgctatgggttttcccgctgactggcagaaagaacctttgtggggcggcaacccttga

SEQ ID NO: 30026 - protein, 219 aa, Unknown
  Obtained from environmental sample
  DOMAIN (2)...(134): Abi-like protein
  misc_feature (1)..(219): Xaa is any amino acid
MIMAEIEKIEIAVRSKIAYILSLSNGSFWLEKENLFSDSEMYATIMSNIEEEVNRSHESFILSFKKEYSNDIPPAFMALETVSFGTLSKLYKFLKLDKYKQEIAQFFCLSDVAFESWLHSLVYVRNICAHHARLWNRQMRISPLPLKKYKNIWLENKQISNNRIYFILSIIIYLLNVINPEHSFKQKLNFLFAKYPSIDKVAMGFPADWQKEPLWGGNP

SEQ ID NO: 30027 - DNA, 537 bp, Unknown
  Obtained from environmental sample
  misc_feature (1)..(537): n is a, c, g, or t
atgccgtttactttttctatttgtcctattcccgggttgtttgaaatacagccaaaattattcggagataaccgcggttatttcatggaaagttattcgcaaaagaattatgaagaagccggtattgccgccgcatttgtgcaggataaccagtccagttccgtaaaaggagtccttcgcggactgcattatcagaaaaaaaatccgcaaggcaagctggtacgcgcaattgagggcgaaatctttgatgttgccgttgacatccgtccgcgatctccgacgcgcggcaaatggtattctgttattcttagcggtaaaaaacagaatcagttttacattccggaaggttttgcccatggttttcttgtgttaagcgacacagcgctctttgcctacaaatgcactgctttttatgaccccgaagacgaaagcggcattatctggaacgatccgtctattgatgtcaaatggccggatttgggaatggattatattctttccgacaaagataaagcgcttcctaagtttgatctatga

SEQ ID NO: 30028 - protein, 178 aa, Unknown
  Obtained from environmental sample
  DOMAIN (5)...(178): dTDP-4-dehydrorhamnose 3,5-epimerase
  misc_feature (1)..(178): Xaa is any amino acid
MPFTFSICPIPGLFEIQPKLFGDNRGYFMESYSQKNYEEAGIAAAFVQDNQSSSVKGVLRGLHYQKKNPQGKLVRAIEGEIFDVAVDIRPRSPTRGKWYSVILSGKKQNQFYIPEGFAHGFLVLSDTALFAYKCTAFYDPEDESGIIWNDPSIDVKWPDLGMDYILSDKDKALPKFDL

SEQ ID NO: 30029 - DNA, 834 bp, Unknown
  Obtained from environmental sample
  misc_feature (1)..(834): n is a, c, g, or t
atgtggggagatttgggcaagccgtccgatccggttccggttatggaaaacctcagaaccggggttctgcccagcggcctgcgctattatatccttgaaaattccatgccggaaaaccgcgcgtatcttacgctggcggtgaaagccggttccgtgcttgaggaagacgacgagcaggggcttgcccattttgtcgagcacatggcgtttaacggtacggagcgctttcccgaatcgaaactggtaagttaccttcgctcgctgggaatgcgtttcggcccggaggtaaacgcctatacttcttttgaccagaccgtgtatggcattgaagtaccggttgaaaccgacgagcagaagacaaggcgtattcccgaaactgcgcttgccgttattgacgactggacgcgggcggttactttttcccccgctgatgtggacgaagaacgtcctgttataatggaagaataccgcacgcggcttggcgcgtgggagaggctcaggcagaaatggctgccggcgctgttcaggggatcgccttatgcaaaccgtatgcccatagggctgccggaaattatcgaaggggcgccggcgtcccggctggagggcttttacaggaaatggtacaaagcggataacatggccctgatcctcgtgggcgattttgacggggcggcgcttgaggcgtcgttaaccggtcattttttgattgagaagccggcggagcctatgaaccggcctttttatgatctgccccttccaaaaaaagggaacctggaagtccttacccttaccgactccgaactgaccgcctcttatataaacctttatttttaa

SEQ ID NO: 30030 - protein, 277 aa, Unknown
  Obtained from environmental sample
  DOMAIN (29)...(177): Insulinase (Peptidase family M16)
  misc_feature (1)..(277): Xaa is any amino acid
MWGDLGKPSDPVPVMENLRTGVLPSGLRYYILENSMPENRAYLTLAVKAGSVLEEDDEQGLAHFVEHMAFNGTERFPESKLVSYLRSLGMRFGPEVNAYTSFDQTVYGIEVPVETDEQKTRRIPETALAVIDDWTRAVTFSPADVDEERPVIMEEYRTRLGAWERLRQKWLPALFRGSPYANRMPIGLPEIIEGAPASRLEGFYRKWYKADNMALILVGDFDGAALEASLTGHFLIEKPAEPMNRPFYDLPLPKKGNLEVLTLTDSELTASYINLYF

SEQ ID NO: 30031 - DNA, 843 bp, Unknown
  Obtained from environmental sample
  misc_feature (1)..(843): n is a, c, g, or t
ttgttatcagacagaatcatcgcatactttcagcctattctttccgccgataccaaagagatatacggttttgaagttttgggccgttatgtagactacgacggaaacgttaaatcccttagctctttttttgccagctctgacatctcacatgaagaagctctcaggctggacaggatagttagaagatacgccattaaaaagtacgctgaggaaaatcgaaaagagtatctctttattaatatcaggttggcctggctcttaccgtatgtcgataaaccggaagaaatgttaactttacagcttgcccaggaatacaacattccaaatgacagactggttatagaaattacagaggacgagtttaacgcgagcgaagaatatattcgttccatagtccactataaaaaaatcggctgccgcattgcgcttgacgattatggaaagagcgccagtaatattgacaggttggctaaacttaatcccgacattatcaaaatcaatattgattatattcataatagcgaaaaatcttttcattaccgcgagtatttacgatctcttgctacctttgccgactctgttggcatagaagtgctgtatgaaggcattgagacacaaaagcaattggatatttgtatttcctcaaaaggaaggttttatcagggatttttaatttccgttccccagccatctatgcgcaatccggctgttaaacggtctgttttttccgcatcaatcgagaacgcttatacggcagtacaaaaaaaggcgataaatgcggaatctttgagaaaatctctggacgttcagattgaacgtttcctgatgaaaacccgttga

SEQ ID NO: 30032 - protein, 280 aa, Unknown
  Obtained from environmental sample
  DOMAIN (1)...(229): EAL domain
  misc_feature (1)..(280): Xaa is any amino acid
MLSDRIIAYFQPILSADTKEIYGFEVLGRYVDYDGNVKSLSSFFASSDISHEEALRLDRIVRRYAIKKYAEENRKEYLFINIRLAWLLPYVDKPEEMLTLQLAQEYNIPNDRLVIEITEDEFNASEEYIRSIVHYKKIGCRIALDDYGKSASNIDRLAKLNPDIIKINIDYIHNSEKSFHYREYLRSLATFADSVGIEVLYEGIETQKQLDICISSKGRFYQGFLISVPQPSMRNPAVKRSVFSASIENAYTAVQKKAINAESLRKSLDVQIERFLMKTR

SEQ ID NO: 30033 - DNA, 615 bp, Unknown
  Obtained from environmental sample
  misc_feature (1)..(615): n is a, c, g, or t
atgaacgccgttgccgccgtttcttcgcgctcggttacaaaaaccttgcctaaaaactcacaacccatcagacgtgtagctctgatggacttcggcgcgaagcgcggcatagcggaagcgctggcagagcggggctgcgaggtatggtcgtttccgcatgacacgaaagcgcaggaaatactcagaatgaaaccggacgggatcatgctaactaatggcccgggagacccggcggaaagcgccaacgattgtataatcgaaaccctccgcgatctccagcggagcaatgtaacgatcttcggcatatgccttgggcatcaattgctcgcgctggcaaacggctattcgacgcacaagcttaaattcggccaccgcggcgcaaaccagccggttaaggaattatcaaccgggcgcgtattcattaccagccaaaaccacgggtacgccgtcgtaacagacaacagctcttttgtaaatgtaaacgacggtacctgcgaggggctggattacaggaattcgttttcggtacagtttcatcccgaggcgcggggtggaccactggacacggctttccttttcgaccatttcatggaaaggatgaaggccaatgcataa

SEQ ID NO: 30034 - protein, 204 aa, Unknown
  Obtained from environmental sample
  DOMAIN (28)...(181): Peptidase C26
  misc_feature (1)..(204): Xaa is any amino acid
MNAVAAVSSRSVTKTLPKNSQPIRRVALMDFGAKRGIAEALAERGCEVWSFPHDTKAQEILRMKPDGIMLTNGPGDPAESANDCIIETLRDLQRSNVTIFGICLGHQLLALANGYSTHKLKFGHRGANQPVKELSTGRVFITSQNHGYAVVTDNSSFVNVNDGTCEGLDYRNSFSVQFHPEARGGPLDTAFLFDHFMERMKANA

SEQ ID NO: 30035 - DNA, 714 bp, Unknown
  Obtained from environmental sample
  misc_feature (1)..(714): n is a, c, g, or t
ttggcacgagttgtccgggcggcgggattgcatactgagataaaaaagctatttgaagaatttggttttaaagatgttacggttacaaataaggaaaacgaggaattgaatacggttatctgcaacaaggatccatgcttggtaatgattgatagttggttttatcaggacgggacaccttgcaggattggcgaactgttaaggctgtttccgaaactgaatatcgctgttgtttccgtccatgacttccctgtgagccgcgccccgtggttcatctgggagggggcgaagtcataccttagcttgtgggaagggaatgatgaatttcaacggggcttgcggattgtgcggaatggaggacagtatatttcgccgaaggttcaaaaattgattgatcgccgcgatgaatggccggacactaaaagtaaaactaccaaacggcagaaggaatgccttgtcatgctgtgctgcgggattatccctctccaaattggagaaatactgaatatatccaaaagaacggttgataaccatttaaacagtttatacagagcctttcatgtcggcagccgtgaagagatggttgctcttgcatgggaaatggaactggtaactcccaaagatattcacttatacaacaggaaaaaagaacgcttgccgcttcctgaatgggcggatgtgaaacggaaatgcgacaggttttatcttgattga

SEQ ID NO: 30036 - protein, 237 aa, Unknown
  Obtained from environmental sample
  DOMAIN (141)...(198): Bacterial regulatory proteins, luxR family
  misc_feature (1)..(237): Xaa is any amino acid
MARVVRAAGLHTEIKKLFEEFGFKDVTVTNKENEELNTVICNKDPCLVMIDSWFYQDGTPCRIGELLRLFPKLNIAVVSVHDFPVSRAPWFIWEGAKSYLSLWEGNDEFQRGLRIVRNGGQYISPKVQKLIDRRDEWPDTKSKTTKRQKECLVMLCCGIIPLQIGEILNISKRTVDNHLNSLYRAFHVGSREEMVALAWEMELVTPKDIHLYNRKKERLPLPEWADVKRKCDRFYLD

SEQ ID NO: 30037 - DNA, 738 bp, Unknown
  Obtained from environmental sample
  misc_feature (1)..(738): n is a, c, g, or t
atgcgccctatcagccttgcatgcctgaccgtcgtcctgatccttaccggcgcctgtagcgcggtgcgggagtcgcttgactttgatctcgcctcgcaacccgtttattaccaggatgcggtggtcaagcgcggcacgccgcagatcagcgtgaacccgacaaccccgcccaaccgtgaactcacggcgatcatggttcctttccgcattacccaggaaatatcaaacgcaaaggccacagggcgcgaaatatcccggcagttctggcaggcatggctgggtgagcaggtatttccggtcatagaatatgcggaaaacgctccgccgtaccgcgcggatcttgcgcaatacctgggaaattcaaaaaaagcggaactggccataggagggcagatcacaaattattacagcggcggcgcggccggaacctcttccctgagcgtgactgtggaaatttgggatctgcaaagcggcaatctgctttggcttatcacccattccggcctgctcgatcccaccgggtacaaggattatctcgtgctcagcacacgcaggcgcgtacccgccgatcccatgtggctgatcattcagaccgttgccaaagatatagcccgcgccttcaagggctggagcaacccttattcggttgacgataccgaaacccgcgggagcggcgaaagaacgcggagtgagccttccgcctttggatccggccgtccgtcagcgcctaaccggtga

SEQ ID NO: 30038 - protein, 245 aa, Unknown
  Obtained from environmental sample
  SIGNAL (1)...(21)
  misc_feature (1)..(245): Xaa is any amino acid
MRPISLACLTVVLILTGACSAVRESLDFDLASQPVYYQDAVVKRGTPQISVNPTTPPNRELTAIMVPFRITQEISNAKATGREISRQFWQAWLGEQVFPVIEYAENAPPYRADLAQYLGNSKKAELAIGGQITNYYSGGAAGTSSLSVTVEIWDLQSGNLLWLITHSGLLDPTGYKDYLVLSTRRRVPADPMWLIIQTVAKDIARAFKGWSNPYSVDDTETRGSGERTRSEPSAFGSGRPSAPNR

SEQ ID NO: 30039 - DNA, 762 bp, Unknown
  Obtained from environmental sample
  misc_feature (1)..(762): n is a, c, g, or t
ttgcgcaagtctgacggttcattgacttattttgcctctgatattgcctatcacgccgataagttcgcgcgcggggtcgatctggctgtggatgtctggggcgcggatcaccacggctatgtgccgcgtatgtgtgcggctgtcagggctttgggcaggcgggacgatcagtttgcggtcattctggtgcagttggtcaatcttctgcaaaacggagaacagatagccatgtcgacacggtcggggcaatttgaaaccttggccgacgtaatcaaggaagtgggcgctgacgcggcccgcttcatgttcctttcccgcaagtctgattctccccttgattttgatttggctctggtcaagcagcggaatatggacaaccccgtgtattatgtgcagtatgcgcatgcgcgggtggcttctttgctgcgcaaagccggcgaacggagtcttagcccggcggcaggcgccgggcatggctgtcttgctctgctcacccggccggaagatctggatatattgcgcgccatcgattccttcggcgattgcgtggccgatgcggcggcacacctggcgccgcaccagttgagcttttatcttatggatctcgcggggctggtacaccgctattatgcggccactcccgtgctgaacgccgacagcgaggatttgacccttgcccggctggctcttttgcgcgcggccggacaagtgctggcaaacggtctggatttgctgggtgtttccgcgccggatacaatgtag

SEQ ID NO: 30040 - protein, 253 aa, Unknown
  Obtained from environmental sample
  DOMAIN (131)...(253): DALR anticodon binding domain
  misc_feature (1)..(253): Xaa is any amino acid
MRKSDGSLTYFASDIAYHADKFARGVDLAVDVWGADHHGYVPRMCAAVRALGRRDDQFAVILVQLVNLLQNGEQIAMSTRSGQFETLADVIKEVGADAARFMFLSRKSDSPLDFDLALVKQRNMDNPVYYVQYAHARVASLLRKAGERSLSPAAGAGHGCLALLTRPEDLDILRAIDSFGDCVADAAAHLAPHQLSFYLMDLAGLVHRYYAATPVLNADSEDLTLARLALLRAAGQVLANGLDLLGVSAPDTM

SEQ ID NO: 30041 - DNA, 558 bp, Unknown
  Obtained from environmental sample
  misc_feature (1)..(558): n is a, c, g, or t
atgacccaggcgattttctccctccggggcaaagtagaaaacgtctacggcaaaaaacgcgccgccatctacaaaaacgaggaacttttcaacatgatgatggctctgggcatagacaacgacatagagagccttcgttacgcgaaaatagtaatcgccaccgacgccgactttgacggtttccacattcgcaacctgctcttaaccttcttcctctcttactttgaggaacttgtaacagccggccatgtttttattcttgaaactccgctgttccgcgtccgcacaaaaaaagaaacccgttactgttactcggaaaaagagcgcgatgaggccgccgtcgccttaggcgcgcagtgcgaaataacccgcttcaagggactgggagagattagccccaaagaattcgggcaatttatcggagaggatatgcgcatagtgccggtgtcggttaacactttgaaacaggttccgcaggtgctggatttttacatggggaaaaacacgccggagaggcgggagtatattatgaagaatttgattgaagatgccgggtga

SEQ ID NO: 30042 - protein, 185 aa, Unknown
  Obtained from environmental sample
  misc_feature (1)..(185): Xaa is any amino acid
MTQAIFSLRGKVENVYGKKRAAIYKNEELFNMMMALGIDNDIESLRYAKIVIATDADFDGFHIRNLLLTFFLSYFEELVTAGHVFILETPLFRVRTKKETRYCYSEKERDEAAVALGAQCEITRFKGLGEISPKEFGQFIGEDMRIVPVSVNTLKQVPQVLDFYMGKNTPERREYIMKNLIEDAG

SEQ ID NO: 30043 - DNA, 651 bp, Unknown
  Obtained from environmental sample
  misc_feature (1)..(651): n is a, c, g, or t
ttgaacgctgcgacgtcgtatcgctccacgtgccgcttatcgaatcggggcgagggcccgacctaccacatggtcggcggcgacttcgtctccaagatgaagcagggcgcggttcttatcaatacgtcgcgggggcgggtcatagacgagaagagcttcaaagccgcccgttcgcgtctcggtatggtggcgctcgacgtctttgagagagagccggctataaacgttgatacgctgagggtggccgacatcgccacgccgcatattgccggatactcgctcgacgggaaactgcgcggaacggacatgatctattgcggcgcggcggcgttcttcttcaaggaggcgcggtggaaggctgattcgtccgacctgcgtttgcagaaacgcagcatcgacttgcgagactcggacgaccccgtccgcgacggcgtcaggggcgcttaccccataatggccgacgacgagcagtttcggcgtatttactccgcgccgcaagatgagttggtaaaatttttcgaggggctgcgcgccgattacccaaagcggctcgagttcccgcacttcaaactgactctttcggcgcgtcagcaggcggcggccgaggtcctcacgggactacggtttgaggtggaggtaactcctccttag

SEQ ID NO: 30044 - protein, 216 aa, Unknown
  Obtained from environmental sample
  DOMAIN (1)...(90): D-isomer specific 2-hydroxyacid dehydrogenase, NAD binding domain
  misc_feature (1)..(216): Xaa is any amino acid
MNAATSYRSTCRLSNRGEGPTYHMVGGDFVSKMKQGAVLINTSRGRVIDEKSFKAARSRLGMVALDVFEREPAINVDTLRVADIATPHIAGYSLDGKLRGTDMIYCGAAAFFFKEARWKADSSDLRLQKRSIDLRDSDDPVRDGVRGAYPIMADDEQFRRIYSAPQDELVKFFEGLRADYPKRLEFPHFKLTLSARQQAAAEVLTGLRFEVEVTPP

SEQ ID NO: 30045 - DNA, 855 bp, Unknown
  Obtained from environmental sample
  misc_feature (1)..(855): n is a, c, g, or t
ttggtccattacgaagtcgcggttttggttagggcaagcagagtcgacgaggcgattatcgccatgccgagcgcggacaggaactacataaaacaaacatacgactacttaaaaaaaataggcttccagcaaattaaaatcctgcccggcatttcccaaatcatagacggggacgcgcactttatacaaacccgttccatagacttgcaggaccttcttgggcgcaatcccgtcacgataaaattaaaacagagcctagcctaccttagaggaaagcgcgtccttgtcacgggcgcgggtggctcgattggcagcgaattatgccgccagcttttgtcggggggcgcttcccgcctctaccttttcgggcacggggaaaattcaatttaccagatagacagggaattgcgtcttttgcaggaagagggagtcggcgaaaaagcggctcttgtgcccgtcatcggggatttaagggatacggattatgttgattacattctggggcacttaaaggcggacgctgtttttcacactgcggcgtacaagcacgttccgctgatggaggaaaaccccgtggctgcggtagaaaacaatgtctttggaaccgaaaaccttgtgcttgccgcgataaaacacaacaccaaaaggttcgtccacattaccacagacaaagctgtcgatcccgtttcggtatacggcgcttccaagtacctgtgcgaacaaatggtgctggaagccgccgcctcgtccggcggaggcaccaacttcatggtagtccgtttcggcaacgttctcggctcccgaggctctatagtgccgcttttccaaaacagattgaaaaaggcggcccggtaa

SEQ ID NO: 30046 - protein, 284 aa, Unknown
  Obtained from environmental sample
  DOMAIN (93)...(281): RmlD substrate binding domain
  misc_feature (1)..(284): Xaa is any amino acid
MVHYEVAVLVRASRVDEAIIAMPSADRNYIKQTYDYLKKIGFQQIKILPGISQIIDGDAHFIQTRSIDLQDLLGRNPVTIKLKQSLAYLRGKRVLVTGAGGSIGSELCRQLLSGGASRLYLFGHGENSIYQIDRELRLLQEEGVGEKAALVPVIGDLRDTDYVDYILGHLKADAVFHTAAYKHVPLMEENPVAAVENNVFGTENLVLAAIKHNTKRFVHITTDKAVDPVSVYGASKYLCEQMVLEAAASSGGGTNFMVVRFGNVLGSRGSIVPLFQNRLKKAAR

SEQ ID NO: 30047 - DNA, 708 bp, Unknown
  Obtained from environmental sample
  misc_feature (1)..(708): n is a, c, g, or t
ttgcggctgacgcggatcgaagcggcaaatgggtttaatcgcttccataagctcgactatattaatagggctgggattttttctgtccacgcggaggatgcggctgtattcggtttccctcggttcctcatccttagaccacaagcgctcatcaaggcgttctccggagcgcagacccgtatactcaattttaatgtcggcttccggctcaaagccgtaaaaacggatcatctgttcggcaaggtcgcggatgcggaccggctcgcccatgtccagcaggtacagtttgccgttttcgcccacgccgccggctttaagcaccagggaacaggattcggggatggtcataaaccagcggcgcatttccgggtgggttaccgttaccgggccgcctttttcaatctgttttggaaaagcggcactatagagcctcgggagccgagaacgttgccgaaacggactaccatgaagttggtgcctccgccggacgaggcggcggcttccagcaccatttgttcgcacaggtacttggaagcgccgtataccgaaacgggatcgacagctttgtctgtggtaatgtggacgaaccttttggtgttgtgttttatcgcggcaagcacaaggttttcggttccaaagacattgttttctaccgcagccacggggttttcctccatcagcggaacgtgcttgtacgccgcagtgtga

SEQ ID NO: 30048 - protein, 235 aa, Unknown
  Obtained from environmental sample
  misc_feature (1)..(235): Xaa is any amino acid
MRLTRIEAANGFNRFHKLDYINRAGIFSVHAEDAAVFGFPRFLILRPQALIKAFSGAQTRILNFNVGFRLKAVKTDHLFGKVADADRLAHVQQVQFAVFAHAAGFKHQGTGFGDGHKPAAHFRVGYRYRAAFFNLFWKSGTIEPREPRTLPKRTTMKLVPPPDEAAASSTICSHRYLEAPYTETGSTALSVVMWTNLLVLCFIAASTRFSVPKTLFSTAATGFSSISGTCLYAAV

SEQ ID NO: 30049 - DNA, 627 bp, Unknown
  Obtained from environmental sample
  misc_feature (1)..(627): n is a, c, g, or t
gtgcgaacaaatggtgctggaagccgccgcctcgtccggcggaggcaccaacttcatggtagtccgtttcggcaacgttctcggctcccgaggctctatagtgccgcttttccaaaacagattgaaaaaggcggcccggtaacggtaacccacccggaaatgcgccgctggtttatgaccatccccgaatcctgttccctggtgcttaaagccggcggcgtgggcgaaaacggcaaactgtacctgctggacatgggcgagccggtccgcatccgcgaccttgccgaacagatgatccgtttttacggctttgagccggaagccgacattaaaattgagtatacgggtctgcgctccggagaacgccttgatgagcgcttgtggtctaaggatgaggaaccgagggaaaccgaatacagccgcatcctccgcgtggacagaaaaaatcccagccctattaatatagtcgagcttatggaagcgattaaacccatttgccgcttcgatccgcgtcagccgcaaaaataccgtgacagcgaactattacgggctgtactgcgcaacgccattcctaccatgcgccaggaatcggcggtgcaggaaccggtgtataccaatgtcccatga

SEQ ID NO: 30050 - protein, 208 aa, Unknown
  Obtained from environmental sample
  DOMAIN (5)...(147): Polysaccharide biosynthesis protein
  misc_feature (1)..(208): Xaa is any amino acid
MRTNGAGSRRLVRRRHQLHGSPFRQRSRLPRLYSAAFPKQIEKGGPVTVTHPEMRRWFMTIPESCSLVLKAGGVGENGKLYLLDMGEPVRIRDLAEQMIRFYGFEPEADIKIEYTGLRSGERLDERLWSKDEEPRETEYSRILRVDRKNPSPINIVELMEAIKPICRFDPRQPQKYRDSELLRAVLRNAIPTMRQESAVQEPVYTNVP

SEQ ID NO: 30051 - DNA, 492 bp, Unknown
  Obtained from environmental sample
  misc_feature (1)..(492): n is a, c, g, or t
gtgacagcgaactattacgggctgtactgcgcaacgccattcctaccatgcgccaggaatcggcggtgcaggaaccggtgtataccaatgtcccatgacgacattccctttgcccgtccctttatcggcacggaagaagaagaaaccgtcatccacgtcctccgttccggctggctgaccaccggcattgaagccctgaactttgaaaaagaatttgccgcgtttctgagaagcccccccgttctcagcaacggcgacatttactgccttgcggtaaactcagccaccagcggcctgcatttggcgctggaagcctgcggcgtagggccgggcgacgcggtgctcgtcccttcctgcacctttaccgccaccgccgaaagtcgtccgctatttggggggctgatccggttttttgtcgatgtcagcccctggaacttttcatattggatcccgccgnctctggnaacaaaacatccagcgcttgccgcctga

SEQ ID NO: 30052 - protein, 163 aa, Unknown
  Obtained from environmental sample
  misc_feature (1)..(163): Xaa is any amino acid
MTANYYGLYCATPFLPCARNRRCRNRCIPMSHDDIPFARPFIGTEEEETVIHVLRSGWLTTGIEALNFEKEFAAFLRSPPVLSNGDIYCLAVNSATSGLHLALEACGVGPGDAVLVPSCTFTATAESRPLFGGLIRFFVDVSPWNFSYWIPPXLXTKHPALAA

SEQ ID NO: 30053 - DNA, 852 bp, Unknown
  Obtained from environmental sample
  misc_feature (1)..(852): n is a, c, g, or t
atgagagcttctgcctttctggaagatatttatccgcagcatttattgtacggcataaccataaggtctcccaccgcaaacggtcggctgaagctgattcaatttccggtacttcccgacagttatacctttattaccgcaagaaatatacccggagaaaacaggctggaagatacttccattcccatccttgcggattcaaaactttcctacataggagagccggtagccattttacttggacaggacaagataaaacttgaagaattcgcaaaacaatgcaaggttatttatgaagaggaaacgccggaatttaacgctatagagcctgcggccgctgtccgcgaaattcagattggcgactgtaaaagcgtttttgaaaaaccgggtaaaataatagcgggaagttacataacaggaattcaggatcattggtacgcggaacccgccggcgccgtaacatattacggaaaaaatcaaaaagcaaagaatgaaaaagcgccgaataacttgcctgacggctcacctgacggctcacctgacggtggcgaagaaaagaaagaaacaaaattaaaaaaaagcgaaaaattattaattgtaaaaaccgcaacccaatggccgtatcatgtaaaacgttcggttgcccgtgcgctgggaattgaccaagccgaggtttccgtagaaactacctctctaagtcttcacatggacggaaaacttatgtttatgtcccttgtcgcctgccatgccgcgcttggaactttttttacaaacaggcctgtacgccttatcttaaacagggaagaagattttttttattcccaaaacgctgtaaatcaaatattgatatag

SEQ ID NO: 30054 - protein, 283 aa, Unknown
  Obtained from environmental sample
  DOMAIN (5)...(102): Aldehyde oxidase and xanthine dehydrogenase, a/b hammerhead domain
  misc_feature (1)..(283): Xaa is any amino acid
MRASAFLEDIYPQHLLYGITIRSPTANGRLKLIQFPVLPDSYTFITARNIPGENRLEDTSIPILADSKLSYIGEPVAILLGQDKIKLEEFAKQCKVIYEEETPEFNAIEPAAAVREIQIGDCKSVFEKPGKIIAGSYITGIQDHWYAEPAGAVTYYGKNQKAKNEKAPNNLPDGSPDGSPDGGEEKKETKLKKSEKLLIVKTATQWPYHVKRSVARALGIDQAEVSVETTSLSLHMDGKLMFMSLVACHAALGTFFTNRPVRLILNREEDFFYSQNAVNQILI

SEQ ID NO: 30055 - DNA, 744 bp, Unknown
  Obtained from environmental sample
  misc_feature (1)..(744): n is a, c, g, or t
ttgggcggaagatcccgcgtattatataagcgcttttacaaaagtggttcctgtccgttaatgcttaaaagttatgtgatacgcaaagggcattttaccgacgctcaaaaaaaggcctacgagtcgttatatgaaaaatatatgattccgtttgcggataacaaacttgattaccggaatattttcgggaattccgccggcgttacccttgaaatcggttttggctctggttttgccacggccgaaattgcgcaaataaatcaggataaaaattatttaggcgtcgaggttcaccgtcccggtatagggaagctgttatgggaaattgaaaagcgttctcttgataatatcaggattattgaatatgacgctgctgcagtaacggagaaaatgatccctgaaaattcccttgacgctatacacattttttttcccgatccctggccaaaaaaaaggcatcacaaacgccgccttattcagtctccttttactcttgctttggcaggccgccttaaacccggcggctatttatacatggttacggattgggaagattacgcggccggcgcgcttgagtcccttgcttcctgtccttccttgaaaaacgcctacgaaggttttgccgttgggcaggactggcggccaaaaacaaagtttgagcaaaaggggcttgccaaagatcataaaataagggaacttttttttattcgcgcaaaggagagcagtagtgctgtttacggttga

SEQ ID NO: 30056 - protein, 247 aa, Unknown
  Obtained from environmental sample
  DOMAIN (70)...(177): Methyltransferase domain
  misc_feature (1)..(247): Xaa is any amino acid
MGGRSRVLYKRFYKSGSCPLMLKSYVIRKGHFTDAQKKAYESLYEKYMIPFADNKLDYRNIFGNSAGVTLEIGFGSGFATAEIAQINQDKNYLGVEVHRPGIGKLLWEIEKRSLDNIRIIEYDAAAVTEKMIPENSLDAIHIFFPDPWPKKRHHKRRLIQSPFTLALAGRLKPGGYLYMVTDWEDYAAGALESLASCPSLKNAYEGFAVGQDWRPKTKFEQKGLAKDHKIRELFFIRAKESSSAVYG

SEQ ID NO: 30057 - DNA, 468 bp, Unknown
  Obtained from environmental sample
  misc_feature (1)..(468): n is a, c, g, or t
ttgaataagatagttatgatgggcatagacccgggcagttatgcaacgggttttgcttttttgagtttagaagggaacaaggtttctgttttggactatggggttattcgccctaaaaaagatgcggaacttatttttaggattgggcatatagttgaagaattggaaaatctaatagcaaaacacaagcccgctgcgttttgcatggaaaaagctttttttgcaaagaatgcaaatagcgcgctcattttggggcatatccgcggagcggttatggctcttggctttaagcacgatttggtattttccgaaaaaagcccgcgctcggtgaaacaagctgtgactgggaacggtgcggccagcaaggaacaggttgcaaacatgatgaacaggcttttgggcattcaggcggactgcgctttggatgcgagcgatgccttggctattgcgtgggcaggaatgatgtga

SEQ ID NO: 30058 - protein, 155 aa, Unknown
  Obtained from environmental sample
  DOMAIN (6)...(153): Crossover junction endodeoxyribonuclease RuvC
  misc_feature (1)..(155): Xaa is any amino acid
MNKIVMMGIDPGSYATGFAFLSLEGNKVSVLDYGVIRPKKDAELIFRIGHIVEELENLIAKHKPAAFCMEKAFFAKNANSALILGHIRGAVMALGFKHDLVFSEKSPRSVKQAVTGNGAASKEQVANMMNRLLGIQADCALDASDALAIAWAGMM

SEQ ID NO: 30059 - DNA, 735 bp, Unknown
  Obtained from environmental sample
  misc_feature (1)..(735): n is a, c, g, or t
atgaacctggaatcctataccctggtttcacaaggggaagtttccgccgaatacgaactggtgtacaaattactgaacagcatggtaatactgcgcgtcatcctgaacggcgatctgggaaccctggatcttaagacaagggttatctggaacgagcggcaccgtctcctgaaactgcggatcaattccgcgtttaagaatgaaacctttgtatcggaaattccctacggcgctatcagccgggcggcggacggcagggaatggcctgtccagcgctgggcctgtttaggcagcggtacttgcctgggcgtcgtcaacgacggggtatattccgccagcgccgaagacgggagccttgacctgactctgctgcgaagccctatctacagtcatcacgagacccagcaccccaggccggacattcagcaccgctacgtggatcagggggaatcggaattccgcgtacaattgcggcccatgcaaaacgaaggaaaggatcacttaagcagatacgccctggaactgaatcagaaagccgtatacgtgattgaatccgcgcaccctgacaggcccgaaggagccaaggccgcgccccgcgagcacagttactgttccgtgaaaagcccggaaggaaaaatgtcgtccgtgttaatcaccgtgattaaacgcggcgaagacaacgacggctggataatccgggccgttgagggagtgggggaaaaaacaacgcggtaa

SEQ ID NO: 30060 - protein, 244 aa, Unknown
  Obtained from environmental sample
  misc_feature (1)..(244): Xaa is any amino acid
MNLESYTLVSQGEVSAEYELVYKLLNSMVILRVILNGDLGTLDLKTRVIWNERHRLLKLRINSAFKNETFVSEIPYGAISRAADGREWPVQRWACLGSGTCLGVVNDGVYSASAEDGSLDLTLLRSPIYSHHETQHPRPDIQHRYVDQGESEFRVQLRPMQNEGKDHLSRYALELNQKAVYVIESAHPDRPEGAKAAPREHSYCSVKSPEGKMSSVLITVIKRGEDNDGWIIRAVEGVGEKTTR

SEQ ID NO: 30061 - DNA, 669 bp, Unknown
  Obtained from environmental sample
  misc_feature (1)..(669): n is a, c, g, or t
ttgaaaaggaatgaaaaaaatgaatttgctgatttagatattgattatatattagatgatgatttttcaaatgaagaaatagatatgtttttattccccaaagaaagaaaacacaagattgaaatatcgggaggaaatatgggtaatgatatactaaaaaattctgaaataactatatttggaatgttacctcatattactgaatatgtcgctgatgtattttggttagaaattgaagaacttacaaattcacaaaaaactataagatatgcccatgattacgttaaagaaattgaaagcgtttttagccgggattgtgatgaatatgagaaaaacacgaaaatgttaggaggtcatgccggatattttagaaaatattacttaatagatcataatgaagtaataaaatcatttaataaattaggcgcaaaagaatatgaaaatatatttattgaagtattgaataaatttaaatttgtatttaataatacgggaaataaagatatagaaaaaacaataaatctattaaaaaatgattttgaaaagtatgatggaatgattagggaattagatcataaaatagatatatattttaataattataataacgaagaagtagaaaatgatattaaattatatttaaataaatatttagcggaaaaggagtag

SEQ ID NO: 30062 - protein, 222 aa, Unknown
  Obtained from environmental sample
  misc_feature (1)..(222): Xaa is any amino acid
MKRNEKNEFADLDIDYILDDDFSNEEIDMFLFPKERKHKIEISGGNMGNDILKNSEITIFGMLPHITEYVADVFWLEIEELTNSQKTIRYAHDYVKEIESVFSRDCDEYEKNTKMLGGHAGYFRKYYLIDHNEVIKSFNKLGAKEYENIFIEVLNKFKFVFNNTGNKDIEKTINLLKNDFEKYDGMIRELDHKIDIYFNNYNNEEVENDIKLYLNKYLAEKE

SEQ ID NO: 30063 - DNA, 516 bp, Unknown
  Obtained from environmental sample
  misc_feature (1)..(516): n is a, c, g, or t
ttgcattcacggaacaggctggaatccgggagcctacgcttatattcgaacgagtatcagagcaggaagggaacctggcgaaaagagattgaagactggcttgacgagccctctgttgatctgaaccgcgggcatgaatacgcggcgtatatttttaacgccatgttcggcgataaaaccatgtttaaatttaacggcaacgtattgaaccacggtntgatagataatctgccccagagcgcctgcgtggaggtgcctgtactcgcgtctccgcatggttttgaggccatacgggtaggcaaacttccaaatcaaatcgcggctctggtgcataccagttctatatgcgaggagatggcggtggaagcctcgctttcaggcgatccccggaaagtgtatcaggccatagcctttgatccgcttacatcggcggtattgggcatacatgaaataaaagatatgactctgaaaatgttcaaaaaaaatgaaggctatcttccgcagttcaaattataa

SEQ ID NO: 30064 - protein, 171 aa, Unknown
  Obtained from environmental sample
  misc_feature (1)..(171): Xaa is any amino acid
MHSRNRLESGSLRLYSNEYQSRKGTWRKEIEDWLDEPSVDLNRGHEYAAYIFNAMFGDKTMFKFNGNVLNHGXIDNLPQSACVEVPVLASPHGFEAIRVGKLPNQIAALVHTSSICEEMAVEASLSGDPRKVYQAIAFDPLTSAVLGIHEIKDMTLKMFKKNEGYLPQFKL

SEQ ID NO: 30065 - DNA, 936 bp, Unknown
  Obtained from environmental sample
  misc_feature (1)..(936): n is a, c, g, or t
ttgaacattatggcaaaatttgcgttnatcggcgcaggcagttttggttttacaagaactctggttcgggatattttgacatataacgctttcaaagacgctgttatcgcgctcatggacattgatgaaacccgccttgattacattacccgcgcggtcaataaaattattaaagcggggaattacggggcaaaggttatttctacccgaaaccgcgctgaggcccttgagggcgccgacggggttctgtgtacgattctgaacggcgatgttgatgtctggcgttatgatattgaaatccccaaaacctatggcgttgacattaatgtcggcgatacacgggggcccgccggaatcttccgcgccctcagaaccattccggtaatgctggatatatgcaaagatatagaaaaatactgccccaatgccgtttttctcaattataccaaccccatggctatgctttgccgcgccatgcagacagagtttcccaaacttaaaatttccggcctctgccacagcgtgcagggtacggcgagcatgctcgcgcattggataggggcgctggacgaggatattacctatacctgcgcgggcattaatcatcaggctttttatattgattacctctggaaaggaaaggacgcctatcccctgctcagggaggcgatgaagaatccacagatatacaacgaggaacaggtaaggaacgagatgtttctgcttttggattattacccgactgagtcatccggccacaattccgagtacaacgcgtggttccgcaaacgacccgaccttattgaaaaattttgcattcacggaacaggctggaatccgggagcctacgcttatattcgaacgagtatcagagcaggaagggaacctggcgaaaagagattgaagactggcttgacgagccctctgttgatctga

SEQ ID NO: 30066 - protein, 311 aa, Unknown
  Obtained from environmental sample
  DOMAIN (6)...(310): Family 4 glycosyl hydrolase
  misc_feature (1)..(311): Xaa is any amino acid
MNIMAKFAXIGAGSFGFTRTLVRDILTYNAFKDAVIALMDIDETRLDYITRAVNKIIKAGNYGAKVISTRNRAEALEGADGVLCTILNGDVDVWRYDIEIPKTYGVDINVGDTRGPAGIFRALRTIPVMLDICKDIEKYCPNAVFLNYTNPMAMLCRAMQTEFPKLKISGLCHSVQGTASMLAHWIGALDEDITYTCAGINHQAFYIDYLWKGKDAYPLLREAMKNPQIYNEEQVRNEMFLLLDYYPTESSGHNSEYNAWFRKRPDLIEKFCIHGTGWNPGAYAYIRTSIRAGREPGEKRLKTGLTSPLLI

SEQ ID NO: 30067 - DNA, 510 bp, Unknown
  Obtained from environmental sample
  misc_feature (1)..(510): n is a, c, g, or t
atgcgtagcgctagccgacaaaaaataatgtatatattaatggatgccggcataaaaggaaaagtgctgtatgccagctttaagtataagttagagcagaaccaactgcctgcaggcgcgcagacggagaacgtaaaaccggggaaatgcgcgtggggtcacgcgtggtttctcagcgaagaagatgacgcagactgccttggatggctaaaaggcaaggtaattaaattcgactctttaaaggtcagggttccgcagatgggctggaacaaagttacttttacggaaagccctatcagcaacgcaaatgaaggtcatttttattttgtgaactcctatcacgcaagaccggaagatggtgaggatctatggggaaccgcagattataacggccgatttgcggcggctgttcacaggggcaatatttacgccacccagtttcacgttgaaaaaagcggcgaagctggactcgctatccttaatggctttcttaatctgggaaagggctga

SEQ ID NO: 30068 - protein, 169 aa, Unknown
  Obtained from environmental sample
  DOMAIN (12)...(166): Glutamine amidotransferase class-I
  misc_feature (1)..(169): Xaa is any amino acid
MRSASRQKIMYILMDAGIKGKVLYASFKYKLEQNQLPAGAQTENVKPGKCAWGHAWFLSEEDDADCLGWLKGKVIKFDSLKVRVPQMGWNKVTFTESPISNANEGHFYFVNSYHARPEDGEDLWGTADYNGRFAAAVHRGNIYATQFHVEKSGEAGLAILNGFLNLGKG

SEQ ID NO: 30069 - DNA, 393 bp, Unknown
  Obtained from environmental sample
  misc_feature (1)..(393): n is a, c, g, or t
atgctgacaaaaagacttatagcctgttttgacattatcggcggcatggtaacgaaggctgtgcagtttcaggacaatattaacgtcgcccccgccgaggaactggcggaaacaatgtacaatgagcaaatcgatgagcttatcttttacgatattatggcaagcgcggagaagcgcgggattgatatagaaaccgtaaagaaagtcgcgcgccgtttatttattcccttcacagtcggcggcggcataaaaaaattacaagacatgtatgaggcgctaaaagctggggcggaaagatcagcgttgattcgatggctgtcagaaacccgcaaattattacagagggctcaaaagccttcggcgcacaatgtatcgtgctttcaacccaggtaa

SEQ ID NO: 30070 - protein, 130 aa, Unknown
  Obtained from environmental sample
  DOMAIN (5)...(125): Histidine biosynthesis protein
  misc_feature (1)..(130): Xaa is any amino acid
MLTKRLIACFDIIGGMVTKAVQFQDNINVAPAEELAETMYNEQIDELIFYDIMASAEKRGIDIETVKKVARRLFIPFTVGGGIKKLQDMYEALKAGAERSALIRWLSETRKLLQRAQKPSAHNVSCFQPR

SEQ ID NO: 30071 - DNA, 492 bp, Unknown
  Obtained from environmental sample
  misc_feature (1)..(492): n is a, c, g, or t
atggctgtcagaaacccgcaaattattacagagggctcaaaagccttcggcgcacaatgtatcgtgctttcaacccaggtaaagcgcacagggctcactccaagcggatacgaggttttcatagacggggcaaggctgtcgacgggcatggatgccatcgagtgggtaaaacgcgggcaggaactcggcgcaggggaaatatgcgtaaacagcatcgaccgcgacggaactctttccggctacgatatcgagcttatgaaacttgccgaagccgctgtgtcggttccgctaatcgcttcaggcggtgcgggaaaacccgaacacctgaaagatcttttcaccgccacggaagcgcaggcggccatcatcagcagtatgctgtactccccgcgcctggagcgaaattttccggtcagcgagctgaaggattatttgatacaaaatggcattgccgcgcgtccggttctgccgggagaaccaccatgcaaatag

SEQ ID NO: 30072 - protein, 163 aa, Unknown
  Obtained from environmental sample
  DOMAIN (1)...(133): Histidine biosynthesis protein
  misc_feature (1)..(163): Xaa is any amino acid
MAVRNPQIITEGSKAFGAQCIVLSTQVKRTGLTPSGYEVFIDGARLSTGMDAIEWVKRGQELGAGEICVNSIDRDGTLSGYDIELMKLAEAAVSVPLIASGGAGKPEHLKDLFTATEAQAAIISSMLYSPRLERNFPVSELKDYLIQNGIAARPVLPGEPPCK

SEQ ID NO: 30073 - DNA, 723 bp, Unknown
  Obtained from environmental sample
  misc_feature (1)..(723): n is a, c, g, or t
atgtatcgtgctttcaacccaggtaaagcgcacagggctcactccaagcggatacgaggttttcatagacggggcaaggctgtcgacgggcatggatgccatcgagtgggtaaaacgcgggcaggaactcggcgcaggggaaatatgcgtaaacagcatcgaccgcgacggaactctttccggctacgatatcgagcttatgaaacttgccgaagccgctgtgtcggttccgctaatcgcttcaggcggtgcgggaaaacccgaacacctgaaagatcttttcaccgccacggaagcgcaggcggccatcatcagcagtatgctgtactccccgcgcctggagcgaaattttccggtcagcgagctgaaggattatttgatacaaaatggcattgccgcgcgtccggttctgccgggagaaccaccatgcaaatagacgacaaactgctctcttatctggaggatttatcctgccttacgttttcaaccaacgagaaaaccaaattagccaaagatctgcaggaaattcttgaatatatggcgcggctcggcgaactcgatacaaacggcgcagttgagcgtagccatccgtttgacaatgtaaatgattttcgggatgacacagtgcgtccttcgtttgatcgcgcgctaattttacaaaacgctccggtgcgtaatgatcagagcatcatcgctcccaaacggttgagtaggaaaggttga

SEQ ID NO: 30074 - protein, 240 aa, Unknown
  Obtained from environmental sample
  DOMAIN (161)...(232): Glu-tRNAGln amidotransferase C subunit
  misc_feature (1)..(240): Xaa is any amino acid
MYRAFNPGKAHRAHSKRIRGFHRRGKAVDGHGCHRVGKTRAGTRRRGNMRKQHRPRRNSFRLRYRAYETCRSRCVGSANRFRRCGKTRTPERSFHRHGSAGGHHQQYAVLPAPGAKFSGQRAEGLFDTKWHCRASGSAGRTTMQIDDKLLSYLEDLSCLTFSTNEKTKLAKDLQEILEYMARLGELDTNGAVERSHPFDNVNDFRDDTVRPSFDRALILQNAPVRNDQSIIAPKRLSRKG

SEQ ID NO: 30075 - DNA, 726 bp, Unknown
  Obtained from environmental sample
  misc_feature (1)..(726): n is a, c, g, or t
atggaaaagaataccccagagagcattagcaagtatagccatttaactttaagggaaagagaagaaatagcattagggcttcaaatagggttaaaacaacgcgaaatagcatcaaatcttaaccgttctccaagcacaatatcccgtgaaataaaaagaaataaatcatatataaggggagtaaaatacagggcaacctgggcacaattccaaacaaacgaacgaaaaaaaaatagtcataaaaaacctagaatacccaataaaaaactaaggcgctttattcagaaactgttaaaaaaaggatattcgcctgaaataatcgctgttatggctttcgaaaaaaatgaaagatggaagaccaattatgaaacaatttaccaatggatatacagcgacaggaaagatttaataccatttcttacaaaaagccatagaatcaggaggaaaagagggtctgcaaagcaaaaacggtgcccaaaaataccaagccgcattacaatcgagaataggcctgattatgtaaacctaagatcggaaataggccattgggaaatagatactgcaatatccagaaagagcaaagcggcaataatggttttagtagaaagaaaaacaagatatgtaattattaaaaaactcgcagcaaaaacagcatgctttatgcatgatgcaacagtaaaaagcctaaaagattatccggcaaatataaggcagaccattacttag

SEQ ID NO: 30076 - protein, 241 aa, Unknown
  Obtained from environmental sample
  misc_feature (1)..(241): Xaa is any amino acid
MEKNTPESISKYSHLTLREREEIALGLQIGLKQREIASNLNRSPSTISREIKRNKSYIRGVKYRATWAQFQTNERKKNSHKKPRIPNKKLRRFIQKLLKKGYSPEIIAVMAFEKNERWKTNYETIYQWIYSDRKDLIPFLTKSHRIRRKRGSAKQKRCPKIPSRITIENRPDYVNLRSEIGHWEIDTAISRKSKAAIMVLVERKTRYVIIKKLAAKTACFMHDATVKSLKDYPANIRQTIT

SEQ ID NO: 30077 - DNA, 321 bp, Unknown
  Obtained from environmental sample
  misc_feature (1)..(321): n is a, c, g, or t
atggtattcagttcgcaaatttttctgtttttattcttaccccttgtcatttttggatataatttatcaaaacaaaaatactaccagctctttttcttattgcttgcgagcttatttttctacgcttggggggagccaaaatatgttttagtcatgttattgtcaatcatagtaaattattcttttggtctgtttatacattctagcattgccgctcagaaaaaaataattgcaaaaatattgtttatcctctctgtcgcttgcaatctaggaattcttttttactttcccgagttcaagaaagaagtgcaacaaacttaa

SEQ ID NO: 30078 - protein, 106 aa, Unknown
  Obtained from environmental sample
  misc_feature (1)..(106): Xaa is any amino acid
MVFSSQIFLFLFLPLVIFGYNLSKQKYYQLFFLLLASLFFYAWGEPKYVLVMLLSIIVNYSFGLFIHSSIAAQKKIIAKILFILSVACNLGILFYFPEFKKEVQQT

SEQ ID NO: 30079 - DNA, 708 bp, Unknown
  Obtained from environmental sample
  misc_feature (1)..(708): n is a, c, g, or t
atgagacctaagatggaaagcactgttagaaccggtccaaactcgttcttctgctttgagacccatgcgacctttgtatatgaacagggtcaggagttctacttcagcggtgatgatgatatctgggtgtttatagacaacaacttggttatagacataggcggctgccatttggctaccccaggctatgtggctttggacgaaattggcaagccaggcaggtggctagggccacagcaagtcagcggcgtatctggtcctaactatacccctcttgtggatggcaaagaataccccattgacattttcttctgcgatcgccgctctaatgctagcaatatccgcatatccaccaatatgtacataaaacaggagagcggcatatttgtggacggcgatgccaaaggtagcggagccaaagtctgcgtgcagcagagcggctctggaacttgcgcttcgcttttgggcggtggcagcagcggcgggtcctcagagcttctgtgtgacgagaaggccagtggatggtttgaattttatatagtcagccgcaacaatttatcaaatgaggatgccagagtttacttggatactcgcaacccggatatttgccaggcgattgatgggggatttgagtgttacggtggcataaaggtctggacggaaggcccaaaagcaggtctagctgaagtcaaggcaaagcaatcttaa

SEQ ID NO: 30080 - protein, 235 aa, Unknown
  Obtained from environmental sample
  misc_feature (1)..(235): Xaa is any amino acid
MRPKMESTVRTGPNSFFCFETHATFVYEQGQEFYFSGDDDIWVFIDNNLVIDIGGCHLATPGYVALDEIGKPGRWLGPQQVSGVSGPNYTPLVDGKEYPIDIFFCDRRSNASNIRISTNMYIKQESGIFVDGDAKGSGAKVCVQQSGSGTCASLLGGGSSGGSSELLCDEKASGWFEFYIVSRNNLSNEDARVYLDTRNPDICQAIDGGFECYGGIKVWTEGPKAGLAEVKAKQS

SEQ ID NO: 30081 - DNA, 639 bp, Unknown
  Obtained from environmental sample
  misc_feature (1)..(639): n is a, c, g, or t
atgttgtttaaccggaaagggaggcatattatgaatatccgctcgaaaattatgcagtcgatcgcagtcggtgcggccgtagccgcgctggcggttgggacaatgagtgctttcaacaccaaatcaatcgtcattgtcgccgctattatatcggtgttttgcgcgatagcggccattttaggcctgttaatcgcggagagcataaacgtaccgtttaacgcctccggcgacggacgcctgacggggacggacgcggcgtcgaaatcgaacgccgacgatcaggcgaggttattggcggccaaggcgaacgccgtggacgccgccgttaagcgtatgacgaaagcggtcaaccggattaaagccgcttccgccaaaaacgccaaaattataaagagattcaattacacggcgatccgagcccatttattggccttcagaacgactatcaaggcggcgcgcgccggcggtgacggaaacggatacgcgttcatagccgacgaagtgcgcaatttcgcgcaacgttgctctctgacggcaaagaatgccgccgacatgattgagaaatcggtgagagaggccgacaacggggtcaaattggtcgaggacgcggcagcaagattgtcgatacagagctggtag

SEQ ID NO: 30082 - protein, 212 aa, Unknown
  Obtained from environmental sample
  SIGNAL (1)...(28)
  misc_feature (1)..(212): Xaa is any amino acid
MLFNRKGRHIMNIRSKIMQSIAVGAAVAALAVGTMSAFNTKSIVIVAAIISVFCAIAAILGLLIAESINVPFNASGDGRLTGTDAASKSNADDQARLLAAKANAVDAAVKRMTKAVNRIKAASAKNAKIIKRFNYTAIRAHLLAFRTTIKAARAGGDGNGYAFIADEVRNFAQRCSLTAKNAADMIEKSVREADNGVKLVEDAAARLSIQSW

SEQ ID NO: 30083 - DNA, 621 bp, Unknown
  Obtained from environmental sample
  misc_feature (1)..(621): n is a, c, g, or t
ttggcaggcaaattgccgaacttgcaaaacggctcgcactttcactatatgccctaccaaaattcagaagaagctctttccattttgaacaggctttcaaaaaacggcgaactgcaagttctaaccccaatgcacaagggaactctgggaactcaaaacctcaacgcctttatgcaaaaaatactcaatttcaacgcttacggttttgattacagaaacattcattggcaaattggcgaccctgtgatgcaactgaaaaacaactacgaaaaagatattttcaacggcgacttaggacgaataactcgcgttatgccaactgcaaaaaaaatagaagcagattttgaaggcaaaaccataactatagaaggcgatgaatttgagcatttaacccttgcctacgcttgcactgtgcacaaaagccaaggcagcgaatataaatccgtagcggttgtgctggactatacccactccattatgctgcaaagaaatttgctatacacggctgtgacaagggcaaaggaaaatatttggattttagcgagtcagggttctttggaaactgcggttcgcaataatagggagcggcataggtggactgcgctggcggagtttatataa

SEQ ID NO: 30084 - protein, 206 aa, Unknown
  Obtained from environmental sample
  misc_feature (1)..(206): Xaa is any amino acid
MAGKLPNLQNGSHFHYMPYQNSEEALSILNRLSKNGELQVLTPMHKGTLGTQNLNAFMQKILNFNAYGFDYRNIHWQIGDPVMQLKNNYEKDIFNGDLGRITRVMPTAKKIEADFEGKTITIEGDEFEHLTLAYACTVHKSQGSEYKSVAVVLDYTHSIMLQRNLLYTAVTRAKENIWILASQGSLETAVRNNRERHRWTALAEFI

SEQ ID NO: 30085 - DNA, 1308 bp, Unknown
  Obtained from environmental sample
  misc_feature (1)..(1308): n is a, c, g, or t
atgacagctacagcgaaactaaatttaggtggcaaagattattccttgccagtggtaaagggaacgctaaacgaattagccatagatatatctaagctaagggagcaaaccagttatataacgcttgacgatggctttggaaacaccggaagctgcacaagtgcaattacctatatagacggcgataaaggcattttgcgctatcgaggataccccatagaagagcttgccgaaaaaagcacctttatagaaacagcttggacaattatatggggcaggctcccaactcaagccgaattgcgccacttttccttgcttttaacagaacacgagcttatacacgagggtttaaggcatcactttgacgggtttccaatagatgcacctcccatggctatcctcagcgcaatgataaactccatgagctgctacgataacgcattgctcagcaaccgcctaaacgatgaagaatttgaagaagcagctgcaaggctaatttcaaaagttcgcaccattgccgccgccgcatataaaatgagcactggcaggccagttatttatgcggtgccagaatacggttatgtgaataattttttgcacatgatgttcacactgccaaaccgtccatatatagcagaccccgatattgtaaaagcactgaacctcattttgattttgcacgcagaccacgagcagaattgcagcacaagtgctgttcgcatggtagcgagcggcggagcaaacttgtttgccagtgcggcggcgggagtatcagccttgtgggggcatttgcacggcggggcaaatcaagctgttgttgaaatgctggaagagattcgtaaatctcacacatctgttaaagaccttgttgaaaaagtaaaacgcaaagaaaatggcattaaacttatgggctttgggcacagagtttataaaaattttgaccctcgctcaaaaattctgcaagatatcgcttccaaagttttacaaaaacaggggcaaagtgatgagcttctggacattgcccaggaacttgcagaaattgctggaaaagacgattattttatacagcgcaaactttatccgaatgtggatttttattcgggcataattttaaaagccattggcattccgctaaatatgttcacggttatgtttgccattgggcgcatgcctgggtggatagcaaattggaaagaagttcatgataatcccaagcaaaaaatttacagaccgaggcaaatttacatgggcgagaatctaaggcattacgtgcccatagatgtgcgaacagatttacgcctttcgtag

SEQ ID NO: 30086 - protein, 435 aa, Unknown
  Obtained from environmental sample
  DOMAIN (45)...(411): Citrate synthase
  misc_feature (1)..(435): Xaa is any amino acid
MTATAKLNLGGKDYSLPVVKGTLNELAIDISKLREQTSYITLDDGFGNTGSCTSAITYIDGDKGILRYRGYPIEELAEKSTFIETAWTIIWGRLPTQAELRHFSLLLTEHELIHEGLRHHFDGFPIDAPPMAILSAMINSMSCYDNALLSNRLNDEEFEEAAARLISKVRTIAAAAYKMSTGRPVIYAVPEYGYVNNFLHMMFTLPNRPYIADPDIVKALNLILILHADHEQNCSTSAVRMVASGGANLFASAAAGVSALWGHLHGGANQAVVEMLEEIRKSHTSVKDLVEKVKRKENGIKLMGFGHRVYKNFDPRSKILQDIASKVLQKQGQSDELLDIAQELAEIAGKDDYFIQRKLYPNVDFYSGIILKAIGIPLNMFTVMFAIGRMPGWIANWKEVHDNPKQKIYRPRQIYMGENLRHYVPIDVRTDLRLS

SEQ ID NO: 30087 - DNA, 1044 bp, Unknown
  Obtained from environmental sample
  misc_feature (1)..(1044): n is a, c, g, or t
atggcaaaacagttactggttaacgaagaagcccggcacaaattgcttgccggggttgagcaaatctcccgggccgttaaagtaacgctcggtcccaaagggcggaatgttcttttggacaagaaatttggcgctcctaccgtcaccaaagacggcgtttctgtggcaaaggaagttgagttggcggatccctatgaaaatatgggagcccagttattgaaagaagtcgccaccaaaaccaacgatgtggcgggcgacggaaccacgactgctaccgtactggcctattccctcgtgaaagagggcttaaaatccgtagccgccggtatgacccccattgaacttaaacggggcatcgacaaagcggtggaaatcgccgttgcggaaatcaagaaaaattccaaagacatcaaggacaaagaagaaatttcccacgtcgcttcggtttccgccaataacgacaacgaaatcggcaacaccattgccgacgcgatggaaaaagtcggcaaagacggggttatcaccgtggaagagtccaaaacgatggacacgaccattgactttgtggaaggcatgcagtttgaccgcggctatatttccgcgtactttgtcaccgaccgcgataccatgaccgccgtatacgaagatgtctttatcctgatccacgacaagaaagtttccagcatgaaggatatgcttcccctgctggaaaaagttgcccagagcggcaagcccctgctcatcgttgccgaagacgtggatggcgaagccctttccaccctggtgctcaacagcctgcggggaactctgaaaaccgtagcggtcaaggcccccggtttcggtgaccgccgcanagcgatgctggaagacattgccatcctcaccggcgggcaggtcattactgaagagttgggcatgaagctggaaaataccgagctttccaccttggcaaggccaagaccattaaaatcgacaaggacaataccacgatcatcaacggcggcggaaaagccaaggagatcaaggaccgcatcgcccagataa

SEQ ID NO: 30088 - protein, 347 aa, Unknown
  Obtained from environmental sample
  DOMAIN (22)...(347): TCP-1/cpn60 chaperonin family
  misc_feature (1)..(347): Xaa is any amino acid
MAKQLLVNEEARHKLLAGVEQISRAVKVTLGPKGRNVLLDKKFGAPTVTKDGVSVAKEVELADPYENMGAQLLKEVATKTNDVAGDGTTTATVLAYSLVKEGLKSVAAGMTPIELKRGIDKAVEIAVAEIKKNSKDIKDKEEISHVASVSANNDNEIGNTIADAMEKVGKDGVITVEESKTMDTTIDFVEGMQFDRGYISAYFVTDRDTMTAVYEDVFILIHDKKVSSMKDMLPLLEKVAQSGKPLLIVAEDVDGEALSTLVLNSLRGTLKTVAVKAPGFGDRRXAMLEDIAILTGGQVITEELGMKLENTELSTLARPRPLKSTRTIPRSSTAAEKPRRSRTASPR

SEQ ID NO: 30089 - DNA, 354 bp, Unknown
  Obtained from environmental sample
  misc_feature (1)..(354): n is a, c, g, or t
gtggaaagctcggtattttccagcttcatgcccaactcttcagtaatgacctgcccgccggtgaggatggcaatgtcttccagcatcgctntgcggcggtcaccgaaaccgggggccttgaccgctacggttttcagagttccccgcaggctgttgagcaccagggtggaaagggcttcgccatccacgtcttcggcaacgatgagcaggggcttgccgctctgggcaactttttccagcaggggaagcatatccttcatgctggaaactttcttgtcgtggatcaggataaagacatcttcgtatacggcggtcatggtatcgcggtcggtgacaaagtacgcggaaatatag

SEQ ID NO: 30090 - protein, 117 aa, Unknown
  Obtained from environmental sample
  misc_feature (1)..(117): Xaa is any amino acid
MESSVFSSFMPNSSVMTCPPVRMAMSSSIAXRRSPKPGALTATVFRVPRRLLSTRVERASPSTSSATMSRGLPLWATFSSRGSISFMLETFLSWIRIKTSSYTAVMVSRSVTKYAEI

SEQ ID NO: 30091 - DNA, 465 bp, Unknown
  Obtained from environmental sample
  misc_feature (1)..(465): n is a, c, g, or t
gtggaggacgccctgtctgccacccgtgccgcgatcgaggaaggtattgtctcaggcggaggtattgccctcattcaggccgcccttgccctggacaaggccgatacaaacagccttaccgatgatgaaaaagtcggctttaaaattgtaaaacgcgcccttgaagaaccaatccgccagatagccgaaaacgccggtcttgacggagccgtcattgcggaacgcgcaaaggctgaaaagaaaggcattggctttgacgccgccaagatggaatgggtagacatgatgaaggccggtataatcgacccggcgaaagtaacacgctccgccctgcagaacgcggcatccattgccagcctcctgttgaccaccgaatgtgccattaccgacatccccgaaaagaaagaagctccggctatgcccggcggtggaatgggcggcatggngggaatgggatataaatag

SEQ ID NO: 30092 - protein, 154 aa, Unknown
  Obtained from environmental sample
  misc_feature (1)..(154): Xaa is any amino acid
MEDALSATRAAIEEGIVSGGGIALIQAALALDKADTNSLTDDEKVGFKIVKRALEEPIRQIAENAGLDGAVIAERAKAEKKGIGFDAAKMEWVDMMKAGIIDPAKVTRSALQNAASIASLLLTTECAITDIPEKKEAPAMPGGGMGGMXGMGYK

SEQ ID NO: 30093 - DNA, 600 bp, Unknown
  Obtained from environmental sample
  misc_feature (1)..(600): n is a, c, g, or t
atgcatcgttctgtttccaacgaaacaagtaataaatcaaacaacgaacgcctcgaatttttaggcgactccattctaggcgcggtctgcgcttcgcttttgtatcaggcttacaaggataaagccgaaggtgaactggcaaaaataaaagctgtagttgtttccgaagacatactttccggcattgcgttaaatcttggaatagataaaatgctgcttctcggcaagggcgaagaaatgtccggcggcagaacaaaaaaagctattcttgccgacgcgcttgaagcgttaatcggcgcgttgtatcttgattccggctacaagcccgcctttgattttgtcagcgattgcattcagcctgaaattgacaaagtaaccggcacagattatcacaaagattataaatctattttgcaggaatactgccagagggaataccgctgttaccccgaatacgttatggtaaaacgcacgggacctgaacacgaccgcatattctggatggaagttcgcataggcgataaagtttacggcgcgggaaccgggcggaatagaagagcgcggaacaggaagcggctaagaacgcgtgggagcagataa

SEQ ID NO: 30094 - protein, 199 aa, Unknown
  Obtained from environmental sample
  DOMAIN (134)...(193): Double-stranded RNA binding motif
  misc_feature (1)..(199): Xaa is any amino acid
MHRSVSNETSNKSNNERLEFLGDSILGAVCASLLYQAYKDKAEGELAKIKAVVVSEDILSGIALNLGIDKMLLLGKGEEMSGGRTKKAILADALEALIGALYLDSGYKPAFDFVSDCIQPEIDKVTGTDYHKDYKSILQEYCQREYRCYPEYVMVKRTGPEHDRIFWMEVRIGDKVYGAGTGRNRRARNRKRLRTRGSR

SEQ ID NO: 30095 - DNA, 327 bp, Unknown
  Obtained from environmental sample
  misc_feature (1)..(327): n is a, c, g, or t
atgatccccgcaaattcgcttgacggagcgcatattttcttccccgatccctggcccaaaaagcgccaccacaagcgcaggctgatacagcggcattttacggatcgcgttagttcaaggttaaagccgggtggctatatctacatggtcagcgactggctggactacgcccattgggcgctggctgtgttaaccgatactgaaggtctggttaacgaatatgggggctttagcctgccccaatcatggcggcccctgacaagttttgaaaaaaaagggcttgacaagaaacatgaaataaaggaattgtttttcaggcggatctga

SEQ ID NO: 30096 - protein, 108 aa, Unknown
  Obtained from environmental sample
  DOMAIN (2)...(108): Putative methyltransferase
  misc_feature (1)..(108): Xaa is any amino acid
MIPANSLDGAHIFFPDPWPKKRHHKRRLIQRHFTDRVSSRLKPGGYIYMVSDWLDYAHWALAVLTDTEGLVNEYGGFSLPQSWRPLTSFEKKGLDKKHEIKELFFRRI

SEQ ID NO: 30097 - DNA, 711 bp, Unknown
  Obtained from environmental sample
  misc_feature (1)..(711): n is a, c, g, or t
atgaaggaagacggcgccataggcgtgtggacttcccgctcccacgacgacccgttaattacaacttatgccgcgcatttccttactgaagcgcgcagcgcgaattattatgtttcgcccgctatgatggaaaaactgcttaacgcgtgccgaaacatcgcttcatatccgggaacaagccattacgattttacaacccgcgcttacgcgatttatattcttaccagaaacgaaattgtcaccactcagcttgttgaatcgctcaaaagggacatgaatcgctttgacgagtcgcagaccgggattgccggtctttaccttgccggaacttacgcgctattgcaaaaaacaaacgacgccgccctgcttctgggaaaaatcaaacgcgcgatggcaaaagacagcagcttccgttacattgacgagcttatgtatcattcgatatacctcaacattttatcgaggcatttccctaatcgtttgcgagacatatcggagtccttgttagttgacatggcaggacagatggaaagacagtcctacactagtatttccgcaaaccacgcgcttatggcgattgacgcctatctgaaagccgttccatcagcggaaacaggccgctatacaatacaggaagtttcaaaggacaaccagcgcaaagaattaaaagccgccggaaacactttattcagcgcctccttctcccgctaa

SEQ ID NO: 30098 - protein, 236 aa, Unknown
  Obtained from environmental sample
  misc_feature (1)..(236): Xaa is any amino acid
MKEDGAIGVWTSRSHDDPLITTYAAHFLTEARSANYYVSPAMMEKLLNACRNIASYPGTSHYDFTTRAYAIYILTRNEIVTTQLVESLKRDMNRFDESQTGIAGLYLAGTYALLQKTNDAALLLGKIKRAMAKDSSFRYIDELMYHSIYLNILSRHFPNRLRDISESLLVDMAGQMERQSYTSISANHALMAIDAYLKAVPSAETGRYTIQEVSKDNQRKELKAAGNTLFSASFSR

SEQ ID NO: 30099 - DNA, 447 bp, Unknown
  Obtained from environmental sample
  misc_feature (1)..(447): n is a, c, g, or t
ttgcccacaaaggaaacaaagaacggcatcgaagtttacagggaattttttgacggcgagggaaaagcggtaagctctttcaaagcgggcgatgtggtaacggtaaaactcaatttccgcagtctttccaataatgagtaccgtgatgtggctattgtcgatttatgtcccgccggtcttgagacggaaattgaatcggtacggcaagccggaagccaggcttccgatcaatcatcccgcgacgcgtggaaggccgactatgttgatgtccgcgaggacaggctggtaatttacggcactgtaagcggtaaaatagcaagtttcagttaccgcgcaagagcgattaacacgggcagttttacaactccgcctctttttgccgaagcgttatacgataaatcggtttgggcgcttcgcccgcaggcttcgattaagattgttaaatga

SEQ ID NO: 30100 - protein, 148 aa, Unknown
  Obtained from environmental sample
  misc_feature (1)..(148): Xaa is any amino acid
MPTKETKNGIEVYREFFDGEGKAVSSFKAGDVVTVKLNFRSLSNNEYRDVAIVDLCPAGLETEIESVRQAGSQASDQSSRDAWKADYVDVREDRLVIYGTVSGKIASFSYRARAINTGSFTTPPLFAEALYDKSVWALRPQASIKIVK

SEQ ID NO: 30101 - DNA, 1464 bp, Unknown
  Obtained from environmental sample
  misc_feature (1)..(1464): n is a, c, g, or t
gtggtcaatttccgtgcgattgtaggcagggcggccagactaacgcccacggatattaccatgggtatcattggcattgttatccttgctgagctttgccgtcgggttgtggggcttcccatcctggttgtcgccgggggctttgtcgcatacgcctttttgggcggctattctttacgccggatagttcatcagcttttctacacaaccgaaggggtcataggcactcccataagtgtttgttcaacttttattgttctgtttatttttttggcggcctttttggaaaagtcaggaatcgcgaatttctttattgacctggccaattcggtggcgggattcactgccggcggccctgccaaagtggcggtaattgccagcgcccttttcggaatgatctcaggaagctcggtagctaacacagtcggctcaggcagtgtaaccatcccgaccatgaagagaaccggatacaagccggagtttgccgcggcggttgaggcatcagcttctaccggcggacaaatcatgcctccaatcatgggggccgccgcctttcttatggcggagttgactggtactccatacgctacgattgcggtagccgccatcctgcccgctgtgctttactttacaggaatcttcctgatggtgcattttgaagcgaagaaactgggcttaaaggggcttccgaaagaatcgataccgcatttcggtcggctattaataacgaaaggctttttattcattcctatagtcgttcttataggcatgatgactttaggttttacccctgcttttgccgcctgtttcggcattctcgcggctttcctggttagttttatcaggaaagaaactcgctttaccaaggcgactctggtggacgccctcgcgggtggctcgcgcaacaccatcggcgtagcagtggcatgcgctatggcgggtatcgttgtcggtattgtaaccctgacgggaattggacagactctaataggcgcgttgattggcgttgtcaacaaccccttctttctttccaccggaacaagccttttggtagctttgtttattacgatgatcgcctgcctaatcctgggaatgggtgtccccactaccgccaactacgtaatcatggctacaattaccgcccccatggtactgcggactggaagggaactgggaattgttgtgccactgatagcggcccatatgtttgtcttttactttgggatcatcgcagacatcaccccacctgtagccctggcagcttatgcgggctcagcaatcgcgaagagcaatcccatcaagaccggccttacggccagcaggcttgccatcaccgcctttataattccctatatattcgttttcaatcccacaatgttatgggtcggggcttcccctttgaatgtaatccaaatcataataacttcctttataggaatgtttggtttggcagccnggaattga

SEQ ID NO: 30102 - protein, 487 aa, Unknown
  Obtained from environmental sample
  DOMAIN (24)...(469): DctM-like transporters
  misc_feature (1)..(487): Xaa is any amino acid
MVNFRAIVGRAARLTPTDITMGIIGIVILAELCRRVVGLPILVVAGGFVAYAFLGGYSLRRIVHQLFYTTEGVIGTPISVCSTFIVLFIFLAAFLEKSGIANFFIDLANSVAGFTAGGPAKVAVIASALFGMISGSSVANTVGSGSVTIPTMKRTGYKPEFAAAVEASASTGGQIMPPIMGAAAFLMAELTGTPYATIAVAAILPAVLYFTGIFLMVHFEAKKLGLKGLPKESIPHFGRLLITKGFLFIPIVVLIGMMTLGFTPAFAACFGILAAFLVSFIRKETRFTKATLVDALAGGSRNTIGVAVACAMAGIVVGIVTLTGIGQTLIGALIGVVNNPFFLSTGTSLLVALFITMIACLILGMGVPTTANYVIMATITAPMVLRTGRELGIVVPLIAAHMFVFYFGIIADITPPVALAAYAGSAIAKSNPIKTGLTASRLAITAFIIPYIFVFNPTMLWVGASPLNVIQIIITSFIGMFGLAAXN

SEQ ID NO: 30103 - DNA, 408 bp, Unknown
  Obtained from environmental sample
  misc_feature (1)..(408): n is a, c, g, or t
atggcggctaccgcaatcgtagcgtatggagtaccagtcaactccgccataagaaaggcggcggcccccatgattggaggcatgatttgtccgccggtagaagctgatgcctcaaccgccgcggcaaactccggcttgtatccggttctcttcatggtcgggatggttacactgcctgagccgactgtgttagctaccgagcttcctgagatcattccgaaaagggcgctggcaattaccgccactttggcagggccgccggcagtgaatcccgccaccgaattggccaggtcaataaagaaattcgcgattcctgacttttccaaaaaggccgccaaaaaaataaacagaacaataaaagttgaacaaacacttatgggagtgcctatgaccccttcggttgtgtag

SEQ ID NO: 30104 - protein, 135 aa, Unknown
  Obtained from environmental sample
  misc_feature (1)..(135): Xaa is any amino acid
MAATAIVAYGVPVNSAIRKAAAPMIGGMICPPVEADASTAAANSGLYPVLFMVGMVTLPEPTVLATELPEIIPKRALAITATLAGPPAVNPATELARSIKKFAIPDFSKKAAKKINRTIKVEQTLMGVPMTPSVV

SEQ ID NO: 30105 - DNA, 873 bp, Unknown
  Obtained from environmental sample
  misc_feature (1)..(873): n is a, c, g, or t
atgatcccgtcggggagaagggaaaaagtccctaccctgccctcaggcgacgaggaaatatttccttctctttcaatgtcagacgaacaggcggccgccttaagcgcaataacttctccggttgaaaattccgagtccaatttgccgccgatgttctatctatacggcgttacgggatcaggcaaaacggaagtgtttctacgagcggctcaatttatgcttaacgccggaaagtccgtcatctatcttgtgcctgaaatatcgcttacccatcaaacatcgcgtatgattggaaaccgtttcggttcgcttgccgccaccttacattcgggaatgactccttccgcgcgtctttcagaatggatcaggataaaaaacggaaaagcgccgattgtcgtaggaccgcgaagcgcggtattcgctcccgtgccgaatctcggacttattattatagatgaagaacacgacggttcatataaatcgggtaatactccccgttaccacgccagacagattgcgcttcaccgctgttcaaaagaaggggcgagtcttgttatgggatccgcgactccttcggcggaggcgtggaaactaatgcaggaagccggtattaaaagacttggcctctctcgccgtctttcaggcggaggaatgcccgagataaaaaccgtaagcctcgctaaaaccgaaggctgtcttacaaaggaattaaaagatgaaatccgcctgaccgcgcaaatgggaagacaaactatcctttttttaaccgcagaggcttcgctcatttttataaatgcccccgaatgcgggctggggaacttatctgtaaaacgctgtttccgtatcggcttacatggccataaaaaccgttaa

SEQ ID NO: 30106 - protein, 290 aa, Unknown
  Obtained from environmental sample
  DOMAIN (23)...(193): Type III restriction enzyme, res subunit
  misc_feature (1)..(290): Xaa is any amino acid
MIPSGRREKVPTLPSGDEEIFPSLSMSDEQAAALSAITSPVENSESNLPPMFYLYGVTGSGKTEVFLRAAQFMLNAGKSVIYLVPEISLTHQTSRMIGNRFGSLAATLHSGMTPSARLSEWIRIKNGKAPIVVGPRSAVFAPVPNLGLIIIDEEHDGSYKSGNTPRYHARQIALHRCSKEGASLVMGSATPSAEAWKLMQEAGIKRLGLSRRLSGGGMPEIKTVSLAKTEGCLTKELKDEIRLTAQMGRQTILFLTAEASLIFINAPECGLGNLSVKRCFRIGLHGHKNR

SEQ ID NO: 30107 - DNA, 492 bp, Unknown
  Obtained from environmental sample
  misc_feature (1)..(492): n is a, c, g, or t
atgcctgaaacgaattataaaaggcccacatgggacgagtattttatggaagtctgcgaggctatctccaagcgggcgacctgtgaccggggaagatccggatgtgtcattgcgaaaggtaaccagctgcttgttaccggttatgttggcgctcctgccgggcttcctcattgcgacgaggaaggccatcagtttaaaaaaatgcttcatgaggatggctcggtaaccactcactgcgtacggaccgtgcacgccgaacaaaacgcgatttgccaggccgcaaagcgcggcattcctatcgaaggcgcgactttatattgcagaatgactccgtgcagaacatgcgccatgcttataattaactgcgggatagtaagggtagtatgccagaggcgctatcacgacgcggacgattccgaggctatgtttcagcttgccgggataaaactggaatatgtgtataatgaaacccaacaatacgttaatcaataa

SEQ ID NO: 30108 - protein, 163 aa, Unknown
  Obtained from environmental sample
  DOMAIN (9)...(131): Cytidine and deoxycytidylate deaminase zinc-binding region
  misc_feature (1)..(163): Xaa is any amino acid
MPETNYKRPTWDEYFMEVCEAISKRATCDRGRSGCVIAKGNQLLVTGYVGAPAGLPHCDEEGHQFKKMLHEDGSVTTHCVRTVHAEQNAICQAAKRGIPIEGATLYCRMTPCRTCAMLIINCGIVRVVCQRRYHDADDSEAMFQLAGIKLEYVYNETQQYVNQ

SEQ ID NO: 30109 - DNA, 996 bp, Unknown
  Obtained from environmental sample
  misc_feature (1)..(996): n is a, c, g, or t
gtgctggtgctgggcggcggtccgaacacaactacccttgcggtagaaatataccgttacgcgcgtatttttttgaattacagcaacgctggatttttggcattgatcgaaaccatgattgccgtaagtgtttttttgatttatgtttttgccgggaagaaatcaggggagataaaaacaaatcttcatgaatacgccgagacagggagaaaatccgccgtatcgcggtttgtaatgatcgcgtactttatcgtcatggctttttttgttcttggcccgcttctttccattccgctggaatcttttttatacaggccgtcccgcgcggcggcgcaggttttgagcgttaggtggtggagcgggcttggcggtacatgccttccggcgcttgggcgttcgcttacgattgcctttttttcagcgacgactgcctgcattcttgcgttctgcgcggcaggagcggtaaaactccttgaaacaaacaacgganagactttccttccggttaattttatccggtttctggccgcttctccggtaatatcgtcgggcattgttttgggggtaggctggctcattttatatgggagaagtttctcccgcgcgccgcttgcgcttgtgatacttcacggggtaagcgctatgcctttcgctnttaattttatttccgaaggtttccgctcccttcccgccaacacattgaacgccgcggccgtcttcggcgcagacncactgcgcgggcttttaaccgccgctctcccgctttcgctgtccagagtacgttccgcgtggggcttcgccgcggcgctcagtcttggagaacttaacgcggtgatgatgcttggcatggaaggctgggaaactttgcccctgtacatctaccgcgccgccgcgtcttaccgttacggaacagcctgcgccgccggaaccctgctgatactttgctgcgccgcctgcttcctgctttccgagacagggagagaaaaatatgcttga

SEQ ID NO: 30110 - protein, 331 aa, Unknown
  Obtained from environmental sample
  misc_feature (1)..(331): Xaa is any amino acid
MLVLGGGPNTTTLAVEIYRYARIFLNYSNAGFLALIETMIAVSVFLIYVFAGKKSGEIKTNLHEYAETGRKSAVSRFVMIAYFIVMAFFVLGPLLSIPLESFLYRPSRAAAQVLSVRWWSGLGGTCLPALGRSLTIAFFSATTACILAFCAAGAVKLLETNNGXTFLPVNFIRFLAASPVISSGIVLGVGWLILYGRSFSRAPLALVILHGVSAMPFAXNFISEGFRSLPANTLNAAAVFGADXLRGLLTAALPLSLSRVRSAWGFAAALSLGELNAVMMLGMEGWETLPLYIYRAAASYRYGTACAAGTLLILCCAACFLLSETGREKYA

SEQ ID NO: 30111 - DNA, 759 bp, Unknown
  Obtained from environmental sample
  misc_feature (1)..(759): n is a, c, g, or t
atgaaacaaatatacggttatcctgacagtttgtacaaaattcccacaaagtattgcgggggctgcggtcacggtgtgatacaccggatcatcgccggtatcattgacgagcttggcttacgggaaaaagcggttatcacaaacccggtgggctgcgccatctgggcggatctgtactttgatttcgattctgtacagcccgcgcacggccggactcccgccgcggcaacaggcgttaagcgtatgctgcccgatcacctggtgatatgctaccagggcgacggcgacatggccgccataggcactgcggaaatgatccacgcggcgaaccggggtgaaaaattcaccacgatttttgtcaacaacgcgatttacggcatgaccggcgggcagatggcccccacgacactgatcgggcaaaaagccaaaacagccccctttggccgcgatccggatgccgccggaatgggctaccccatccgcgttggcgaactgcttgccacgcttgacggaacccgctacattgcgcggggggcagtgaacaacgcggcnaacatacgcaaaacgcggcagtatataaagaaggccctggaggcccagatggctggacagggcttcacaatggtggaagtgctttccccctgccctactaactgggaattggatccgattgcggcagttgaatggctggaaaaaaacatgattcccgtatttccgcttggagagattaaaaacacactaaccggaggctcaaaatga

SEQ ID NO: 30112 - protein, 252 aa, Unknown
  Obtained from environmental sample
  DOMAIN (49)...(211): Thiamine pyrophosphate enzyme, C-terminal TPP binding domain
  misc_feature (1)..(252): Xaa is any amino acid
MKQIYGYPDSLYKIPTKYCGGCGHGVIHRIIAGIIDELGLREKAVITNPVGCAIWADLYFDFDSVQPAHGRTPAAATGVKRMLPDHLVICYQGDGDMAAIGTAEMIHAANRGEKFTTIFVNNAIYGMTGGQMAPTTLIGQKAKTAPFGRDPDAAGMGYPIRVGELLATLDGTRYIARGAVNNAANIRKTRQYIKKALEAQMAGQGFTMVEVLSPCPTNWELDPIAAVEWLEKNMIPVFPLGEIKNTLTGGSK

SEQ ID NO: 30113 - DNA, 534 bp, Unknown
  Obtained from environmental sample
  misc_feature (1)..(534): n is a, c, g, or t
atgacggaaaaatcgctatttgccggattcggagggcagggaatcatctccatgggccagctttgggtttattttgccatgcaggaggggaaaaacgtaacttttttcccattttacggcgcggaaaagcgcggaggcgtcgccagagcgggcgtaattgtgtcggatgaggaaattgccagccctttggtgacaacgccggactcaaccctcgttatgaacggtgattcccttcctgtttgcgagaaaattgtcaaagaaaacggcttaatattgttaaattccagccttgtaaaggaagaacccaccagaaaaggcttaaaaatcgccaaaattgaggctacaggcattgccgaacagattggaaacctcgtttttgccaatatggtggctctcggagccatggtaaagctaaccggagccatgaaattagccgatattgaaggtatgttgatgaaatttttcccgccggataaacatcaatatgttccgatgaacgttaaggcaatacaggcgggttatcaatcagtataa

SEQ ID NO: 30114 - protein, 177 aa, Unknown
  Obtained from environmental sample
  DOMAIN (11)...(175): Pyruvate ferredoxin/flavodoxin oxidoreductase
  misc_feature (1)..(177): Xaa is any amino acid
MTEKSLFAGFGGQGIISMGQLWVYFAMQEGKNVTFFPFYGAEKRGGVARAGVIVSDEEIASPLVTTPDSTLVMNGDSLPVCEKIVKENGLILLNSSLVKEEPTRKGLKIAKIEATGIAEQIGNLVFANMVALGAMVKLTGAMKLADIEGMLMKFFPPDKHQYVPMNVKAIQAGYQSV

SEQ ID NO: 30115 - DNA, 825 bp, Unknown
  Obtained from environmental sample
  misc_feature (1)..(825): n is a, c, g, or t
gtgggcagttacaccgtaaccgtgagtgcggcaggatacaatcacaaaaccagcggggcggttacggtaacattatccgatctggcgggcgctatcacaatcagccctaacacaggcgttaacatcggaacggaattgaccgcaacctacagcggaagcgaaactgtcagctatcaatggcaaaaggacggagcgaatgtcggaacgaactccagcaagtacacgccgacagaagcgggagactacaccgtaaccgtaagcgcgacaggttacaactccaaaaccagctcgatggttactgtcgaactgttacgcggcacagaagaaaatcccttcctcgtaaccaacgaagccgatctccgcaaggtcggcactgaaaccgccgatggtggctggacgctttcggtacactacaaacagacggcgaacatcacgctgagcggcaactttacgccgattggctacgccgccggttccggaaccactaaattctcaggcgggtatgacggcggcggacataccattagcggcttgaccataaccggcacggccaattatttaggtttattcggctctgtcgacgcagacgctacggtgaaaaacctgaacgtctcaggcacgataactcaaaacgaagacacaacgtataccggcggcattgtcggtacaaactttggcacgattgaaaactgctcctttagcggaaccgttaccggatcagcctgcgatattataggcggcattgccggacagaataacggcacggtgataaacagcagaaacaccgcaacggtaacaggcagaactcaggtcggcggcatgtag

SEQ ID NO: 30116 - protein, 274 aa, Unknown
  Obtained from environmental sample
  DOMAIN (213)...(238): The GLUG motif
  misc_feature (1)..(274): Xaa is any amino acid
MGSYTVTVSAAGYNHKTSGAVTVTLSDLAGAITISPNTGVNIGTELTATYSGSETVSYQWQKDGANVGTNSSKYTPTEAGDYTVTVSATGYNSKTSSMVTVELLRGTEENPFLVTNEADLRKVGTETADGGWTLSVHYKQTANITLSGNFTPIGYAAGSGTTKFSGGYDGGGHTISGLTITGTANYLGLFGSVDADATVKNLNVSGTITQNEDTTYTGGIVGTNFGTIENCSFSGTVTGSACDIIGGIAGQNNGTVINSRNTATVTGRTQVGGM

SEQ ID NO: 30117 - DNA, 510 bp, Unknown
  Obtained from environmental sample
  misc_feature (1)..(510): n is a, c, g, or t
atgtggtgcatgcgagattctatgagcaacttaattctatggaagaagattagtttttactatattttctatatgaaagctatatctttaatcggtgctctatttttttgcgtggtcttcatattggtgggttgcggcgaagttggaggaccagaaagtcagaacagtagctccagcaatctgggtggcagttccagtagcttgcacagcagcagttccagcaccctaggcatcagctcaagtacccagagtagcagttctagcgactcggttagcagcagttccaacgattcggttagcagtagcagctccgaggaatcaagcagcagttccgaagaagaaccgagcagcagctccgaggaatcaagcagcagttccgaagaagaactgagcagcagctccgaggaatcaagcagcagttccgaagaagaaccgagcagtagttcctcagaatctgacggcggttccgaagaatcgttattacgcggtcgtttgcttggtaggttctaa

SEQ ID NO: 30118 - protein, 169 aa, Unknown
  Obtained from environmental sample
  misc_feature (1)..(169): Xaa is any amino acid
MWCMRDSMSNLILWKKISFYYIFYMKAISLIGALFFCVVFILVGCGEVGGPESQNSSSSNLGGSSSSLHSSSSSTLGISSSTQSSSSSDSVSSSSNDSVSSSSSEESSSSSEEEPSSSSEESSSSSEEELSSSSEESSSSSEEEPSSSSSESDGGSEESLLRGRLLGRF

SEQ ID NO: 30119 - DNA, 522 bp, Unknown
  Obtained from environmental sample
  misc_feature (1)..(522): n is a, c, g, or t
gtgcgaagagacgaaatgctgaaatatcttgagatattgggccaagagtttgagaaggccggtttgcgcggcgagatcatcatcaccggcggcgcggcgatgtgcctagtacattcggtccgcgacgcgacaaaggatatagatgcgttgtatgaaccgaagagcgaaatactggctttggcggagaaaatcgcgaatgagcacggtctgccgcaaaactggctaaacgacggcgtcaaaggatttatgggcgacaacgttgaggtcgtggaattcatgcaaaccggcggcctgaaaatctcaaccgtaacgccggagtacctgctcgcgatgaaattgatgtcgtcgagggtggagggtcaggactacaacgacataaaatttttgctgcgcaaactcaacatctgtacctttgaagacgccgcgtcggtaatcaggcgcttctttccggtggacagaatcctgccgaaaacggggtacgtcattgagcagtttttggacgaacttcgcacggatccatga

SEQ ID NO: 30120 - protein, 173 aa, Unknown
  Obtained from environmental sample
  misc_feature (1)..(173): Xaa is any amino acid
MRRDEMLKYLEILGQEFEKAGLRGEIIITGGAAMCLVHSVRDATKDIDALYEPKSEILALAEKIANEHGLPQNWLNDGVKGFMGDNVEVVEFMQTGGLKISTVTPEYLLAMKLMSSRVEGQDYNDIKFLLRKLNICTFEDAASVIRRFFPVDRILPKTGYVIEQFLDELRTDP

SEQ ID NO: 30121 - DNA, 306 bp, Unknown
  Obtained from environmental sample
  misc_feature (1)..(306): n is a, c, g, or t
atggaggagcagggggcaggggaggcaaagcagatacttgaggggggtaggggagataaacgaaataccccgccaggtaaaagggcgattccccgccagatgcttgaagagggcaaaggacgtataaaaaggaaagcgagaaccttgaaaggggcgacgtatgaaataacgacgggcatggaagagatgaccgtaggcgcggatcacatcaatctttctgtgaatcaggtcaacgagataggttacaagaaccgcgatgccatagacacgctgatgaaggaagtttcgcgctttaaggtagagtaa

SEQ ID NO: 30122 - protein, 101 aa, Unknown
  Obtained from environmental sample
  misc_feature (1)..(101): Xaa is any amino acid
MEEQGAGEAKQILEGGRGDKRNTPPGKRAIPRQMLEEGKGRIKRKARTLKGATYEITTGMEEMTVGADHINLSVNQVNEIGYKNRDAIDTLMKEVSRFKVE

SEQ ID NO: 30123 - DNA, 1575 bp, Unknown
  Obtained from environmental sample
  misc_feature (1)..(1575): n is a, c, g, or t
atggaaaaaattacaattgaagataacgacgtattaagccgctgtattgctgaactcggatctcttattgagctggaagaaaaatttagcgacccgcccctcgttccttcttcagccttcgggtttttcctttcgtacctgaacggaaaggagtatgtaaggaaagaacaaaaatacggtgtgaacattttcaggtggcgggtagcggcggcggctccttttgcctgccactttgtgcttaacgcgtctcagaacgccgcgtcggtgctttaccagcctttgaagttcttgcgccaggacaagcgaagagccctgggccttgaggatgccgatgcgtcaggcgcttttttccttctgtgcgatacaggacgcgatacagtagaaggcgctggctttaaaactcacgcgagaataagcgcctcggagcaaactttttcaggctgggcgattccccacagtttttttgcccagggcaagatagttgatccgccagaaagtttttttgatccttacgccgaagagcaccgcttctggagggaaggtgttgtgcttggggaaattttcccgctgcaaaagtgctcttatgaatgctggaaagataatctcattcaaaaagaaaataatttttcgttttttactactcctgtttctgcggaaaaaagcagcgctgtacgggagcttcttgaaagcgccacagaagacgacaatggctgcattgccgttacgcccaccagggatctcaatgtgtattacaactgcgctctgttctggctttacgcaagggtcttcaaggcggaggagttttcacttgatgccgcgcttctggacgatacctctctgggcattctttatcataaagctttagaggagctttttgcgaaaataaaaagcgaggatcgcgtatttgattccgttcgcctggatgtatataaaaactgggcttatgagatcaccagagaagccatcaaagagcatccggcgtttaaagggccactggccgttccgctggtttccccccaggcggcggggatagcaaaaaaaattgagcgccttctggaactggaagccgcgaatttcaacggctatgaggtttccgaactggagcttcatgtcgatcgtaaagcaggcgatcttctcataaacggggtcattgaccgggtttcggtttcgcctgacggtgagcctgtcattattgattacaagacgaattatcttccggaacaaacggcggcggaagatctgccggaagttcccctctcggaattccagatgcctctttacataaaactttatgaggagggagcaggcgtaagaaaagaagcttccggcaaggtatgcggcgcttttttctacagcattaacggcaggaggatcaaagccgtagtgggggagacggcaagcggaaggagcaaagccccggaccgcgaaggttacgaacttttcctggaagcggcggaaaagcaaatcgaaaaattcggaaggaaggtgaaagcccttgacttcgttccaagggaaatacgcatcagggactgcctggtctgtgcgtacaaaactgcctgccgaacggtgtattag

SEQ ID NO: 30124 - protein, 524 aa, Unknown
  Obtained from environmental sample
  misc_feature (1)..(524): Xaa is any amino acid
MEKITIEDNDVLSRCIAELGSLIELEEKFSDPPLVPSSAFGFFLSYLNGKEYVRKEQKYGVNIFRWRVAAAAPFACHFVLNASQNAASVLYQPLKFLRQDKRRALGLEDADASGAFFLLCDTGRDTVEGAGFKTHARISASEQTFSGWAIPHSFFAQGKIVDPPESFFDPYAEEHRFWREGVVLGEIFPLQKCSYECWKDNLIQKENNFSFFTTPVSAEKSSAVRELLESATEDDNGCIAVTPTRDLNVYYNCALFWLYARVFKAEEFSLDAALLDDTSLGILYHKALEELFAKIKSEDRVFDSVRLDVYKNWAYEITREAIKEHPAFKGPLAVPLVSPQAAGIAKKIERLLELEAANFNGYEVSELELHVDRKAGDLLINGVIDRVSVSPDGEPVIIDYKTNYLPEQTAAEDLPEVPLSEFQMPLYIKLYEEGAGVRKEASGKVCGAFFYSINGRRIKAVVGETASGRSKAPDREGYELFLEAAEKQIEKFGRKVKALDFVPREIRIRDCLVCAYKTACRTVY

SEQ ID NO: 30125 - DNA, 1044 bp, Unknown
  Obtained from environmental sample
  misc_feature (1)..(1044): n is a, c, g, or t
atgatattgaaacaatgcaaggacggcacaacgcccacacccctgaccctgactcacgccctgcctgatatttccgcgtctactatcgcggaacttaccggcgttataccgaccagcgcgaacattgactattatgaaaactttatttttgaagaaagtaaaaaaagaaatttcatattgtctttagagctggcaaaaaaggaaattgataatcataccgacaccgacacggttattaaaaacctgctgcccgcgcttgccgcggtaacaacggcgcggaacgaggcggcgataaaaagcgcggctgaattattgaaaatggaatttccggaaatacgctggatcattaaagggcttataggggaggggctgacgatgatcaacggagctcctaaaatcgggaaatcatggtttgtccttaacctggccattgccgcggcttccggcggccgcttcctgggggaactaccggcaacaaaaacagaaacactttatcttgcccttgaggacacggagaggcgcatacacagccggcttaaaaaactgaaagccccggaagcggacaatttgaaaatcacaacgcaatggcgggacggttatatgggcctggaaaactacctgaaagacaataacgggatcgggcttgtgataatcgacacactggcccgcttcgcgcacatcgaggacatgaacgactacaccataacgactaacgcgatggcgcggctgaaacggattgccgatgatcttaatatcgctattatcctgatacacccatgcaagaaaacaggaaaacaaacatccgggactgactggatggaaagcgccctgggcagtaccgggctgacaggcgcgaccgacagcactatttttataaaccgttcccggagcgaggataaaacggataacaccgcgaacctttacgcgaccggcagggacgcagcggacattaaatattcactaaaacttgacattgattttggcggctgggctattgcaaaagacaatccggggcaaaaaacgcactggacgcccggaggctaa

SEQ ID NO: 30126 - protein, 347 aa, Unknown
  Obtained from environmental sample
  misc_feature (1)..(347): Xaa is any amino acid
MILKQCKDGTTPTPLTLTHALPDISASTIAELTGVIPTSANIDYYENFIFEESKKRNFILSLELAKKEIDNHTDTDTVIKNLLPALAAVTTARNEAAIKSAAELLKMEFPEIRWIIKGLIGEGLTMINGAPKIGKSWFVLNLAIAAASGGRFLGELPATKTETLYLALEDTERRIHSRLKKLKAPEADNLKITTQWRDGYMGLENYLKDNNGIGLVIIDTLARFAHIEDMNDYTITTNAMARLKRIADDLNIAIILIHPCKKTGKQTSGTDWMESALGSTGLTGATDSTIFINRSRSEDKTDNTANLYATGRDAADIKYSLKLDIDFGGWAIAKDNPGQKTHWTPGG

SEQ ID NO: 30127 - DNA, 531 bp, Unknown
  Obtained from environmental sample
  misc_feature (1)..(531): n is a, c, g, or t
atgataggtatcatcggaggcagcggccttgataaccctgaaatttttcacaacagcagggatgaaaatgtatcgacagtttacggcgagccgtcttccgctcttaaacatggagacatagacggcgttcaggtagttcttttggcccgtcacggaagggagcacacaattcctccctctcaggttaattacagggccaacatttcagctttaaaaaaagccggatgcaactatataatcgccaccactgcggtcggttcccttaaagaggaaattcaccgcggggatctggtaattgtcgatcaatttattgactttacaaagcagcggaagatgagcttttacgaatcttttgagcctcataacccggtgcacgtatcaatggccgatccctacgacagccacttgcggggaattcttattgatgagtgcaaagcgctgaattacccattccatgaaaaaggaacggtaataaccattgaagggcccaggttttcaagccgcgcggagtccttcatgttccgcgcctag

SEQ ID NO: 30128 - protein, 176 aa, Unknown
  Obtained from environmental sample
  DOMAIN (1)...(176): Phosphorylase family 2
  misc_feature (1)..(176): Xaa is any amino acid
MIGIIGGSGLDNPEIFHNSRDENVSTVYGEPSSALKHGDIDGVQVVLLARHGREHTIPPSQVNYRANISALKKAGCNYIIATTAVGSLKEEIHRGDLVIVDQFIDFTKQRKMSFYESFEPHNPVHVSMADPYDSHLRGILIDECKALNYPFHEKGTVITIEGPRFSSRAESFMFRA

SEQ ID NO: 30129 - DNA, 759 bp, Unknown
  Obtained from environmental sample
  misc_feature (1)..(759): n is a, c, g, or t
gtgattcttcagcagatcggcttgatttttacaaccgcgggaaacgccggttttattacagggctttatgttgtaattactcctattgttggaatttttttgggaaggaagacagggcttccaacatgggttggttctgttcttactctcacagggctttactttgtcagcgccgcgggtcgtccttccgtgaatcccggcgatttaattactattgtaagcgcttttttatggacagttcatgttctgcttattgatcgatttatgcatgttgatattcagcgtaaaaattctgttgacccaatagaactttccgcgggtcagtttgcggtttgcggagtattaatgctgttaggcgcatttattgccgaacctcatgtgattccagtaatagaaaaaattaatccctcactgcttgataacggtctttttgaatggaaacctttacctgcgcttattaccgctgttaagaacggaactctgcggatttcttttcaatcttttattccgattctgtacggcggactttgttcggtggggattgcttacactttacaggtagtcgctcaacgcgatgcgccgcctgctcatgcggttataattcttagttttgaaggctgttttgccgctctcggcggggtgttgttgctttccgagaaaatcggtttatggacattgctgggatttgttttgatgcttgccggtatgctcgctactcaatgggatgtgattgttaagacgaatagagtgaatagttga

SEQ ID NO: 30130 - protein, 252 aa, Unknown
  Obtained from environmental sample
  DOMAIN (76)...(241): Integral membrane protein DUF6
  misc_feature (1)..(252): Xaa is any amino acid
MILQQIGLIFTTAGNAGFITGLYVVITPIVGIFLGRKTGLPTWVGSVLTLTGLYFVSAAGRPSVNPGDLITIVSAFLWTVHVLLIDRFMHVDIQRKNSVDPIELSAGQFAVCGVLMLLGAFIAEPHVIPVIEKINPSLLDNGLFEWKPLPALITAVKNGTLRISFQSFIPILYGGLCSVGIAYTLQVVAQRDAPPAHAVIILSFEGCFAALGGVLLLSEKIGLWTLLGFVLMLAGMLATQWDVIVKTNRVNS

SEQ ID NO: 30131 - DNA, 423 bp, Unknown
  Obtained from environmental sample
  misc_feature (1)..(423): n is a, c, g, or t
ttggaggtgttggcgatcagcacagtacgctccatcagcgaccttccgctgcggggatcgataagatgcggaaaatcagtgagcacatcggtcatttcgttcccgcgctccccgcagcctatgtatataatcacgtcggcgtcgcaccatttcgcgatggcgtgctgggtcatggtcttgccggtaccgaagccccccgggatggcggctgttccgcccttggaaatcgggaaaaaaacgtcgattaccctttgccctgtgataaggggcgtgtcgggagaaagccgctcggcgctcggcctgggaatccgcgcgggccaccaatgcgaaagcgtaatttcctcgccctcgctggtacgggccacaacggaagacaccataagctccgcttccgggcttagctcggtaatgctgcctacatga

SEQ ID NO: 30132 - protein, 140 aa, Unknown
  Obtained from environmental sample
  misc_feature (1)..(140): Xaa is any amino acid
MEVLAISTVRSISDLPLRGSIRCGKSVSTSVISFPRSPQPMYIITSASHHFAMACWVMVLPVPKPPGMAAVPPLEIGKKTSITLCPVIRGVSGESRSALGLGIRAGHQCESVISSPSLVRATTEDTISSASGLSSVMLPT

SEQ ID NO: 30133 - DNA, 345 bp, Unknown
  Obtained from environmental sample
  misc_feature (1)..(345): n is a, c, g, or t
atggagcagctgacgctctacccgtggcccggcaacataaggcagctccaaaacggcctagaaagggcgctcatatacgcgaacggggagcccctggcccccaaacacttcgcggacatactgtcgcccaaggataccccgccgtcgttctccgtggacgaggaggccgaggtgggggcggacgaccaagcattggccggttggaacttaagcgatatcgagcgggtgcacgtgctgcgggcgctcgaacgcttcggcggggacaaaatgatggctagcgaggcgctggggatatcgctgtccacgctgtaccggaagttggataagttttggggtaaggggtag

SEQ ID NO: 30134 - protein, 114 aa, Unknown
  Obtained from environmental sample
  DOMAIN (70)...(110): Bacterial regulatory protein, Fis family
  misc_feature (1)..(114): Xaa is any amino acid
MEQLTLYPWPGNIRQLQNGLERALIYANGEPLAPKHFADILSPKDTPPSFSVDEEAEVGADDQALAGWNLSDIERVHVLRALERFGGDKMMASEALGISLSTLYRKLDKFWGKG

SEQ ID NO: 30135 - DNA, 798 bp, Unknown
  Obtained from environmental sample
  misc_feature (1)..(798): n is a, c, g, or t
atgaagcgttatctctgtctattcgctgtgctttttactctgcttgttttctcttgcggagaagtctctgattttgacactggtggcggcaatggtggcagttacgatgccctatgcggtgataaagggtatagaacatcagaacaattttgccttaacgatgaaatttattctttatgtggcggtaaagtatatgatattgctaaagaattttgccacagtgacgggtctgttaatataagatgcaatggcaatatgtataaccctgtaagctacttttgttttgatagtaaaatttatccaaagtgcggtgttggtgatgatgcccaaatatacaatcctaaggaattgttttgttatgataatatactagatacattgtgcaacggcgttaaattcgaccctaaaagttatttttgttcacacgaagactataaggttcatcttttttgcgatggcaagagatataaccctgacctagaaatttgttctataaagaccaattccatttataagatatgcccaagcggtaatttcgcttcctctatttctacttgttgtcctaactccaattgcacagaatatcagctatgcggagatggagataaaaaagaagaatacgatgttgcaagtcaattttgctatgaagaaaagacctatgataaatgcggtggattaacttatgaccctacaaaaaaaatctgtagatatgaaaaactcaatgaactttgcagagtgaaagtaggggttgacgatttcggtaggccacaatttgacgattccctcggccgattctga

SEQ ID NO: 30136 - protein, 265 aa, Unknown
  Obtained from environmental sample
  SIGNAL (1)...(18)
  misc_feature (1)..(265): Xaa is any amino acid
MKRYLCLFAVLFTLLVFSCGEVSDFDTGGGNGGSYDALCGDKGYRTSEQFCLNDEIYSLCGGKVYDIAKEFCHSDGSVNIRCNGNMYNPVSYFCFDSKIYPKCGVGDDAQIYNPKELFCYDNILDTLCNGVKFDPKSYFCSHEDYKVHLFCDGKRYNPDLEICSIKTNSIYKICPSGNFASSISTCCPNSNCTEYQLCGDGDKKEEYDVASQFCYEEKTYDKCGGLTYDPTKKICRYEKLNELCRVKVGVDDFGRPQFDDSLGRF

SEQ ID NO: 30137 - DNA, 330 bp, Unknown
  Obtained from environmental sample
  misc_feature (1)..(330): n is a, c, g, or t
atgataaaaagggaagggtgttttgtttatttgaataaagggcttgccggtacttgcacagggaaaaaaggaacatatttaatcggcgaagcggcaggaatgatcagtccaagttctttggaaggaatcagctattccatggaaagttccaaaatattagcggaaataattaacaagggaattaaaaacatagggaataaatattataacaggacattagggataaggttaaaactgctgcttaaaatattcaaaatgccgtttatgtacaacaggtttttaagactgctggtaatgaaaagcgggataaaggcgattaagaataagtga

SEQ ID NO: 30138 - protein, 109 aa, Unknown
  Obtained from environmental sample
  misc_feature (1)..(109): Xaa is any amino acid
MIKREGCFVYLNKGLAGTCTGKKGTYLIGEAAGMISPSSLEGISYSMESSKILAEIINKGIKNIGNKYYNRTLGIRLKLLLKIFKMPFMYNRFLRLLVMKSGIKAIKNK

SEQ ID NO: 30139 - DNA, 1551 bp, Unknown
  Obtained from environmental sample
  misc_feature (1)..(1551): n is a, c, g, or t
atgcaggaaaaagccattaaggaagaacgctgggacgacgctgtctctttcagcaggtctcttgccagtatcggaataaaggtggagaaaaccggtcttgagcaggatttaattcttgcggacgcgaaaaagaaactggcggacggcaataatttaagcgcgtttctcgcggcgtttaaagcgaatgggattagaccgctggattccgcttccgcgctgctatttcttgaaagggcggtaaaggtaaagcagcgccgcgccgcggcgttttttctttccgccgcgcaaagcgccggtttaaaaaatattcccggcgaacttcttgcctacgcgcgcggacacgacactgtttccgatatggtaaacggcgtcgttaccgtgcttattgacaggggaattaaagttgaaaaaggaatggggattcccgacagaatgctgggttccgctttttttgttgatgcttcaggtcttttaattacaaattaccatgttatcgcaagcgaggtagatcctaaatacaagggatattccagaatgtatatccgtttgggagacgccgcaagcccaagatacccggcgcgcgttatcggatgggataaagctttggatcttgccctgataaaaacagaatatgagcccgaatatgtgttttctctggttgatcgcgtaattccgaaaataggcgacgctgtatgggcaatcggctctcccgtaggactggaaaaaacggtaacgtccggaattgtttccaatcttagccggcgttttttgcaaataggggatgtttatcagattgacgcggctgtaaacggcggcaattccggaggtcctttagtggacagcgaagggaggcttgtgggaattgtttttgccggtgtcgcgtatcatcagggactgaactttgctatcccggcggagacgcttgccgccgccttacccgcgatgattaagggaggaaaagcgcagcgcccgtggctcgggcttacgttatgcgaaacattacagggagccgaaattatttacaccgcgcccaatactccggcctctcgtcaaatgatccgcgaaggctctgttattaagacaattaacggaaagacaataacggctccgcaaggttctttaataccggcaatgcagcgcgctatttttccggcgggccccggcgagcttgtagccattgaaacggttgacgccgaaggcgtggtaaaaaagaatataattatgaccgtccgccgtcccgatcttccgctgtcggacgcggcaaagattgacaagcgcgaaagaatcgcggctccgttattcggtatggttctttcccccgtatacggaagattattttcatccagctttgtcgtcagaaaagtagtgcggggttctgtcgccgacgaagcgggaatctcggaagatgatcctatatccattaaccgcctgcgcgtaatggagaatgacggttatgcccttctggatatttcaattaagaaacgcaaaatggcgtatcttgagacgaatatgcagctgcccgcgtggctggattcgccggatacgctgtaa

SEQ ID NO: 30140 - protein, 516 aa, Unknown
  Obtained from environmental sample
  DOMAIN (129)...(312): Trypsin
  misc_feature (1)..(516): Xaa is any amino acid
MQEKAIKEERWDDAVSFSRSLASIGIKVEKTGLEQDLILADAKKKLADGNNLSAFLAAFKANGIRPLDSASALLFLERAVKVKQRRAAAFFLSAAQSAGLKNIPGELLAYARGHDTVSDMVNGVVTVLIDRGIKVEKGMGIPDRMLGSAFFVDASGLLITNYHVIASEVDPKYKGYSRMYIRLGDAASPRYPARVIGWDKALDLALIKTEYEPEYVFSLVDRVIPKIGDAVWAIGSPVGLEKTVTSGIVSNLSRRFLQIGDVYQIDAAVNGGNSGGPLVDSEGRLVGIVFAGVAYHQGLNFAIPAETLAAALPAMIKGGKAQRPWLGLTLCETLQGAEIIYTAPNTPASRQMIREGSVIKTINGKTITAPQGSLIPAMQRAIFPAGPGELVAIETVDAEGVVKKNIIMTVRRPDLPLSDAAKIDKRERIAAPLFGMVLSPVYGRLFSSSFVVRKVVRGSVADEAGISEDDPISINRLRVMENDGYALLDISIKKRKMAYLETNMQLPAWLDSPDTL

SEQ ID NO: 30141 - DNA, 429 bp, Unknown
  Obtained from environmental sample
  misc_feature (1)..(429): n is a, c, g, or t
atgattgcaagcgatcacgccccacataccgcgcatgaaaaatccttgccgatatgggaagcgccggccgggttaagcggcgtagaaacaactgttacgctgatgttaaatgaagtgaataaggggcggctttccattaacgattttgtccgtgttgcaagcgccatgccggcaaagatttgggggatttatcctaaaaagggaagtctgctttcaggcgcggacgccgattttacagttgttgacatgaataaaaaacacaaaatctccgcctgtgaaagccattcaaaaagcaagacatccgcctatgacggcatggaaacgcagggcgcgccggtagcgacaatagtcaggggcaagtttgttatgaaagacggctgtcttacgggagcaaagggctttggtaaacttgtcagcccggcactttaa

SEQ ID NO: 30142 - protein, 142 aa, Unknown
  Obtained from environmental sample
  misc_feature (1)..(142): Xaa is any amino acid
MIASDHAPHTAHEKSLPIWEAPAGLSGVETTVTLMLNEVNKGRLSINDFVRVASAMPAKIWGIYPKKGSLLSGADADFTVVDMNKKHKISACESHSKSKTSAYDGMETQGAPVATIVRGKFVMKDGCLTGAKGFGKLVSPAL

SEQ ID NO: 30143 - DNA, 471 bp, Unknown
  Obtained from environmental sample
  misc_feature (1)..(471): n is a, c, g, or t
ttgcaaattacgcggcaaatcaaaacaaaaagcgggtttaccctttattcaaacaagcctgtaaaagaacaggctgtaaaacaacctgtaataaacacgacggatccggttcttattaatctttttgttgaagatcaaagcacttcgattggcaagcgtaatattcattcgttaaaatcgggttacaggttatcggttggcggcggcaaatcggatgatttcctgattttccttgttcctatgccgtcaaaccttggagaaatcagcagaagcggaagccagatcacatttactccgcacaagccaaagtattttcctgatatcggttcaaacgaggtaagggactgcatcaataaaaggattcgtgttatttccgaaaaaaattatgaaatgtggttcagctttgtgatatacgaagacccgctggaagcgttgaacagggtactccactcagttaaagtgccgggctga

SEQ ID NO: 30144 - protein, 156 aa, Unknown
  Obtained from environmental sample
  misc_feature (1)..(156): Xaa is any amino acid
MQITRQIKTKSGFTLYSNKPVKEQAVKQPVINTTDPVLINLFVEDQSTSIGKRNIHSLKSGYRLSVGGGKSDDFLIFLVPMPSNLGEISRSGSQITFTPHKPKYFPDIGSNEVRDCINKRIRVISEKNYEMWFSFVIYEDPLEALNRVLHSVKVPG

SEQ ID NO: 30145 - DNA, 801 bp, Unknown
  Obtained from environmental sample
  misc_feature (1)..(801): n is a, c, g, or t
ttgctcattggttacttattatttactattaatcaatttaaggagaagaaaatggaaaagcaataccacgttgattttgataacactcacggcgcgtcctatgcgattcttcccggtgatcccggcagggttgagaagatcgcctcatacctggaaaatccccgtttttatcatcagaacagggaatacaccacatggcttggcgagattgcaaacaaaacagtgatggtcatgtccaccggcatgggagggccttcaacagccatcgcggtggaagaactctttaaaaccggcgttaggaatttgatcaggatcggtacctgcggaggcatggcgctgcctgaaaaaaaaggcgatctggttattgctacaggcgcaatacgcatggaaggaaccaccaaagaatatgtccccattgaattccccgcagtggcaaaccttgatgttaccaatgcccttgttaaagccgccgtgaaactgggggcgcagtatcatgccggaattgtgcagtgcaaggattccttttatggccagcatagccccgaccgtatgcccgccggttatgaattgaagaacaagtgggaagcatggattaaagccggctgccttgcttcggaaatggaaagctctactctgtatattgtcagtcagatactgggcgcgagggcgggctgtgtgcttaatgttatatggaatcaggagcgtgaacgtaagggcatgagcaacccccactgccacgacaccagtcttgctatacaaaccgctgtggaagcagtgcggattttaatcagtgagcagtga

SEQ ID NO: 30146 - protein, 266 aa, Unknown
  Obtained from environmental sample
  DOMAIN (33)...(259): Phosphorylase family
  misc_feature (1)..(266): Xaa is any amino acid
MLIGYLLFTINQFKEKKMEKQYHVDFDNTHGASYAILPGDPGRVEKIASYLENPRFYHQNREYTTWLGEIANKTVMVMSTGMGGPSTAIAVEELFKTGVRNLIRIGTCGGMALPEKKGDLVIATGAIRMEGTTKEYVPIEFPAVANLDVTNALVKAAVKLGAQYHAGIVQCKDSFYGQHSPDRMPAGYELKNKWEAWIKAGCLASEMESSTLYIVSQILGARAGCVLNVIWNQERERKGMSNPHCHDTSLAIQTAVEAVRILISEQ

SEQ ID NO: 30147 - DNA, 504 bp, Unknown
  Obtained from environmental sample
  misc_feature (1)..(504): n is a, c, g, or t
atgccgcccgtgatctcntgcgtcaccttctcaaggttctcgctctcctttattatttcatggctgccgttctgcatttcctcggaactgctttttacctgctgggtaagctcgtttaaactgccgacgctttgcagtacctgcttgctcccctggccctgctcctccatggcgttgcggacattttcttcctgcatagacacggtctttacacccgaatcaatagcctcgaatctttttagcacgttgtcggtggagactgtaatttttttgattgactcggctatctttttcagcaccgtgccgatagtttttgactgctcgctggaactttccgccagcttgcggatctcatcggcgactaccgcgaagcctttccccgcctctcccgcgtgcgccgcctctatcgcggcgttcatcgaaagcaggttggtctggctggctatgttttccattaccgagtttatttccagcaaaccttcggactcgcgggatatttcctga

SEQ ID NO: 30148 - protein, 167 aa, Unknown
  Obtained from environmental sample
  misc_feature (1)..(167): Xaa is any amino acid
MPPVISCVTFSRFSLSFIISWLPFCISSELLFTCWVSSFKLPTLCSTCLLPWPCSSMALRTFSSCIDTVFTPESIASNLFSTLSVETVIFLIDSAIFFSTVPIVFDCSLELSASLRISSATTAKPFPASPACAASIAAFIESRLVWLAMFSITEFISSKPSDSRDIS

SEQ ID NO: 30149 - DNA, 756 bp, Unknown
  Obtained from environmental sample
  misc_feature (1)..(756): n is a, c, g, or t
gtgtgggtgggaacgggaccaacacgaccggataccgtctgccgggggaagggctcaatgtgcttgggctttcctaaaactattgataacgacatcgaaggcactgatcggacttttggatttgactcagcccttgccatagctacagacgccattgaccgcctgcattcaaccgcgcaaagccacagcagggtcatggtcattgagcttatgggccataaagccggctggcttgccctttacgcgggagtcgcgggcggcggtgatgtgatcctcattccggaaataccttatgacattaaaagcattggtcggcaccttgaggaacgcgccacgcatggcaagagtttttccatcgttgttgttgccgaaggggcactttcggttgaagagagtaaaatggacaaaaaggacagaaaaaaataccgtgccgaaacggtaaatccgtccattgcttaccgcatagccagggaaattgaagctgaaacaggcatggacaccaaagcaaccgttctgggctatgtgcaaaggggcggtatgccggtggcaactgaccgcattcttgccacgagccttggcactgccgctgcagaacttcttgcacgcggcgaatacggccgtatgattgccctgaaaggaaacgaaattacatcggtagaccttagcgttcccgcaggaaaaacaaagaccattccccgttcccactacatgatcgacactgcgctttctgttggcgcctgcttagggaatccttaa

SEQ ID NO: 30150 - protein, 251 aa, Unknown
  Obtained from environmental sample
  DOMAIN (1)...(202): Phosphofructokinase
  misc_feature (1)..(251): Xaa is any amino acid
MWVGTGPTRPDTVCRGKGSMCLGFPKTIDNDIEGTDRTFGFDSALAIATDAIDRLHSTAQSHSRVMVIELMGHKAGWLALYAGVAGGGDVILIPEIPYDIKSIGRHLEERATHGKSFSIVVVAEGALSVEESKMDKKDRKKYRAETVNPSIAYRIAREIEAETGMDTKATVLGYVQRGGMPVATDRILATSLGTAAAELLARGEYGRMIALKGNEITSVDLSVPAGKTKTIPRSHYMIDTALSVGACLGNP

SEQ ID NO: 30151 - DNA, 756 bp, Unknown
  Obtained from environmental sample
  misc_feature (1)..(756): n is a, c, g, or t
atggcaaaagagaaaagcaaaggtcaggaactggcggataaattattttttaatctgaaaaattgctgggacgatattgacgagaaaacggaaaaagaaattgatgaatttgcgcaaagctacaaacaatttctggacaggggaaagaccgaacgtgaatgtgttgaagctgccgtagaaatgcttgaaaacaacggtttcacaaatattgataccttaaaagataaaaaaattaaagccggcatgaagatttatcagaatatacggggtaaatcaatttttgccgcaattaccgggaaaaagagcgcggcggaaggctgtaacatactcggcgctcatattgattcgccgcgtctcgatctcaagcaaaacccgctttacgaagataccgattttgcgctgtttgatacccactactacggaggcattaaaaagtatcagtggacaaccgttccgcttgccatgcacggtgtatttgtaaatgaagacggaaaaaagacaacgataaaaataggagaagagcagggcgatcccttgtttgtgattacagaccttctgccccaccttgcaaaagagcaaatggaaaaaaaagcatccgaagttgttgagggtgaaaaccttgatattcttgcaggttcccgtccgtataaagacaaagatgtaaaggaaaaagtaaaactcggtattcttgaaatattacatgaaaaatacggcataacagaaaaagatttgccagcgcggagatactcgcgataa

SEQ ID NO: 30152 - protein, 251 aa, Unknown
  Obtained from environmental sample
  DOMAIN (44)...(251): Aminopeptidase I zinc metalloprotease (M18)
  misc_feature (1)..(251): Xaa is any amino acid
MAKEKSKGQELADKLFFNLKNCWDDIDEKTEKEIDEFAQSYKQFLDRGKTERECVEAAVEMLENNGFTNIDTLKDKKIKAGMKIYQNIRGKSIFAAITGKKSAAEGCNILGAHIDSPRLDLKQNPLYEDTDFALFDTHYYGGIKKYQWTTVPLAMHGVFVNEDGKKTTIKIGEEQGDPLFVITDLLPHLAKEQMEKKASEVVEGENLDILAGSRPYKDKDVKEKVKLGILEILHEKYGITEKDLPARRYSR

SEQ ID NO: 30153 - DNA, 819 bp, Unknown
  Obtained from environmental sample
  misc_feature (1)..(819): n is a, c, g, or t
atgcaggttgactgcctggacaacgggtcggcggcgattgagcggataaagaacgggactccggtatacaacgccatatttatggatcacatgatgcccgatatggacggcctggaaacggtggaccatattcgcgccataggcacggaatacgcgaaaaaggtgccgataatcgcccttaccgccaacgccatccatggaacggatcagttgttttatgatcatggctttcaggcgtttataaccaaacccatcgacatgggggaactggatttggttgtcagaaaatgggtgcgtgatgaaagccatgatgatgtgcctcttctcagcgcaccggtatataacgaatattacaagccaatagaaatagaaataccgggtgtggatacgaaaaaagggcttgccctgtacgccggtgatacgggtgtttatctggccctgctgcgctcctatgttaccaacacgccgggacttctggaaaagctgcggatcgtcactgaaagtaccttgcccaaatataatgtttccgtacatggattgaaaggttccagcgccggtataggcgcggaatcgatacgggaatcggctttggaactggaaaaaatatcaaaggaaggcaacttgcagggcgtttgggcgctaaacggcaaactcattgccgacacaaaaattattgtcgccaatataaaagcctggctggaacagtatgacgccggtagagagaagaagcccgtccggaaagcccccgacagggagcttctgaaacaactgcggcagagttgtaaaaaatacgatataaaaggcgccgacaaattttga

SEQ ID NO: 30154 - protein, 272 aa, Unknown
  Obtained from environmental sample
  DOMAIN (1)...(95): Response regulator receiver domain
  misc_feature (1)..(272): Xaa is any amino acid
MQVDCLDNGSAAIERIKNGTPVYNAIFMDHMMPDMDGLETVDHIRAIGTEYAKKVPIIALTANAIHGTDQLFYDHGFQAFITKPIDMGELDLVVRKWVRDESHDDVPLLSAPVYNEYYKPIEIEIPGVDTKKGLALYAGDTGVYLALLRSYVTNTPGLLEKLRIVTESTLPKYNVSVHGLKGSSAGIGAESIRESALELEKISKEGNLQGVWALNGKLIADTKIIVANIKAWLEQYDAGREKKPVRKAPDRELLKQLRQSCKKYDIKGADKF

SEQ ID NO: 30155 - DNA, 471 bp, Unknown
  Obtained from environmental sample
  misc_feature (1)..(471): n is a, c, g, or t
atgaggagagggaaaaaaatggctgaggaacaaaagaaaattatcgcggtggacgatattcctgaaaatttagcggctatcagaaatacattgaaggatctgtatgaggtatatccctgtccttccgcatttaaaatgtttgagttattggaacatgttaagcctgatttaatcatgctggatgtggggatgccggatatagatggatatgaagcgataaaaaaattgaaaagcgacgcgcgattcaaggatatacccgttatattcctgtctgcaatgagcgatgagaaaagtgaaatggaaggtttaaaactcggagctgttgattatattcacaagccttttgttaccccgttattgctccagcgtataaaaatacatctgtccgtggtagaacaacaaaaattattattggatcggaacaaagaaatcgaagattttctgaagagaatctccaataaccctgtttaa

SEQ ID NO: 30156 - protein, 156 aa, Unknown
  Obtained from environmental sample
  DOMAIN (12)...(125): Response regulator receiver domain
  misc_feature (1)..(156): Xaa is any amino acid
MRRGKKMAEEQKKIIAVDDIPENLAAIRNTLKDLYEVYPCPSAFKMFELLEHVKPDLIMLDVGMPDIDGYEAIKKLKSDARFKDIPVIFLSAMSDEKSEMEGLKLGAVDYIHKPFVTPLLLQRIKIHLSVVEQQKLLLDRNKEIEDFLKRISNNPV

SEQ ID NO: 30157 - DNA, 480 bp, Unknown
  Obtained from environmental sample
  misc_feature (1)..(480): n is a, c, g, or t
atgaacgccgccgccgcaaagatagaggcgcttagtcaggacgaaatccgcggcctgcttgaaggtgcgtctctttcactggacatagaaactgccggcggaggaacacgcgccgtggagatcaccgcagacaaactcgacatcaggcgcaatgagaaggcgaatctccgcatactcaacgagggaacccttaccgttggtctggacacggaattatctcctgaactgagcatggaaggcgatatccgcgatctcatccgcggcgtgcagaacagccgcaaagaaatgggcctgttggtgacagaccgcatcaagctgactgttttcggccctgaaaaactcaaaaatgcatgggacagccttggcgcgagtgtagccgaggagactctggcaatacaagccgtttgggccaaagttgaaggacaaataccgcttgaagcaggcgaggaaacgtggatggtgaagatagagaagtgttag

SEQ ID NO: 30158 - protein, 159 aa, Unknown
  Obtained from environmental sample
  misc_feature (1)..(159): Xaa is any amino acid
MNAAAAKIEALSQDEIRGLLEGASLSLDIETAGGGTRAVEITADKLDIRRNEKANLRILNEGTLTVGLDTELSPELSMEGDIRDLIRGVQNSRKEMGLLVTDRIKLTVFGPEKLKNAWDSLGASVAEETLAIQAVWAKVEGQIPLEAGEETWMVKIEKC

SEQ ID NO: 30159 - DNA, 486 bp, Unknown
  Obtained from environmental sample
  misc_feature (1)..(486): n is a, c, g, or t
atgaggcttatcgtgtttctggatccgaatatagatcccagaggggcgggctggcatattatacaatccgtcaccgccatcggatcgggagggcttgcggggcagggttatttgaagggcacccagagtcattaccgctttcttcccgaacagagcaccgactttatcttttctattttttctgaagagacgggctttatcggcgggattgcggtatttatcctgttcatgatcatctgcctgagggttttacggataataaaaataacatccgacccctttgccgcgtacatctgcgcgggccttgcgggtatgttcagtttccacttcattattaacgtgggcatgacaatgggcattatgccgattacgggtattcccctgctgtttatatcctacggcggttccgccatgttctcggcgatgatagggatagggcttgccctgagtatacatatcagaaggtatatcccccccgcgttatga

SEQ ID NO: 30160 - protein, 161 aa, Unknown
  Obtained from environmental sample
  DOMAIN (1)...(157): Cell cycle protein
  misc_feature (1)..(161): Xaa is any amino acid
MRLIVFLDPNIDPRGAGWHIIQSVTAIGSGGLAGQGYLKGTQSHYRFLPEQSTDFIFSIFSEETGFIGGIAVFILFMIICLRVLRIIKITSDPFAAYICAGLAGMFSFHFIINVGMTMGIMPITGIPLLFISYGGSAMFSAMIGIGLALSIHIRRYIPPAL

SEQ ID NO: 30161 - DNA, 324 bp, Unknown
  Obtained from environmental sample
  misc_feature (1)..(324): n is a, c, g, or t
atgagttttcacaagacaggatatgttgatcccgtaaacgatattggcgcgcttttactgggggtggacaagcccggacgctattgcggcggcgaacacggccgccttgccaaaaaagacgcgcccctgcaaactcttatcgctttccccgatctgtatgaattaggcatgtctaaccaggccctgaggataatttacaacggccttaaccgaattccgggtatttcctgtgacagggcctttgcccccgctcgggactttgagcggctgctccgggaaaaaggactgcccctgtacggcctaaatacaggtataagcctttaa

SEQ ID NO: 30162 - protein, 107 aa, Unknown
  Obtained from environmental sample
  misc_feature (1)..(107): Xaa is any amino acid
MSFHKTGYVDPVNDIGALLLGVDKPGRYCGGEHGRLAKKDAPLQTLIAFPDLYELGMSNQALRIIYNGLNRIPGISCDRAFAPARDFERLLREKGLPLYGLNTGISL

SEQ ID NO: 30163 - DNA, 396 bp, Unknown
  Obtained from environmental sample
  misc_feature (1)..(396): n is a, c, g, or t
atgtccgcgatgggcgcgggcgcgaattgggcgggcacggcgttttctaactctatggtaggtgttgtacacgcgctcgcgcacgccgtgggcgcggtgtcggacgtcgcccacgaccttgccgtcgcgcttattctgccgtacggcgcggcgttcaacggctttttaagcgaggcttgcgaatttagggatttatatataacgtacgctaaaaagctggcgcttcccaaaaacctaaaggacgcgggggtaaaagaggaggattttgacgccattgtccgcgcggctatgcgcgacggcgcggttttgacaaatactaagcccgtggggcgcggcgacgtttcgggcgttttaaagaatgcgtttttaggcaaggatttgggggatttattatga

SEQ ID NO: 30164 - protein, 131 aa, Unknown
  Obtained from environmental sample
  misc_feature (1)..(131): Xaa is any amino acid
MSAMGAGANWAGTAFSNSMVGVVHALAHAVGAVSDVAHDLAVALILPYGAAFNGFLSEACEFRDLYITYAKKLALPKNLKDAGVKEEDFDAIVRAAMRDGAVLTNTKPVGRGDVSGVLKNAFLGKDLGDLL

SEQ ID NO: 30165 - DNA, 798 bp, Unknown
  Obtained from environmental sample
  misc_feature (1)..(798): n is a, c, g, or t
ttggcaaggttccctggaggccatacaagaacgcttcggcctgcatcgaatgtggagtctgcgagaccaaatgtccgcagggtattcatatcagggaacagcttaaggagacccataaagcccttgcttaataaaaaaactcttgctttgtgtttaccggttattctttccggttttctaaatgcccaaggggcatatgcccgcggggccggcgaaagcggcgttaggccgttaacgatttatagcatcaaaggatcgccgggagtggggatggtacgcctctttgaagaacctccactgattccgggttttgaggtaaaggttgaagcccttgcccaggccgatctaatggccgcccgctttatttccggggaagccaaggtgggaatactcccgcccaatatggcggccaaaatcgcttcgtcgggaaaagacctcagggccgccgcgatcatcggcaatgggatgctgagccttctaagctctgatacaagcgtaaagagccttgccgatctccggggaaaaaccgtagaagtcgcgggccagggggcaacgcctgaatttgtttttcgaaagatacttgagcttaacggcttgacgcctgatcgcgatgtcaggctcggctattccatggctccccctgaaattgcccagtcgcttattgccggaaaggtttccatcgccctgcttcccgaaccgtttgccaccatggccttgacaggaaagcccgatcttttttccatcgttgacgttcagcaggaatggagcagggccggaggcagggaaaatttcccatga

SEQ ID NO: 30166 - protein, 265 aa, Unknown
  Obtained from environmental sample
  misc_feature (1)..(265): Xaa is any amino acid
MARFPGGHTRTLRPASNVESARPNVRRVFISGNSLRRPIKPLLNKKTLALCLPVILSGFLNAQGAYARGAGESGVRPLTIYSIKGSPGVGMVRLFEEPPLIPGFEVKVEALAQADLMAARFISGEAKVGILPPNMAAKIASSGKDLRAAAIIGNGMLSLLSSDTSVKSLADLRGKTVEVAGQGATPEFVFRKILELNGLTPDRDVRLGYSMAPPEIAQSLIAGKVSIALLPEPFATMALTGKPDLFSIVDVQQEWSRAGGRENFP

SEQ ID NO: 30167 - DNA, 609 bp, Unknown
  Obtained from environmental sample
  misc_feature (1)..(609): n is a, c, g, or t
ttgccgggcgatattgttaccgccgtcaatggacagccccttcgtaacaattatgatcttaaaaaagcgcttgatcaggagccgggcgctattgtccttaaatatgagcgtaacggtactgagggacaagccgcgattaacagcaaagatatcgaagaagaaatcgagttctctctggcgttaattaattaccatactccaaaattatcttttccctcggctgtcgtaaaaggcgtaaaagaaagttttaaaactcttgccctttcaataaaaagcctaaggcttctttttatgggaatcgatcttacacaggcggtttccggccctgtccgaataacgtacatgatgggggatatggcggcaaaagggggcttgcgctcatttgtcgagctaatcgcccttatttccattgccctttgcatgatgaaccttctgcccctgccggttattgacgggggcatgattattcttttctttgtggaattaatacgcgggaaaccggcgcaccctaaggcgatttcaatttttcaaacctgcggtattataattatatcttgtttaatgttctttgccatattcggtgatataatgttttttgtaaggaggtaa

SEQ ID NO: 30168 - protein, 202 aa, Unknown
  Obtained from environmental sample
  DOMAIN (56)...(195): Peptidase family M50
  misc_feature (1)..(202): Xaa is any amino acid
MPGDIVTAVNGQPLRNNYDLKKALDQEPGAIVLKYERNGTEGQAAINSKDIEEEIEFSLALINYHTPKLSFPSAVVKGVKESFKTLALSIKSLRLLFMGIDLTQAVSGPVRITYMMGDMAAKGGLRSFVELIALISIALCMMNLLPLPVIDGGMIILFFVELIRGKPAHPKAISIFQTCGIIIISCLMFFAIFGDIMFFVRR

SEQ ID NO: 30169 - DNA, 324 bp, Unknown
  Obtained from environmental sample
  misc_feature (1)..(324): n is a, c, g, or t
atgaaagctaatatacaggaagatttatccattctcatccaaaccattgcttcaaacaccaaggttgaaagcatatttctcttcggttcttgggcctatggcgatccgaaacctgacagcgatctggatatttatcttgtcataccggacagtgatgccgatatttgcgaattaaacgcggaaatccgtttcgcgctctataaaaaaataacactcccgcttgatttaataattgcaaaaaaaagcgtatttgaacggagaaggaaatcattgactcttgaaagcattattgcaaaacaaggggtgcgtatttatggaaattga

SEQ ID NO: 30170 - protein, 107 aa, Unknown
  Obtained from environmental sample
  DOMAIN (5)...(104): Nucleotidyltransferase domain
  misc_feature (1)..(107): Xaa is any amino acid
MKANIQEDLSILIQTIASNTKVESIFLFGSWAYGDPKPDSDLDIYLVIPDSDADICELNAEIRFALYKKITLPLDLIIAKKSVFERRRKSLTLESIIAKQGVRIYGN

SEQ ID NO: 30171 - DNA, 972 bp, Unknown
  Obtained from environmental sample
  misc_feature (1)..(972): n is a, c, g, or t
atgcctttcactagaagatgcatgaagataaaatatatattccttgctttatgcctttgtgcttttgtaaacgattatggagtcgcggctcaggccaaccagccctggtggtatacccttgagcagggaaagcttctttttaggaaaggttcctatggagacgctcttcttacttttgaagacgcccgccgccagagaattgcccagtttaccaaactggaagatgattttattttttttctttccataccggaggttcgccggcttggggactcgctggaatttatagaatggtatattgccgatcgccgcgaaactagcgccgcaaccgtccttaatgagctttactatcgcgttccaaaagacagcttaaacggttcagtctcactcgcccttaaagaattgggtcgcttaaaggactacccggaggcggaatactggctgggcgagacctacagggtcgaaggagaactcggccttgcgcttcgccagtacgaaaaagcctggaacgagcgggggcttcttgaaattcccggatttgaactggaaattctttataaaattacagaggttcacagaatacggggaaattaccaggaaatggaaaggcgggcaaatgaaataatcgagggaacaggagcaaacggccttccaagagacagcctttgggcgggaaattctcaaggctcttcaaatcagctccgtgccgccatggtaagaatactggaaaatgaaggggtaagccgattccttaccctataccgatataataacaccgacacggaaaaggctcaccgccttttgggttttttttactattcctcaagcaggtatactcaggcgatggagcacctgatgtttgccttcttaatccagaattccgtactcatcgaagaactaatccgccgggactatgatttcagtttctccagtctggaaaacctggcggcacttgttcaaaggcggccctga

SEQ ID NO: 30172 - protein, 323 aa, Unknown
  Obtained from environmental sample
  SIGNAL (1)...(27)
  misc_feature (1)..(323): Xaa is any amino acid
MPFTRRCMKIKYIFLALCLCAFVNDYGVAAQANQPWWYTLEQGKLLFRKGSYGDALLTFEDARRQRIAQFTKLEDDFIFFLSIPEVRRLGDSLEFIEWYIADRRETSAATVLNELYYRVPKDSLNGSVSLALKELGRLKDYPEAEYWLGETYRVEGELGLALRQYEKAWNERGLLEIPGFELEILYKITEVHRIRGNYQEMERRANEIIEGTGANGLPRDSLWAGNSQGSSNQLRAAMVRILENEGVSRFLTLYRYNNTDTEKAHRLLGFFYYSSSRYTQAMEHLMFAFLIQNSVLIEELIRRDYDFSFSSLENLAALVQRRP

SEQ ID NO: 30173 - DNA, 987 bp, Unknown
  Obtained from environmental sample
  misc_feature (1)..(987): n is a, c, g, or t
atgttcgatccgttgacccgcagcaaatatgggaagttggggcgcaaggtaatcaactgcgagaagcacaaacaacttgcgcttaaagcagcggaaaaatccattgtgctgctcaagaacgacaacaaccttctgcctctggattccggtccgaaggtgatcactgtagccggccccgccgcggcaaacgcccacgcgcttttcggcaattactacggggtcagcccccgctttgtcaccatacttgagggcctggccgataaggttaaagacaggttcggcatcaatttgaattaccgtcagggttgcctgatgtacggcgatattaacaagtccaatgtcgtatatggcgaggctggtaccaccgatattgtaatcgcggtaatggggctggacggcgcaatcgagggcgaggagggagacgcaatcgcatcggactccaacggcgaccgcgtcacaattgagttacccccctggcagttgaagttccttaaagcggttcgctccgccggcaaaaaggtcgttttggtgcttacaggcggcagccccatcgcttttccggaagagcttgctgacgcggttatcttcgcgtggtatcccggagagcttggcggtaaagctgtggcggacattatctttggcgacactgttccgtcgggaaaattacccataacgtttcccgcttccacggatcaactgcccccttacgaagactattcgatgaagggacgcacttaccgctacatgacgggaaccccccagtaccccttcggcttcggcctttcctacaccagcttccgttttgattctattaagctcgcggagccggtgttggacggcgctgactatttttgtaggtctcggaacggtcagcaacacgggcaaaagggacgcggacaatgtagtgcaaatatatgtaacaaaagaaaaacgcgccgaaaacgatcctgtaacctcgctgcgggatttccgcagagtgcatattaa

SEQ ID NO: 30174 - protein, 328 aa, Unknown
  Obtained from environmental sample
  DOMAIN (35)...(265): Glycosyl hydrolase family 3 C terminal domain
  misc_feature (1)..(328): Xaa is any amino acid
MFDPLTRSKYGKLGRKVINCEKHKQLALKAAEKSIVLLKNDNNLLPLDSGPKVITVAGPAAANAHALFGNYYGVSPRFVTILEGLADKVKDRFGINLNYRQGCLMYGDINKSNVVYGEAGTTDIVIAVMGLDGAIEGEEGDAIASDSNGDRVTIELPPWQLKFLKAVRSAGKKVVLVLTGGSPIAFPEELADAVIFAWYPGELGGKAVADIIFGDTVPSGKLPITFPASTDQLPPYEDYSMKGRTYRYMTGTPQYPFGFGLSYTSFRFDSIKLAEPVLDGADYFCRSRNGQQHGQKGRGQCSANICNKRKTRRKRSCNLAAGFPQSAY

SEQ ID NO: 30175 - DNA, 384 bp, Unknown
  Obtained from environmental sample
  misc_feature (1)..(384): n is a, c, g, or t
ttgattctattaagctcgcggagccggtgttggacggcgctgactatttttgtaggtctcggaacggtcagcaacacgggcaaaagggacgcggacaatgtagtgcaaatatatgtaacaaaagaaaaacgcgccgaaaacgatcctgtaacctcgctgcgggatttccgcagagtgcatattaaggcgggcaagagcgtaacggttgattttaagcttcagcgctcggcgtttgaaacagtgagcgccgaaggcgcgtcggagtatttgcccggctcctacacggtgatcgccgcggacgcggcgccggttcccgttgcggcggagaagggggcgccgccttttgtttcggcaaattttaatttaaaagcagataaacaataa

SEQ ID NO: 30176 - protein, 127 aa, Unknown
  Obtained from environmental sample
  SIGNAL (1)...(24)
  misc_feature (1)..(127): Xaa is any amino acid
MILLSSRSRCWTALTIFVGLGTVSNTGKRDADNVVQIYVTKEKRAENDPVTSLRDFRRVHIKAGKSVTVDFKLQRSAFETVSAEGASEYLPGSYTVIAADAAPVPVAAEKGAPPFVSANFNLKADKQ

SEQ ID NO: 30177 - DNA, 780 bp, Unknown
  Obtained from environmental sample
  misc_feature (1)..(780): n is a, c, g, or t
atggctcatgacaacgcgtggacggactggattaaggagaaggtgaataaagacttgaacatcgaagttactttcattcctgtcgggcgctggtcggaagaaaccgatattgttaacctgatggcttcgggcagcgccccggatctctgttatacctacagtaccgcaatggttaatgctttcagggatcagggaggcataatagaccttgcgccgtatgtagataaattcctgccggatatgaagaaactccttgggacggatccagctcttcagggaaaagattttatttacaggaacctgcagcaggacgggaagatgtacagtattcccagctaccgtgtggctttggccatacggaatatttttatccgcaaagactggcttgacaagttaggactgccgcttccaacaaatattaatcagttccatgacgcccttatcgctttccgtgacaacgatccaggaaatgtaggtaaatcaagggtggttcccttggctacggacaatggcgcccgctggcgtcttgcagaatttgtacataactatttaccttcaaatttgagcgacagggacaggtatgtttttaaccccaatttgggaagccgcaggatttcccaccctgggataaaagaaggcgtgcgcgtaatgaaccagtggtataacgaagggctaatctatcgcgatttccccataatgcgcaatgcggatgatatattaaacacaatcaagagcggcgttgtcggcgcctttttccggcaactgggacgaaccttatag

SEQ ID NO: 30178 - protein, 259 aa, Unknown
  Obtained from environmental sample
  misc_feature (1)..(259): Xaa is any amino acid
MAHDNAWTDWIKEKVNKDLNIEVTFIPVGRWSEETDIVNLMASGSAPDLCYTYSTAMVNAFRDQGGIIDLAPYVDKFLPDMKKLLGTDPALQGKDFIYRNLQQDGKMYSIPSYRVALAIRNIFIRKDWLDKLGLPLPTNINQFHDALIAFRDNDPGNVGKSRVVPLATDNGARWRLAEFVHNYLPSNLSDRDRYVFNPNLGSRRISHPGIKEGVRVMNQWYNEGLIYRDFPIMRNADDILNTIKSGVVGAFFRQLGRTL

SEQ ID NO: 30179 - DNA, 891 bp, Unknown
  Obtained from environmental sample
  misc_feature (1)..(891): n is a, c, g, or t
atgacagatcgcgaggcgctcaggtctacatcattgacgaagtacacatgctttccaacagcgcttttaatgccncttttaaagacaatcgaagagccgcctccaaatgtagtttttatttttgccacaacagaactgcaaaaagtccccgccacaatcaggagccgctgccagcagtttaactttcgtttaatttccgttgagaccattattgccctgctccgcgaggcctgcaaagaaattggcgcacaggcagaagacgatgcccttctctggatagccagggaagccacaggcagttgcagggatgcctacaccatttttgatcaggttgcgtctttttcaggcgggcatatccgcatggagctcatcagggagaagcttggccttgtggggcttgatgagctaaacaattttgccgaggcctgcgccgccggggatttctccctttccctctctcttctggacgccgtcctttcttcgggagtggcggtggaaactttcatcacaggcctggtcggttactaccacagcctgcttcttttaaaggccggcgttacgagggactcggttttgggttacgctccggccaggttttcgcgcctggtgcttgataagtacgacactgtccgccttgaacgcgcgggggaactgttgtacgagctctaccgggatattcgctattcggtatcccctcgctttgagcttgaaaccctggtctctaaactatgctggcttgaaaaatggatctcccctgcggaactgggcagcgctgtcgcgaaaacccaagccttgtataataacccagcagctgcgcctgcgcaggaaaagcaatcgccttcattgacccgagaattcaagcgtcacatggcaaacaggggaaaacactaa

SEQ ID NO: 30180 - protein, 296 aa, Unknown
  Obtained from environmental sample
  misc_feature (1)..(296): Xaa is any amino acid
MTDREALRSTSLTKYTCFPTALLMPLLKTIEEPPPNVVFIFATTELQKVPATIRSRCQQFNFRLISVETIIALLREACKEIGAQAEDDALLWIAREATGSCRDAYTIFDQVASFSGGHIRMELIREKLGLVGLDELNNFAEACAAGDFSLSLSLLDAVLSSGVAVETFITGLVGYYHSLLLLKAGVTRDSVLGYAPARFSRLVLDKYDTVRLERAGELLYELYRDIRYSVSPRFELETLVSKLCWLEKWISPAELGSAVAKTQALYNNPAAAPAQEKQSPSLTREFKRHMANRGKH

SEQ ID NO: 30181 - DNA, 327 bp, Unknown
  Obtained from environmental sample
  misc_feature (1)..(327): n is a, c, g, or t
ttgtactccataatttttcagttcacaaccacttcggcccttggagccctttaccggaattatcagcaaatgacccttcttatcattaccaacaagccggatttgatttactcagtgatcaatgaaaaagcccatcacggggctacttgttttgaagggtttggcagttatgaaaagaaaagccggactctgctttattccgtggtgaccgccagccagatcaagattcttattcccgcaataaggaaaatagatgagaatgcgtttatcaatgtattgaaaaccgatcagcttaaagggcagttttatcaaaggccttttgactag

SEQ ID NO: 30182 - protein, 108 aa, Unknown
  Obtained from environmental sample
  misc_feature (1)..(108): Xaa is any amino acid
MYSIIFQFTTTSALGALYRNYQQMTLLIITNKPDLIYSVINEKAHHGATCFEGFGSYEKKSRTLLYSVVTASQIKILIPAIRKIDENAFINVLKTDQLKGQFYQRPFD

SEQ ID NO: 30183 - DNA, 558 bp, Unknown
  Obtained from environmental sample
  misc_feature (1)..(558): n is a, c, g, or t
ttgcaagaaaaggagcaagttatgaaaacagcggtaatttattattcctataacggaaacaccgcccaagtagcggaaattctcaaagcagagttagacgcggacattttcaggattgaaaccctcgacactaaaaaaagaaaaggcatttttctaattttttggggcggtggtcaggttgtaagagggataaagccaccattaaagccgctttctgtggatattaacgcttacgatcttgttatccttggaaccccggtgtgggcgagttctccagctccggcaattgtttctttcttaagcgcgaacagcatagccggaaaaaaaatcgcccttttctgctgtcacgctggcggtatggacaaagccctggacaagctcaaagccctgcttagcggaaacaattttattggggagattgattttaaaaatgttgcaaagatggataagggcgagctaaagcagaaaataggcgagtgggcgaaaaacttagtttacccaaatagaccactanntnggnagaagaccccgccgccaagggccctcaccgaggcataa

SEQ ID NO: 30184 - protein, 185 aa, Unknown
  Obtained from environmental sample
  misc_feature (1)..(185): Xaa is any amino acid
MQEKEQVMKTAVIYYSYNGNTAQVAEILKAELDADIFRIETLDTKKRKGIFLIFWGGGQVVRGIKPPLKPLSVDINAYDLVILGTPVWASSPAPAIVSFLSANSIAGKKIALFCCHAGGMDKALDKLKALLSGNNFIGEIDFKNVAKMDKGELKQKIGEWAKNLVYPNRPLXXXKTPPPRALTEA

SEQ ID NO: 30185 - DNA, 885 bp, Unknown
  Obtained from environmental sample
  misc_feature (1)..(885): n is a, c, g, or t
atgaatattaatatatccgaaaaatcaagctttatctggagaatagccgatttgcttcgtggtgattacaaacaaagcgagtatggcgatgttattctgccatttacagtactttgtcgtttggacagtgttcttggaccaacaaaagatgaagtacttaaaatacataaaactgtaaaatataaaaacaaggaacccttttttacaagagcaacaaaatataaattttggaatacaagtgaattcacttttgccaaactaaagaacgattctactcatgttgacgataacttacgcgactatatcaggggcttttcagataatgcccgtgaaatattggaagctttcgacatttatgctcagataacacggctggataaagcaaaccttctttacctggtagtttcccgattcgttgatgatattgatcttcatcccgacagggtatcgaacaacgagatgggatatatatttgaagaactaatccgccgcttttcagaaatgtctaatgaaactgctggtgagcactttacaccccgtgaagtcatccggttgatggtatccattctttttgatcccgatcttaatagaattattgaccccggatatatggctaaattatacgatccggcggcaggtacgggcggaatgctttctacaggaatcgaatatgccgcagaacatagtccgacagcaattattgaagtttacggtcaggaactcaatgaaaaaacttatgctatctgcaaatccgacacaatgattaagggcaggggttatgaaaatatccaccttggtaacagtttcaccgaagacgctttggcgagggaaaagtttcactatatgctctgtaatccgccattcggtgggaaggaaaaagtatga

SEQ ID NO: 30186 - protein, 294 aa, Unknown
  Obtained from environmental sample
  misc_feature (1)..(294): Xaa is any amino acid
MNINISEKSSFIWRIADLLRGDYKQSEYGDVILPFTVLCRLDSVLGPTKDEVLKIHKTVKYKNKEPFFTRATKYKFWNTSEFTFAKLKNDSTHVDDNLRDYIRGFSDNAREILEAFDIYAQITRLDKANLLYLVVSRFVDDIDLHPDRVSNNEMGYIFEELIRRFSEMSNETAGEHFTPREVIRLMVSILFDPDLNRIIDPGYMAKLYDPAAGTGGMLSTGIEYAAEHSPTAIIEVYGQELNEKTYAICKSDTMIKGRGYENIHLGNSFTEDALAREKFHYMLCNPPFGGKEKV

SEQ ID NO: 30187 - DNA, 807 bp, Unknown
  Obtained from environmental sample
  misc_feature (1)..(807): n is a, c, g, or t
atggggcggacggttgaaaaacttatcatggatgagttgaacaggcttgttaccgaaggcatcccgcctgaagaaatagaagcggctgttttatccgttgaattcgctcagagggaaattcgcaggtcgaacgggccgttctcccttgtttggatgcgccgctccctgcgcacatggctgcacggctgcaaaccatgggagggcttgcttattctgcctttgctgacaaagttaaaagaaaatatttcctccgacaaacgtttttttgaaaaacttataaaaaaatattatttggataatccgcaccgcgctcttgtcattcttgagccaaaagaagatttcctgcagaaacaggatgaaaaattttcgcaaaagcttgccgatacagataaaaacctgagcaaggaagagcgtcaaaaaattatagaaaaggcaaaagaactggaaaaaacccaaagcgaggccgattcaccgcaggcgctcgcggcgattcctcatctttcgcgtaacgatcttgcggttgaggacgaaattattccgcgccgccacgaggatttgcgcggggtaccggctttatgccaggatctttttacaaacggaattacatatatcagtttagctttccccgcggacattttatcggaagaggattatttgtggctgccgtttttttcaaaggcggtaaattccgtcggccttcccggcatggattacggcgaattgtcaagtttgctggcaagaacagtcggcggcattaacacgcaattattcgcagggacttccgtacccggttcggacaaactctaa

SEQ ID NO: 30188 - protein, 268 aa, Unknown
  Obtained from environmental sample
  DOMAIN (108)...(268): Peptidase M16C associated
  misc_feature (1)..(268): Xaa is any amino acid
MGRTVEKLIMDELNRLVTEGIPPEEIEAAVLSVEFAQREIRRSNGPFSLVWMRRSLRTWLHGCKPWEGLLILPLLTKLKENISSDKRFFEKLIKKYYLDNPHRALVILEPKEDFLQKQDEKFSQKLADTDKNLSKEERQKIIEKAKELEKTQSEADSPQALAAIPHLSRNDLAVEDEIIPRRHEDLRGVPALCQDLFTNGITYISLAFPADILSEEDYLWLPFFSKAVNSVGLPGMDYGELSSLLARTVGGINTQLFAGTSVPGSDKL

SEQ ID NO: 30189 - DNA, 921 bp, Unknown
  Obtained from environmental sample
  misc_feature (1)..(921): n is a, c, g, or t
atggctgataacgcgaaccctggagattcaacgcaaattacaagggattatttagattcaattcttgtggaaatgaggcatattgacagtgttctgccttcgaccaaacttgaactttacggagaaacctttttcacgcccgtgatgctggccgcgctgtcccatttgcaaagctgtcatcctgaaggcatggtggaagctgcccgcggtatcaaggccgcagacgctgtaatgtgggcaggtatgggagacgaggcagagctggaagccattaccgccacgggggcaagaaccataaagattatcaagccgtacgcggataacaaggatattttcagaaagattgaacacgccgaaaaatgcggttgtatcgcggtaggcatggatgtagatcatgctttcaaccgaaaagggaattacgacgtaatccatgatctgaaaatgaggcccaagagccttgatgagataagggaatttgtaaaagctacaaaactgccgttcattattaagggagtattaagcgaacaagatacttacaaatgccttgactcaggcgtacgcggtatagtggtatctcatcatcacggtcatattgattacgccctgccgcccttgtgcatactccccgccattgcgaagatagtcagaaaacaaattcctatttttgttgactgcagcatcaacaggggaatggacgcctttaaggctcttgctcttggcgctgacgctgtatcagccggacgaatcattatggagcctcttcgcgctgaaggagctgaaggcgtgcgaaaaacaatcgctggaatgacagaagagttggcaggcgtaatggcggtcacaaattcacctgatatacgccatattgatccttcagtgttatggcttcctaaaaagtggaaaaatatgaataactttccatga

SEQ ID NO: 30190 - protein, 306 aa, Unknown
  Obtained from environmental sample
  DOMAIN (16)...(295): FMN-dependent dehydrogenase
  misc_feature (1)..(306): Xaa is any amino acid
MADNANPGDSTQITRDYLDSILVEMRHIDSVLPSTKLELYGETFFTPVMLAALSHLQSCHPEGMVEAARGIKAADAVMWAGMGDEAELEAITATGARTIKIIKPYADNKDIFRKIEHAEKCGCIAVGMDVDHAFNRKGNYDVIHDLKMRPKSLDEIREFVKATKLPFIIKGVLSEQDTYKCLDSGVRGIVVSHHHGHIDYALPPLCILPAIAKIVRKQIPIFVDCSINRGMDAFKALALGADAVSAGRIIMEPLRAEGAEGVRKTIAGMTEELAGVMAVTNSPDIRHIDPSVLWLPKKWKNMNNFP

SEQ ID NO: 30191 - DNA, 321 bp, Unknown
  Obtained from environmental sample
  misc_feature (1)..(321): n is a, c, g, or t
atgaaacagaaactgtatttaccctttcaggcggttaaggcgctgcataaattaggagaggatatccgtgatgcccgtaagcgccgccggataacgatggctcttttagctgaacgtgcgcgtatcacaccggataccctgaaacaaatcgaaaaagggaatccttctacttccattggcgggtacgcctctgtgctgtattcgctgggatttatcgggcgccttcaggatatcgccgacgcaaggcacgatttaacaggccttatgcttgaggaagaaaaattgccaaaacgaataagaatgtccagaaaaaggatttaa

SEQ ID NO: 30192 - protein, 106 aa, Unknown
  Obtained from environmental sample
  misc_feature (1)..(106): Xaa is any amino acid
MKQKLYLPFQAVKALHKLGEDIRDARKRRRITMALLAERARITPDTLKQIEKGNPSTSIGGYASVLYSLGFIGRLQDIADARHDLTGLMLEEEKLPKRIRMSRKRI

SEQ ID NO: 30193 - DNA, 873 bp, Unknown
  Obtained from environmental sample
  misc_feature (1)..(873): n is a, c, g, or t
atggacaatataaaagaaatttctgtttcaataatgttaaataaaattacccataaggttggaaaattgtggtttcataaccgtaaaggacgaaccgccgcgtcatttgaatatagcagagaatggcttggaaatccgcacaaatttgcacttgaaccggcattaacattatctgaagcggcgtttcataccggcgaaagggggagcagcttgtttggcgcgatgggagattccgcgccggatcgatgggggcgtattctgatgcagcgggcaaatgataccggacgcgcacttaccgaagctgattatttattgggtgtttgtgatgaaacacgacagggagcattgcgtttttctgtaaaaaaaggtgaatatcttgcatccggcggcaataatgttattcctccgtttattacgctcccgaatttattatctgcgtccggaaaaattttagataataccgagaacgcgaaggatctgcaattattactcgcgcctggctcatctttaggaggcgcaaggccaaaagcttctgtattggataaagatggcagtcttgctatcgccaaatttcccatgaaagacgatgatacggatattgtacgctgggaagcaaccgcgttaacgctggcaaaagcggctggaatcactgtttcggaattcagacttgaaattatttcaggaaaacctgtattgataatcaagcgctttgaccgtatcggcgatacacgtattccatttatatcagcaatgagcatgattggagcaagttacggagatgatcaaaactacagctatattgatatagccaattcattacaaccatacggagcgcgaccaaaattgatatggaagaactctggcgcagaatag

SEQ ID NO: 30194 - protein, 290 aa, Unknown
  Obtained from environmental sample
  DOMAIN (169)...(239): HipA-like N-terminal domain
  misc_feature (1)..(290): Xaa is any amino acid
MDNIKEISVSIMLNKITHKVGKLWFHNRKGRTAASFEYSREWLGNPHKFALEPALTLSEAAFHTGERGSSLFGAMGDSAPDRWGRILMQRANDTGRALTEADYLLGVCDETRQGALRFSVKKGEYLASGGNNVIPPFITLPNLLSASGKILDNTENAKDLQLLLAPGSSLGGARPKASVLDKDGSLAIAKFPMKDDDTDIVRWEATALTLAKAAGITVSEFRLEIISGKPVLIIKRFDRIGDTRIPFISAMSMIGASYGDDQNYSYIDIANSLQPYGARPKLIWKNSGAE

SEQ ID NO: 30195 - DNA, 888 bp, Unknown
  Obtained from environmental sample
  misc_feature (1)..(888): n is a, c, g, or t
gtgggtcagaatcggccgagagccattaccatagcaggaaatgaaacgcaaataaaagaggaagttgtaaaacttcaagaactaatccttcatgctaaagaggttgaagatgcgggagttgaatcgaaactttccaacttaaaaaatttgcttaaccagcaaggtttttttgatcattcggaccaacggcttttggtatttaccgaatttaaagatactcttaattatcttatgaaaaaatttactgaatgggggtttaacgtaggttgcatacatggcggaatgaaacccggttctcgtgacgaacccggtacgcgcatttttgtcgaacaacaattcagagaaggatcaatacaaattcttgttgcaaccgaagctgcaggggaagggatcaaccttcaagcttgtcatattctctttaactatgacattccctggaatccaaaccgtcttgaacagcgtatgggacgtatacatcgttatggtcaacgtaaggattgccttatttttaattttgttgccgctaatacagtagaaggtcgtgtactgcaaactcttttgcacaaattgcaggaaattcgtgacgctcttaatgatgatgcggtatttaatgttattggcgaaatactgccatccgcccatattgagaggatattgcgtgattattatgccggcaagcttggggatgctgatcttgaagaccgacttttacataacgtggacgaacagcaattccgttcaatttgtcaaaatgctctggaaggtcttgcgtctaaaaagcttaatcttgcaatgctggttgaacgccgtgcccttgctcaagaacgccgtgtagtgccggaaacaatagcgagatttttatttgaagtgccgaaatgtaaaacttga

SEQ ID NO: 30196 - protein, 295 aa, Unknown
  Obtained from environmental sample
  DOMAIN (80)...(162): Helicase conserved C-terminal domain
  misc_feature (1)..(295): Xaa is any amino acid
MGQNRPRAITIAGNETQIKEEVVKLQELILHAKEVEDAGVESKLSNLKNLLNQQGFFDHSDQRLLVFTEFKDTLNYLMKKFTEWGFNVGCIHGGMKPGSRDEPGTRIFVEQQFREGSIQILVATEAAGEGINLQACHILFNYDIPWNPNRLEQRMGRIHRYGQRKDCLIFNFVAANTVEGRVLQTLLHKLQEIRDALNDDAVFNVIGEILPSAHIERILRDYYAGKLGDADLEDRLLHNVDEQQFRSICQNALEGLASKKLNLAMLVERRALAQERRVVPETIARFLFEVPKCKT

SEQ ID NO: 30197 - DNA, 870 bp, Unknown
  Obtained from environmental sample
  misc_feature (1)..(870): n is a, c, g, or t
gtgccggtagaatttcgctcaagaggcagtttccgagtagatagtatgcaaggctatggttcgcacaatcagccgccaggcacttggtctgatgatacgtcccttgctctatgcctagtggattcccttactcgcggctttgccccggaagatatagcccgaaatattatattatggcatgacgctggcgctttcacggctcatggagaggtttttgacattggcatatcgacctcacaggctattcgccgtcttaaaaaaggaattactccctataaagccgggtgtactggagaaaatgaaaatggcaacggctctcttatgcggatagccccattagtgttctggctggtcgataggccgaaatgtgaacgcttcttaattactaaagatgtctcttccataacccacgctcacgaatggtctgtaacggcttgttttatttatatcgaatacttgctgaaactcctcgccggtatggaaaaagaggctgcatataaggaactccaagaggaattccgatttccagagttttattttgatcatggcatccgcttaatcggtcaagatactcttgataagttctcacgaattatatgggctgacatttacacactgccggaatctgatataaagagtggcggctttgtaattgataccctggaggccgccttgtggtgcttcctgaccacaaataactaccgggatgctgtcttaaaggctgtaaatctgggtgatgataccgacaccacggcggcggtgaccggcgctttggctggaatcacctatggacttaaaggcattccctccgaatggctggataaattagctggaactaaagacattccgccgcctcggccggggccatga

SEQ ID NO: 30198 - protein, 289 aa, Unknown
  Obtained from environmental sample
  DOMAIN (1)...(288): ADP-ribosylglycohydrolase
  misc_feature (1)..(289): Xaa is any amino acid
MPVEFRSRGSFRVDSMQGYGSHNQPPGTWSDDTSLALCLVDSLTRGFAPEDIARNIILWHDAGAFTAHGEVFDIGISTSQAIRRLKKGITPYKAGCTGENENGNGSLMRIAPLVFWLVDRPKCERFLITKDVSSITHAHEWSVTACFIYIEYLLKLLAGMEKEAAYKELQEEFRFPEFYFDHGIRLIGQDTLDKFSRIIWADIYTLPESDIKSGGFVIDTLEAALWCFLTTNNYRDAVLKAVNLGDDTDTTAAVTGALAGITYGLKGIPSEWLDKLAGTKDIPPPRPGP

SEQ ID NO: 30199 - DNA, 459 bp, Unknown
  Obtained from environmental sample
  misc_feature (1)..(459): n is a, c, g, or t
atggatatggaaaaagagctattttacgctgacggtcttaaattttcatgcaaacgttgttcttcatgttgccgttatgattcgggatttgtgtttctttcacaaaaagacgttaacaaattgagttctacgttaaaaattgacgtaaacggcttaattaacgtatattgcaggtgggttacaggctttgatgggaagcaagtcctttctttaaaagaaaagtctaataatgactgcattttatgggatagcggatgtaccgtttatcagtcgcggcccatacaatgcgttacttttccgttttgggagtcaataatcgcttccgaacaatgttgggaaatagcctccagcggttgtccgggaattaattcgggggaactgcacacaaaagaggaaatagataaaatatgcgcgtcacgttccagtcagacgataatcagtaaaacaggggggaattaa

SEQ ID NO: 30200 - protein, 152 aa, Unknown
  Obtained from environmental sample
  DOMAIN (15)...(124): Uncharacterised protein family (UPF0153)
  misc_feature (1)..(152): Xaa is any amino acid
MDMEKELFYADGLKFSCKRCSSCCRYDSGFVFLSQKDVNKLSSTLKIDVNGLINVYCRWVTGFDGKQVLSLKEKSNNDCILWDSGCTVYQSRPIQCVTFPFWESIIASEQCWEIASSGCPGINSGELHTKEEIDKICASRSSQTIISKTGGN

SEQ ID NO: 30201 - DNA, 474 bp, Unknown
  Obtained from environmental sample
  misc_feature (1)..(474): n is a, c, g, or t
atgaaaatacatttttggggagtgcggggttcaattcctactcctacgtctccttcctgtattaagagccaaatatctgcgattgtcgagcaaatcacggttgaagacttggaaagcgacgaaagcagggaaaagtttttagcggggcttcctccgtggttatttggcaccgtgggcggaaacagcccttgcgtcagcgtatcgtttgataaaagtgacgaatgcattatttttgactgcggctctggcttacgcgaaatgggaattgcgcaagtgggcgcgagtaaaaagataaaccagtatcatgtcttcctttcgcattttcattgggatcatatacaggggattccttttttttggtcccggatacaatccggcggtaaaaatggatttttattccccctgcgcgaaattttaaaaatatactggacgggcaaaatggtatttccgtatttttcccgtacttttcaataa

SEQ ID NO: 30202 - protein, 157 aa, Unknown
  Obtained from environmental sample
  misc_feature (1)..(157): Xaa is any amino acid
MKIHFWGVRGSIPTPTSPSCIKSQISAIVEQITVEDLESDESREKFLAGLPPWLFGTVGGNSPCVSVSFDKSDECIIFDCGSGLREMGIAQVGASKKINQYHVFLSHFHWDHIQGIPFFWSRIQSGGKNGFLFPLREILKIYWTGKMVFPYFSRTFQ

SEQ ID NO: 30203 - DNA, 903 bp, Unknown
  Obtained from environmental sample
  misc_feature (1)..(903): n is a, c, g, or t
atgctccccgccctgagcgttgatcaaaaagaacgcgaaaaaatcggagctgttgcccggatttgcgccaacgccggaatgttttttgtcgtagccggcatagtgccgctgaccggcctgttgggggaacggttcggcagtccgcaaaaaggctggtttgtctttacggtggcggcgacagttgtcatgctggccggacagtgtgtaacgctgttcggtgtaaaagaatcgggggtgattgccaaccgacggcagagcacccctttgcgggaattgttgcgcgttatatataaaaacgaccagttgttttttaccgccatagcgatgtcgctttttatgatcggttatgtgacaacggccagctttggcctgtactttttcaaatatgcctacggcgatgagggaatgtacgcgatttttgccctgatcctcggcgtgtcgcagattaccgccctggcggtctttccgttgttcagtaagcgttttaaccgcaaaactctttttaccgccgcgattgttcttatttccgccggatatattattttctttttcgcgccggttaccacgatgatatttatcggcgcggcgggtatcctgatttttatcgggcagtcttttgtgcagcttttaatgttgatgtttcttgccgactcggtggattacggccactggaagctgggcaagcgcaatgacagcatcactttttcgctccagccccttatcaacaaaatgggcggggcaatttccagtggcgtggtttcggcggtgattattgtatccggtattaaagatgccgacagcgccgccgaggtaagcgtccagggggcttttaatgatgaagcttgccatgctgatcttcccgctggtatgcattgctgcaagttatttcatctgccgctttaa

SEQ ID NO: 30204 - protein, 300 aa, Unknown
  Obtained from environmental sample
  misc_feature (1)..(300): Xaa is any amino acid
MLPALSVDQKEREKIGAVARICANAGMFFVVAGIVPLTGLLGERFGSPQKGWFVFTVAATVVMLAGQCVTLFGVKESGVIANRRQSTPLRELLRVIYKNDQLFFTAIAMSLFMIGYVTTASFGLYFFKYAYGDEGMYAIFALILGVSQITALAVFPLFSKRFNRKTLFTAAIVLISAGYIIFFFAPVTTMIFIGAAGILIFIGQSFVQLLMLMFLADSVDYGHWKLGKRNDSITFSLQPLINKMGGAISSGVVSAVIIVSGIKDADSAAEVSVQGAFNDEACHADLPAGMHCCKLFHLPL

SEQ ID NO: 30205 - DNA, 402 bp, Unknown
  Obtained from environmental sample
  misc_feature (1)..(402): n is a, c, g, or t
ttgggcgatctggacaccatgccagagggcataaagacagacactctggcactggaggaggccaccagagccgccgacaaaatggtgtcccacttagcagtcaactacgggtcgcggatggaactggctagggccgcaagggcctgcgtggaggacggcctgaggccgaccgacatcgatgaggccgcaatcaacgccaggctctggaccgccggtgtccccgacgttgacctgctgatacgcacgtctggcgaacaacgaatctccaacttcctcctgtggcagtgcgcctacgccgagttctacttcgcggatgtccactggcccgacttcgacgccgagcagttccgcctcgccctcgccgccttcgccaccagggagaggaggttcggcggtgtatag

SEQ ID NO: 30206 - protein, 133 aa, Unknown
  Obtained from environmental sample
  DOMAIN (1)...(132): Putative undecaprenyl diphosphate synthase
  misc_feature (1)..(133): Xaa is any amino acid
MGDLDTMPEGIKTDTLALEEATRAADKMVSHLAVNYGSRMELARAARACVEDGLRPTDIDEAAINARLWTAGVPDVDLLIRTSGEQRISNFLLWQCAYAEFYFADVHWPDFDAEQFRLALAAFATRERRFGGV

SEQ ID NO: 30207 - DNA, 1506 bp, Unknown
  Obtained from environmental sample
  misc_feature (1)..(1506): n is a, c, g, or t
gtgtttgtggcgacggagcgcatgatttatagaaaaaagccatggatatgcgagcgacacgcagggatgtcgcggaagggatactgcgaacgtatgaaagctgacggaaaactcaacgaggaatgcgccgtcttcggcgtcagcctgaccaccgacgtcgcggccgggataacatacaacggcttgctcgcgttgcagcaccgcgggcaagagggagcggggatcgcggtagccaacaaccacaacctcgtgtgccacaaggacgtagggcttgtcagcgaagtgttttccggcaataagatagagcatatacccaaaggccgcgtcgccgtggggcatacacgctactctacgacggggcgcaacacaaaagaaaacgtagggccgttcgtcacggagtacctgacgggcagaatagccacggcgcacaacgggaatatcacaaacgcgcaggcgatgcgcgagaaactgaacagacgcggcgtccaattccacgcaacaagcgacagcgaggtgatctcagctctcatagcctactacataacgcaggagaagagggcgctgccgggaataatccgagcggccgaccacctgcgcggagctttttcgcttatcattgcaagcagcaaaaacaaactgatagcggtccgcgaccccaacggctttaggccgctgtgcctcggcaaaaacgatatcggctacgccgtagcgtctgaaagctgcgcgttggaaatatgcggattcgaatttatcagagacgtgaaaccgggtgaaatcatcacaataaaaaacggcgtgataacgtatgaaagcataagcctgcacaacaaggaagaggggcgcgggttttgcatattcgagtacgtatacttcgcgaggcccgactcggtggtagacgggctctctatctatgaggcgcgctacaacatgggcgcgattttggcgaaggagtacccgatagacgccgacgtggtctgcggcgttccggacagcggcttggtcgcggcaagcggctacagcgcggcaagcggcataccgctcgcggcgggttttgtcaagaacagatacatcgggcgcagcttcatctaccctactcagacgcagcgcgacagcgccgtgcggcaaaagctaaacccgctggcggcaaacgtaaagggaaaaagggtcattctcgtcgacgactccatagtgcgcggcacaacctgcgagaagattatcagaagcctcagaagcgccggggccgcggagatacacatgagagtctcgtcgccgcccttccgccacacttgccactacggaaccgacatcggcagcgaagacaatcttatcgcgaataaattggaattagaggatatccgcaaaaaaatcggcgcggacagtttgggctatataagcatagatggactgaaaaaagcgtgtgaaaaatgcgctctgccgttttgcacggcctgcttcaccggccacgacgaaacagaagagcatactagaaaagatattttcgaataa

SEQ ID NO: 30208 - protein, 501 aa, Unknown
  Obtained from environmental sample
  DOMAIN (295)...(443): Phosphoribosyl transferase domain
  misc_feature (1)..(501): Xaa is any amino acid
MFVATERMIYRKKPWICERHAGMSRKGYCERMKADGKLNEECAVFGVSLTTDVAAGITYNGLLALQHRGQEGAGIAVANNHNLVCHKDVGLVSEVFSGNKIEHIPKGRVAVGHTRYSTTGRNTKENVGPFVTEYLTGRIATAHNGNITNAQAMREKLNRRGVQFHATSDSEVISALIAYYITQEKRALPGIIRAADHLRGAFSLIIASSKNKLIAVRDPNGFRPLCLGKNDIGYAVASESCALEICGFEFIRDVKPGEIITIKNGVITYESISLHNKEEGRGFCIFEYVYFARPDSVVDGLSIYEARYNMGAILAKEYPIDADVVCGVPDSGLVAASGYSAASGIPLAAGFVKNRYIGRSFIYPTQTQRDSAVRQKLNPLAANVKGKRVILVDDSIVRGTTCEKIIRSLRSAGAAEIHMRVSSPPFRHTCHYGTDIGSEDNLIANKLELEDIRKKIGADSLGYISIDGLKKACEKCALPFCTACFTGHDETEEHTRKDIFE

SEQ ID NO: 30209 - DNA, 1137 bp, Unknown
  Obtained from environmental sample
  misc_feature (1)..(1137): n is a, c, g, or t
ttgatctactggcatcccaacggcggacggatccgtgtcgccattgaggatttctggcgcagggaacattaccgcaacggctacgagattctctttactccgcatatcggcaaaagctggctttgggaaacctcgggacatctgggtttttacaaggctaatatgtacagccccatgaagatcgacgaacaggaatacattatcaagccgatgaactgccccttccatattatgatctacaagaccaaaggccacagttaccgggacctgcccctgcgctgggccgagcttggcacggtataccgttatgaacccagcggcgtactccatggccttttgcgggtacgcggatttacccaggatgacgcccatattatctgcacgcccgatcagatggaatcggagatactcgaagtgctgcgtttcagcctttcgctgtggaaggtgttcggctttaaggacataaaggcgtatctggcgaccaagcccaaggaaagcgtgggcgaacaaagccgctgggatgcggcgctggaaagcctgcgtaaggcggtggatgccgaggggcttgcttacgagattgacgagggcggcggcgcgttctacggtccgaaaatcgatcttaaaataaaagacgcgcttggacgcgaatggcagatgactacaatccagtttgactttaacgagcctgagcgttttgacatgacctttgttgacgcggacggtcagcacaagcggccttacatggttcaccgcgccctgcttggcagccttgagcgctttttcggcgtgttaatcgaacacttcggcggagcgtttcccccgtggatcgccccggagcaaatcgccgtgattcccgttgcggaaggctttaacgagtacgcgaaaaaagttaccgcggaactaaaggcccacgacctgcgggtctccgttgagttaggcgatgacaggctcaacgcgaagatacgcgactgccagaaccgcaagattccctatatgcttgtggccggccagcgcgaagcggatgaaggtactgtatcgatacgtctgcgtgacggcaaacagcttccggcgatgaaggtcgccgacttcgccaaatacgcgctggaaaaaattgaaagccaggcgatagaactatga

SEQ ID NO: 30210 - protein, 378 aa, Unknown
  Obtained from environmental sample
  DOMAIN (280)...(370): Anticodon binding domain
  misc_feature (1)..(378): Xaa is any amino acid
MIYWHPNGGRIRVAIEDFWRREHYRNGYEILFTPHIGKSWLWETSGHLGFYKANMYSPMKIDEQEYIIKPMNCPFHIMIYKTKGHSYRDLPLRWAELGTVYRYEPSGVLHGLLRVRGFTQDDAHIICTPDQMESEILEVLRFSLSLWKVFGFKDIKAYLATKPKESVGEQSRWDAALESLRKAVDAEGLAYEIDEGGGAFYGPKIDLKIKDALGREWQMTTIQFDFNEPERFDMTFVDADGQHKRPYMVHRALLGSLERFFGVLIEHFGGAFPPWIAPEQIAVIPVAEGFNEYAKKVTAELKAHDLRVSVELGDDRLNAKIRDCQNRKIPYMLVAGQREADEGTVSIRLRDGKQLPAMKVADFAKYALEKIESQAIEL

SEQ ID NO: 30211 - DNA, 1080 bp, Unknown
  Obtained from environmental sample
  misc_feature (1)..(1080): n is a, c, g, or t
atggctgaacaacaaaggctaatagctgaagaaaaaattttaaaagaagaggagcaaaagctaatagcagaaaaagaaagattaaaagaagaaaaaaggttaagggaagagcagagattaaaagaagaagagagattaagagaagaagagagattaagagaagtgcaaaggctaaaagaagaagagctaaagctaatagctgaggagcaaaggttagtacaagaaaaagaaagattaaaagaagcgcagagattaaaagaagaggaaaggcaaagggaagagcagagattaaaagaagaacaacaaaaaataatagctgaagagcaaaagttaaaagcagaaaaggaaagattaacgggaaaactgagagtgataacggaagttccacaggaagaagctccacaggaagctccgaaaaaagaggttgcagaagaagctccacaggaagctccgaaagaagaagttgcggaagaagctccacaggaagctccgaaagaagaagttgcagaagaagctccacaggaagctccgaaagaagaagttgcggaagaagctccacaggaagctccgaaagaagaagttgcggaagaagctccacaggaagctccgaaagaagaagttgcggaagaagctccacaggaagctccgaaagaagaagttgcggaagaagctccacaggaagcttcacaagaaaaagttgcagaaatctcaaaaggagatgaaaaatcaatatttgacgaaccggtaaaagaaaagaaaaagaaaggttgctttatttattttataataattatttttcttcttgcaattgcagcatactttgctaaaccttattacatagatatttattatgattacataggtgagaaacccgaaaaagaaaacgagaatgctgttgttgaagcagatactttaaaacaaaatcccgagcaaaatttaggtgcttccgatagcacagaaaatccttcagacactactgcagcaaaggaagagcaagacgataaaaatgccaaaaaaaccgaagccgccaaaaaaaccgaagctcctaaaaacgaactgaagctgaaaagcaacggatga

SEQ ID NO: 30212 - protein, 359 aa, Unknown
  Obtained from environmental sample
  misc_feature (1)..(359): Xaa is any amino acid
MAEQQRLIAEEKILKEEEQKLIAEKERLKEEKRLREEQRLKEEERLREEERLREVQRLKEEELKLIAEEQRLVQEKERLKEAQRLKEEERQREEQRLKEEQQKIIAEEQKLKAEKERLTGKLRVITEVPQEEAPQEAPKKEVAEEAPQEAPKEEVAEEAPQEAPKEEVAEEAPQEAPKEEVAEEAPQEAPKEEVAEEAPQEAPKEEVAEEAPQEAPKEEVAEEAPQEASQEKVAEISKGDEKSIFDEPVKEKKKKGCFIYFIIIIFLLAIAAYFAKPYYIDIYYDYIGEKPEKENENAVVEADTLKQNPEQNLGASDSTENPSDTTAAKEEQDDKNAKKTEAAKKTEAPKNELKLKSNG

SEQ ID NO: 30213 - DNA, 324 bp, Unknown
  Obtained from environmental sample
  misc_feature (1)..(324): n is a, c, g, or t
ttgcagaagaagctccacaggaagctccgaaagaagaagttgcggaagaagctccacaggaagctccgaaagaagaagttgcagaagaagctccacaggaagctccgaaagaagaagttgcggaagaagctccacaggaagctccgaaagaagaagttgcggaagaagctccacaggaagctccgaaagaagaagttgcggaagaagctccacaggaagctccgaaagaagaagttgcggaagaagctccacaggaagcttcacaagaaaaagttgcagaaatctcaaaaggagatgaaaaatcaatatttgacgaaccggtaa

SEQ ID NO: 30214 - protein, 107 aa, Unknown
  Obtained from environmental sample
  misc_feature (1)..(107): Xaa is any amino acid
MQKKLHRKLRKKKLRKKLHRKLRKKKLQKKLHRKLRKKKLRKKLHRKLRKKKLRKKLHRKLRKKKLRKKLHRKLRKKKLRKKLHRKLHKKKLQKSQKEMKNQYLTNR

SEQ ID NO: 30215 - DNA, 621 bp, Unknown
  Obtained from environmental sample
  misc_feature (1)..(621): n is a, c, g, or t
gtgtttgacttgatatgcgcattttcttgttctggcggtggtggcagcaatgactcaagctgcgacacgtcttcgtcaagcggtggcggcaagtcttcgtcaagtagtggaggcatatctgtggaaatcggcaatcaagtttggatgtctaagaacctcaatgtagatgtgagaaattcaaaatgcagtgagcgcatcgactgtgagaagtatggcagtctttacacttgggatgctgcaaagactgcttgccctagcggttggcgtttgcctaaaaatgccgactgggatgaactgataaactacgttgagagcaaaaatgggtgcctttattgcgcaaatagatatctgaaaactaaaagcgactggggcgaaggtggtaatggcgaggacaaatatggtttttctgctctgccgggtggctacgatttcactgtcggtggtagtggtatcgccatggtcggcgaaggcggcttttggtggagtgccactgagttcaatgattcctgcggctggcactggagtatgtacaacaccgacatttccgtgagaaaagacgccggcggtgcggcgtgcaagaacatcttgtacagtgttcgttgtatcaagggggcggaatag

SEQ ID NO: 30216 - protein, 206 aa, Unknown
  Obtained from environmental sample
  misc_feature (1)..(206): Xaa is any amino acid
MFDLICAFSCSGGGGSNDSSCDTSSSSGGGKSSSSSGGISVEIGNQVWMSKNLNVDVRNSKCSERIDCEKYGSLYTWDAAKTACPSGWRLPKNADWDELINYVESKNGCLYCANRYLKTKSDWGEGGNGEDKYGFSALPGGYDFTVGGSGIAMVGEGGFWWSATEFNDSCGWHWSMYNTDISVRKDAGGAACKNILYSVRCIKGAE

SEQ ID NO: 30217 - DNA, 879 bp, Unknown
  Obtained from environmental sample
  misc_feature (1)..(879): n is a, c, g, or t
atggacagactgaaaaattttgccagcgatattgtgttcaacaccaagggtaaacccctgaccgaggatgagcttgtcgcggctcttaaaggctgcgagggctgtatcgccgggcttgatcctttcagcagaagggtcattgaaagcgcggataaattgaaggttatttcccgttacggcaccggcgttgacaatgtggatgtcgcggccgccgtggaaaaggggatagccgtctgcaggactcccggagtaaattcgcaggctgtcgcggaactggcagtcgccttcatgatctgccttgcccgtcaggttcccatgctggacaggaaaacgcgggaaggccattgggtcagatccgtgggcgttgagctgcataaaaaaacattgggcattttggggcttggtgccgtaggcaagaaaaccgcgcgtattgccgccggtttctcgatgaatgtgctggcctgcgatcccaatattgatgccagttacgccgaggccaacggaattcgggcggtggattttgacaccctgcttaaagaatcggattttctcagcctgcatttgccgttgaaacccgatacccgccatatcatttccgccgaagcgatgaagcgcatgaagaaaggcgcgattatcatcaacaccgcgcgtggcgggcttattgacgaggccgcggcttgcagcctgatcaaatccggccatctggacgggctgggccttgacgtgtacgaggtggaaccgccgcagcactcgcctcttttcgggctggagaacgtcgtgtttaccccccacaccgccgcccataccacagaggcgacagccggaatggcgtcgatgtcggtggataatttaattaacgcgtttacaaataacaaataa

SEQ ID NO: 30218 - protein, 292 aa, Unknown
  Obtained from environmental sample
  DOMAIN (1)...(291): D-isomer specific 2-hydroxyacid dehydrogenase, catalytic domain
  misc_feature (1)..(292): Xaa is any amino acid
MDRLKNFASDIVFNTKGKPLTEDELVAALKGCEGCIAGLDPFSRRVIESADKLKVISRYGTGVDNVDVAAAVEKGIAVCRTPGVNSQAVAELAVAFMICLARQVPMLDRKTREGHWVRSVGVELHKKTLGILGLGAVGKKTARIAAGFSMNVLACDPNIDASYAEANGIRAVDFDTLLKESDFLSLHLPLKPDTRHIISAEAMKRMKKGAIIINTARGGLIDEAAACSLIKSGHLDGLGLDVYEVEPPQHSPLFGLENVVFTPHTAAHTTEATAGMASMSVDNLINAFTNNK

SEQ ID NO: 30219 - DNA, 390 bp, Unknown
  Obtained from environmental sample
  misc_feature (1)..(390): n is a, c, g, or t
ttgttatttgtaaacgcgttaattaaattatccaccgacatcgacgccattccggctgtcgcctctgtggtatgggcggcggtgtggggggtaaacacgacgttctccagcccgaaaagaggcgagtgctgcggcggttccacctcgtacacgtcaaggcccagcccgtccagatggccggatttgatcaggctgcaagccgcggcctcgtcaataagcccgccacgcgcggtgttgatgataatcgcgcctttcttcatgcgcttcatcgcttcggcggaaatgatatggcgggtatcgggtttcaacggcaaatgcaggctgagaaaatccgattctttaagcagggtgtcaaaatccaccgcccgaattccgttggcctcggcgtaa

SEQ ID NO: 30220 - protein, 129 aa, Unknown
  Obtained from environmental sample
  misc_feature (1)..(129): Xaa is any amino acid
MLFVNALIKLSTDIDAIPAVASVVWAAVWGVNTTFSSPKRGECCGGSTSYTSRPSPSRWPDLIRLQAAASSISPPRAVLMIIAPFFMRFIASAEMIWRVSGFNGKCRLRKSDSLSRVSKSTARIPLASA

SEQ ID NO: 30221 - DNA, 1161 bp, Unknown
  Obtained from environmental sample
  misc_feature (1)..(1161): n is a, c, g, or t
gtggctgaaaaaaatgaaaacaggctgtcgcttatccttgaagtttttacaaattccagcggccttgtctcgcttgttgttgtgcttcttggttttcttgtgggaaccctgatcattgtcgcggtaggaagaaatccctccggtatgtattcagccatctttcagaatatttcaggtttctctgtgaactcaagaacaggcgcctgggtttggaacccgcggtacataggcgaatggcttgtgtcatccttgccgcttatactctgcggcctttcaatggcttttgccgccagaaccgggctttttaacatcggcgcggaaggccagtacatcgccggtctgaccgcggcgcaatttgtcgcgttttattttccgccgatacctgttctacattccattgttgctgtaattgcggcaatcgcggcgggcgcgatttgcggcggcgtggtgggctaccttaaagccaggtttcaggtttccgaagtggtcgctacaatcatgatgaactacattgccctttacctttcaaggtactttacgatgcagattccgggaaccaatacctacaaaactttggatttccccaaaaccgttatgcttacaaatagccttatggaaactcttttcaactactccaggctgaacaacgggctcttcttgaccatagccgcgctgttctttttctggattgtcatggaaaaaacccggctgggctattcgcttagagccacaggctttaacagggatgcggccctttacggcggcatcagcgtaaacgccaacataacaaccgccatggcgatttccggggctttcgccggtctcgccggcgcgattgtcagcctggggagcttttcctacggcagggttctggcggtgcaggacggttacggttttgacggcatcgcagtcgcgcttgtggggaacaacggcgcctggggtacagctttggcgggacttcttttcggaatgttaagatccgcccagccccttatgcagtcccggcagatacccaaagaaattaccgttatcatcatgggccttatcgttgtctttatctcgcttcgcgccggtgtgaagctcttgattgaatggcagatgaaagaaaaagcccgcaaaacccaggctcagcaagaaagcaaaaggagcggcgatgtttga

SEQ ID NO: 30222 - protein, 386 aa, Unknown
  Obtained from environmental sample
  DOMAIN (75)...(354): Branched-chain amino acid transport system / permease component
  misc_feature (1)..(386): Xaa is any amino acid
MAEKNENRLSLILEVFTNSSGLVSLVVVLLGFLVGTLIIVAVGRNPSGMYSAIFQNISGFSVNSRTGAWVWNPRYIGEWLVSSLPLILCGLSMAFAARTGLFNIGAEGQYIAGLTAAQFVAFYFPPIPVLHSIVAVIAAIAAGAICGGVVGYLKARFQVSEVVATIMMNYIALYLSRYFTMQIPGTNTYKTLDFPKTVMLTNSLMETLFNYSRLNNGLFLTIAALFFFWIVMEKTRLGYSLRATGFNRDAALYGGISVNANITTAMAISGAFAGLAGAIVSLGSFSYGRVLAVQDGYGFDGIAVALVGNNGAWGTALAGLLFGMLRSAQPLMQSRQIPKEITVIIMGLIVVFISLRAGVKLLIEWQMKEKARKTQAQQESKRSGDV

SEQ ID NO: 30223 - DNA, 507 bp, Unknown
  Obtained from environmental sample
  misc_feature (1)..(507): n is a, c, g, or t
atgaaggcggtttggggcatctaccccaccgcctggattgccgttgtcattttgcttctgtcagctttttttctctataaacgcccctggggtttacgtctgcgcgccgcgggggaacatccccaggctctcgcgtccgctggtgtaaacgttttacggattcgttacatcgcggttctcatttcaggcgcgcttgccggcatagccggagcctgcgtggtgctgacccaggacattcaatacaccgttacatccattaacggaaaagggttcattgcacttgcggcggtatctttcgggcgctggctgcccatcggcatcctgggctcctcgttcttgttcggagtatcctcaagtatggcggttaacattgttaacatcaaaaaacttcagtttctgccttcggaaatgttcagcatgctgccgtttttaattactttgataacccttgttttgttcagcgggaaagagacggcgcccaaggctttggggcagaaagatttttaa

SEQ ID NO: 30224 - protein, 168 aa, Unknown
  Obtained from environmental sample
  misc_feature (1)..(168): Xaa is any amino acid
MKAVWGIYPTAWIAVVILLLSAFFLYKRPWGLRLRAAGEHPQALASAGVNVLRIRYIAVLISGALAGIAGACVVLTQDIQYTVTSINGKGFIALAAVSFGRWLPIGILGSSFLFGVSSSMAVNIVNIKKLQFLPSEMFSMLPFLITLITLVLFSGKETAPKALGQKDF

SEQ ID NO: 30225 - DNA, 660 bp, Unknown
  Obtained from environmental sample
  misc_feature (1)..(660): n is a, c, g, or t
atggattgcaaaattccccagcaagccagacgacatanacaaaggggcatgggaagcggtggtttgcaagctggcaaaaatgtgcgaattaccgtagccgaatttttcataaaaaaatgcacctctaaataccacacttttttaacgcttcgttttgatagaaataaaaaaaagaggatacacatcgcaagcgcaatgacaatgctcggatattcggatggcaatgcagaaaattccaactggcttgaaattgctgaattcataattaagcgaggcaacaaagtcaacgcggatttaaaagagctgtggcaaaggcttgtctttagcattgcggtttccaacagcgattgccatcttagaaaccacgcttttattttggacaaaaacaaaaattggaatttggcaccagcttacgacataaacccagacccctttgcaacgggcttggcacttaacgtgagcgaaaacgacaactcgctggattttggcttggcactagatgtagctccctattttcgcgtaaattccaaagtggcaaaagagtatttgcagtttgttaaaagaaatgtcgcaaaatgggaacagattgccgctgagtttaaaatccccaagaaagagacgcaaaaaatggcaagagcctttatgcaatgtaaaaattaa

SEQ ID NO: 30226 - protein, 219 aa, Unknown
  Obtained from environmental sample
  DOMAIN (59)...(139): HipA-like C-terminal domain
  misc_feature (1)..(219): Xaa is any amino acid
MDCKIPQQARRHXQRGMGSGGLQAGKNVRITVAEFFIKKCTSKYHTFLTLRFDRNKKKRIHIASAMTMLGYSDGNAENSNWLEIAEFIIKRGNKVNADLKELWQRLVFSIAVSNSDCHLRNHAFILDKNKNWNLAPAYDINPDPFATGLALNVSENDNSLDFGLALDVAPYFRVNSKVAKEYLQFVKRNVAKWEQIAAEFKIPKKETQKMARAFMQCKN

SEQ ID NO: 30227 - DNA, 696 bp, Unknown
  Obtained from environmental sample
  misc_feature (1)..(696): n is a, c, g, or t
gtgcgaggagcaaaaatgcaaaatagagaaagggaaatttttgtttattttgatagcgatgagcttatctttataggcgctctgcgttgctccattgtacgcggcagggaagttttcagtttcagggcatctgatgaatatataaaaaatgaggcgtttcgctttctagaccctgatttagggcagtttagcggttctcaatacttgcgttccgggaaagcgaactttgggatatttctggattccgctccagacagatggggcaggttgctacttcggcgcagagaggcgttgtttgcaaaaaaggaaaaacggcaggaaaaagccttgctggaaagcgattatctgctgggaatttttgacggaaacagaatgggagcgctcagattcaaaaccgatttttatggtccatttttggacaacgatgcgaatttggcaacaccgcccataaccagcttaaacaaattggaagaatcaagtttaaaattggaagacgaaaaaggcacagaggaaaaatggctgcaaatgctggtggctcccggttcttctttaggcggttcaaggccaaaagcaaatgtagtggataaaaaaggcaatttatggattgcaaaattccccagcaagccagacgacatanacaaaggggcatgggaagcggtggtttgcaagctggcaaaaatgtgcgaattaccgtag

SEQ ID NO: 30228 - protein, 231 aa, Unknown
  Obtained from environmental sample
  misc_feature (1)..(231): Xaa is any amino acid
MRGAKMQNREREIFVYFDSDELIFIGALRCSIVRGREVFSFRASDEYIKNEAFRFLDPDLGQFSGSQYLRSGKANFGIFLDSAPDRWGRLLLRRREALFAKKEKRQEKALLESDYLLGIFDGNRMGALRFKTDFYGPFLDNDANLATPPITSLNKLEESSLKLEDEKGTEEKWLQMLVAPGSSLGGSRPKANVVDKKGNLWIAKFPSKPDDIXKGAWEAVVCKLAKMCELP

SEQ ID NO: 30229 - DNA, 1509 bp, Unknown
  Obtained from environmental sample
  misc_feature (1)..(1509): n is a, c, g, or t
gtgggaagtattgaaagcctggactggcatatcaccgccattcttcccattaccgctctggacaccctgaacaacggagtaaccatcttcttcatggtaatgctggcggtcatagcggtcattctcattatttcttttatatttatcagcagccttctcaaacccatgcgttacatgatacaaacgctggatcaaatagctaaaaaccgggacctcacccggcggcttaaattcaagcaccatgacgaaatcggaacagtgggtgatttttttaaccgtacttttgaagaattcagaattcttgtagggacaataaaatataaaatcaacgggcttaaccataccagttttgagctttccgacaatatgagcaaaacctcgacagccgtagagaagatttcgtctaaccttgacaacatggaaaaccttgtagtcaaacaggaaaacggagcgttagtagcaggcgaggcggtaggggctattaaaacaaatattgacagccttaacaaaatgatagagcaacaggctgaaagcgtagatnagtcttcttccgcaatagaggaaatgacagccaacattcattcggtaacacagacgcttgcggaaaacagcaagaatgtcgatgttttagtcgaagcgtcggaaaatggcaaaacagggctgcaattagtagttcaggagatactgcaaattgcccatgattccgaagggttgctggagataaactcggtgatgaacagtatcgcaagccagaccaatttgctttcaatgaacgccgcgatagaagcggctcatgccggagaaataggcaaaggctttgccgtagtagccgatgaaatacgcaaactcgccgaatcgtcgggcaagcagtcaaaaacaacggcggcaacgctcaaaaaaataaaagcgtccatagacagtatcacaaaatcgtctaacgatattttggctcgttttggggcgatagacacaagcgtaaaaacagtttcacagcatgaacaaaatatcctaaacgcaatggaagaacaggaaacgggcggcaagaaaatattggaatccataagccgtttaagggacataacccattccgttaagaaagggtctgacgacatggcggaatcaggcaatacgctggtaaaagaaacggatgaatttataaaaataagtcaggaagcggttgaaggtatgaatgagatattgaaaggtattaatcaaataaatatttcggtaagtcatgtaaacgaaatgagcatagaaaacaaccgaaactttgaatccttaaaacaggaaacggaaaaattcaatgacacagttgataacgagaagcaaaaaatccttgtagtagacgatgacagtattcatcttgaaatggtggaaacggcgttgtcaaacgaatacgaagtatcgacagccaaatccggtaaagaagctttgggcttattctatcaggggcttgtccccaatttaattttatggactgaaatgccgggtatgctcggccgaatctga

SEQ ID NO: 30230 - protein, 502 aa, Unknown
  Obtained from environmental sample
  DOMAIN (30)...(100): HAMP domain
  misc_feature (1)..(502): Xaa is any amino acid
MGSIESLDWHITAILPITALDTLNNGVTIFFMVMLAVIAVILIISFIFISSLLKPMRYMIQTLDQIAKNRDLTRRLKFKHHDEIGTVGDFFNRTFEEFRILVGTIKYKINGLNHTSFELSDNMSKTSTAVEKISSNLDNMENLVVKQENGALVAGEAVGAIKTNIDSLNKMIEQQAESVDXSSSAIEEMTANIHSVTQTLAENSKNVDVLVEASENGKTGLQLVVQEILQIAHDSEGLLEINSVMNSIASQTNLLSMNAAIEAAHAGEIGKGFAVVADEIRKLAESSGKQSKTTAATLKKIKASIDSITKSSNDILARFGAIDTSVKTVSQHEQNILNAMEEQETGGKKILESISRLRDITHSVKKGSDDMAESGNTLVKETDEFIKISQEAVEGMNEILKGINQINISVSHVNEMSIENNRNFESLKQETEKFNDTVDNEKQKILVVDDDSIHLEMVETALSNEYEVSTAKSGKEALGLFYQGLVPNLILWTEMPGMLGRI

SEQ ID NO: 30231 - DNA, 1230 bp, Unknown
  Obtained from environmental sample
  misc_feature (1)..(1230): n is a, c, g, or t
gtgaaaaggcgggtagtaattacaggcggcgctgtgatcagcgctttgggcagtgaatggaaagatatactctcaaagctcaaagggggaaagaactgtgtgcgccgcatggacgagtgggacaagtacacgtacatgaataccaggcttgcagctcctgtggattttgtgatgcccgattaccccaggaaaatgctccgcggccttggcagggtaggacaattggccctggtttcagcggacagggcattggaaacagcaggcatagacaaaagcgatcctgagttaaagggcggcagagccggcgttgcctacggctcttcaatgggcagtatcgattcacttcttgatttttacagtatgctggttatgaacgatgtaacaaaaatgagcgccaccacctatataaaagccatgccccagacctgcgccgcgaatatcggagtaattttcggcctgacaggaagaataattacatctaacaccgcctgcacatccggcagtcaggccattggtttcgcttacgagaccataaagtatggtatgcaggacattatgcttgcaggcggcgcggatgaaatgtgcgccgcaaacgccgccgtttttgacacgctctttgccgcaagttccaaaaatgacagcccgcataagacaccagccgcttatgacaaaaaccgcgacggtcttgttgtcggcgaaggggcaggctgtctggttctggaagaatacgaacacgccaaaaaccgcggggcaaaaattgtcgcggaagtcgtcggcttcggaaccaacaccgacggaacccacatcacccagcctaaccggaccaccatgggcatcgccatgaagctggcgctggaagattcgcagctcgaccagtcttcgattgcctatgtgaatacgcacggaacagctacggaagccggggacattgccgaaagctgggccaccgcggatgttttccaaaggccggttccggcaagcactttgaaaagttacattggccacactctgggcgcgtgcggggccatagaagcgtggatagcgattcaaatgatgagggaaaaatggttttgccccaacctgaaccttgacgaactggatccccgttgcgcgcctttggattacatcacaggaagcggcagggaaatcgacgcttcttgtattatgtccaataattttgcctttggcggaataaatacctcgcttattttcagaaatataaaggagtag

SEQ ID NO: 30232 - protein, 409 aa, Unknown
  Obtained from environmental sample
  SIGNAL (1)...(17)
  DOMAIN (254)...(407): Beta-ketoacyl synthase, C-terminal domain
  misc_feature (1)..(409): Xaa is any amino acid
MKRRVVITGGAVISALGSEWKDILSKLKGGKNCVRRMDEWDKYTYMNTRLAAPVDFVMPDYPRKMLRGLGRVGQLALVSADRALETAGIDKSDPELKGGRAGVAYGSSMGSIDSLLDFYSMLVMNDVTKMSATTYIKAMPQTCAANIGVIFGLTGRIITSNTACTSGSQAIGFAYETIKYGMQDIMLAGGADEMCAANAAVFDTLFAASSKNDSPHKTPAAYDKNRDGLVVGEGAGCLVLEEYEHAKNRGAKIVAEVVGFGTNTDGTHITQPNRTTMGIAMKLALEDSQLDQSSIAYVNTHGTATEAGDIAESWATADVFQRPVPASTLKSYIGHTLGACGAIEAWIAIQMMREKWFCPNLNLDELDPRCAPLDYITGSGREIDASCIMSNNFAFGGINTSLIFRNIKE

SEQ ID NO: 30233 - DNA, 336 bp, Unknown
  Obtained from environmental sample
  misc_feature (1)..(336): n is a, c, g, or t
atgctgccgccaaagagttttataggccctgcggagctggagcgcataagcggtattataaaaaactgcccaatatactcaaagtacagcgtggctatagaccgcgagtccgcgtatgaagtattacaggcccaaaaaaagcaagcggaagcgcaacaacagaaaccgccgcccgtcactacgcggcaagcccaacctgtaaaaacgccaaaaacaacaagcgtgaggaaaacaagcagtcccgcgaataaagctctctcaagcgcgatgacgcagatcggcagagcggcggggaaggctcttgtacgcggtttgttcggtaatataaaaatttaa

SEQ ID NO: 30234 - protein, 111 aa, Unknown
  Obtained from environmental sample
  misc_feature (1)..(111): Xaa is any amino acid
MLPPKSFIGPAELERISGIIKNCPIYSKYSVAIDRESAYEVLQAQKKQAEAQQQKPPPVTTRQAQPVKTPKTTSVRKTSSPANKALSSAMTQIGRAAGKALVRGLFGNIKI

SEQ ID NO: 30235 - DNA, 1020 bp, Unknown
  Obtained from environmental sample
  misc_feature (1)..(1020): n is a, c, g, or t
atgcgttctgccgttagtcgcaaagtgctaaaaattgatcctgccgtcatggctgccccactgattaccactatcgtagacgccgtttctcttataatttactttttattcgccaaggcgattctggtttatagcgtgctgacggatgcccattgccaccccttcgacctttccccctttctcccgcaaatggaacagaaacgccgacatttgggagtctatgcggcggcaagctcttacaacatggaagaatttacgcataatgaaacattgtcgcataacgccaccgcagaaaaagccgcgccgctgttaccctgcttcggtattcatccccaactgcccgccataaagaaagaaaatggcagtccgtttacagactttgaattaaccggctgccttgaaaccttacacaatttagcggcggcgggcagaatatccgcattaggcgaatttggctttgacctttacaatactgcttttaaagaaactgagaaaacccagaatattctatttacggcgcatttggaaattgccattaaatacaatctgcccgttgtccttcatgtacgtcgcgcgatgcacaaaatttttcccgtcgcaaaatacttatcaaagtgcaaagccgttattttccactcatggtctggcactcttgaagaagcgcgctcacttctacgccacggtattaacgcatacttttcattcgggaatacaattatgctaaaccacaaacaggcaattcaatgctgttcctccctccccattgaaaggcttctaacggagaccgacgctccctttcaaccgaggaggggcgaaaaatattcctcatggtctgatttgcctttgatactaaaaactgcggcaaatcttcattgcgaatcaggtaatttaattgatgaaagagacttggaaacgcaaatagaaaataattttaaaagaatatttaaccacgaaccacacgaacaaggagcgaacctagaaagcggagagatttactacaaatatgcgcgtaatagatag

SEQ ID NO: 30236 - protein, 339 aa, Unknown
  Obtained from environmental sample
  DOMAIN (46)...(316): TatD related DNase
  misc_feature (1)..(339): Xaa is any amino acid
MRSAVSRKVLKIDPAVMAAPLITTIVDAVSLIIYFLFAKAILVYSVLTDAHCHPFDLSPFLPQMEQKRRHLGVYAAASSYNMEEFTHNETLSHNATAEKAAPLLPCFGIHPQLPAIKKENGSPFTDFELTGCLETLHNLAAAGRISALGEFGFDLYNTAFKETEKTQNILFTAHLEIAIKYNLPVVLHVRRAMHKIFPVAKYLSKCKAVIFHSWSGTLEEARSLLRHGINAYFSFGNTIMLNHKQAIQCCSSLPIERLLTETDAPFQPRRGEKYSSWSDLPLILKTAANLHCESGNLIDERDLETQIENNFKRIFNHEPHEQGANLESGEIYYKYARNR

SEQ ID NO: 30237 - DNA, 675 bp, Unknown
  Obtained from environmental sample
  misc_feature (1)..(675): n is a, c, g, or t
ttgttaccacacactaccgaaaggagaaccgttatgaaaaagaataacctgaaaggcacaaaaaagtatagtcatttaaatcttgaggaacgagaagaaatagcaatcggccttgaaaatgggaaaaaacaacgtgaaattgctttattattaagacgtaatccaagcactatttccagagaaataaaaagaaataatccttctataagagatgtaaagtatagggcaaacagagcgcagttaaaagccgatgaaagaaaattgcaaacccataaaaaacaaagaattcccaacaaaaaattaagacggtttatctgtaaactgatcaaggcgggatattcacccgaaattatcgcttttaaggcatttgaaaaaaatgaaaaatggaaaaccaattatgaaactatatatcaatggatataccatgaccgccatgatttaattccttttttaaccaaaagccacagaaaacgaaagaaaagaggctctagtaaacaaaaacgccttccaaaggtgccaaacaggacaatgatcgaaaaacgtccgttatatgtgaacgcgcgttcccgtatcggtcattgggaaatagatacggctgtatccaggcagagcaaagcggcgataatggttttagcggaacgccgcacaagatacattattattaaaaaactatag

SEQ ID NO: 30238 - protein, 224 aa, Unknown
  Obtained from environmental sample
  misc_feature (1)..(224): Xaa is any amino acid
MLPHTTERRTVMKKNNLKGTKKYSHLNLEEREEIAIGLENGKKQREIALLLRRNPSTISREIKRNNPSIRDVKYRANRAQLKADERKLQTHKKQRIPNKKLRRFICKLIKAGYSPEIIAFKAFEKNEKWKTNYETIYQWIYHDRHDLIPFLTKSHRKRKKRGSSKQKRLPKVPNRTMIEKRPLYVNARSRIGHWEIDTAVSRQSKAAIMVLAERRTRYIIIKKL

SEQ ID NO: 30239 - DNA, 1278 bp, Unknown
  Obtained from environmental sample
  misc_feature (1)..(1278): n is a, c, g, or t
ttgggcgcagaactgctttcgcaatttacgcaaagctccaaagcccttgcgatatcggcattcgtcatgatacttttgggcattgtccctggtatgcctacaattccatttttagccataggcgcactaataggcttcacatcttacagaatggcatttggagttaagagcaaacaagaaaaagcagacgaagaaaaagccaagaagatggcagaggaagccgctgccgtacctaaagaggaaaagattgaggattatctgctcgttgaccaaatggagctggagattggctacggattaatccccttggtggacgttaaccaaggcggcgatttgcttgagagaataacgatgctacgcaggcagatggcgggtgagcttggaatgatagttccacccattcgcataagggacaatatccagctttcgccaaacgaatacctgattaaaataaaagggaacgatgttggcaaaggagaactgatgatgggttcttatttggctatgaacccaggcaatgtaagccaaagaataccaggcataaaaacaaaagagcctgcgtttaatttagatgctctctggataacggaaggacaaaaggaaggagcagagcttgctggctataccgttgttgaactgccagcggttctcgctacgcacttgacggaaattatacgccgttatgcttcggaaattttgatgaggcaagatgtaaaagcgttgcttgaaaatgttaaaaagaacagcccagctgttgttgaagaaatatcttccgtgatgggaattggggaaattcagcaagttttatgtatgctgctccaagagaggatttccataagggatttggcgagcattctggaactgatggcaaacgcggcaaaactctcaaaagactccgtgttcataaacgagcaagttcgtcttgggttaacaaggcaaatctgcaaaccctttataaacaacggggaaatgtccgttataacacttgcgccagacttagaacaaatgctggaagcctcgctccaatctacgaacagagggccaagactggtgataagacccgaccttgttggccgcattttggagagaatggagataattcagacgaaaatccaagccgcgggcgaccagcctataatagtatgctcgccaaacgtgcgctatccattgaaaaaattattggaaagcaacttcccgaatttagtaattttatcctatagtgaaatagtcacaggagtcaatataacagtagcggagaccttaaatactcatgattag

SEQ ID NO: 30240 - protein, 425 aa, Unknown
  Obtained from environmental sample
  DOMAIN (1)...(415): FHIPEP family
  misc_feature (1)..(425): Xaa is any amino acid
MGAELLSQFTQSSKALAISAFVMILLGIVPGMPTIPFLAIGALIGFTSYRMAFGVKSKQEKADEEKAKKMAEEAAAVPKEEKIEDYLLVDQMELEIGYGLIPLVDVNQGGDLLERITMLRRQMAGELGMIVPPIRIRDNIQLSPNEYLIKIKGNDVGKGELMMGSYLAMNPGNVSQRIPGIKTKEPAFNLDALWITEGQKEGAELAGYTVVELPAVLATHLTEIIRRYASEILMRQDVKALLENVKKNSPAVVEEISSVMGIGEIQQVLCMLLQERISIRDLASILELMANAAKLSKDSVFINEQVRLGLTRQICKPFINNGEMSVITLAPDLEQMLEASLQSTNRGPRLVIRPDLVGRILERMEIIQTKIQAAGDQPIIVCSPNVRYPLKKLLESNFPNLVILSYSEIVTGVNITVAETLNTHD

SEQ ID NO: 30241 - DNA, 450 bp, Unknown
  Obtained from environmental sample
  misc_feature (1)..(450): n is a, c, g, or t
atgggagccttagagcaaatggaggcgtttgccgcagccgcagacatagattgggagagaatagcttccccagaagaagttccagaagtttttgaaaggcttagggacaaatccacggttttggttgataccgcaggccgcagtttaaaaaacgaagagcacgaagcggaactaaccgttttttatgaagcgattcgcccagacgaggttcatctggttttaccgctcaatatgcgcaaccgtgatttggaaaatgccacagaagcatacttggccttaaaagctaatcgcatggttttcacaagacaagacgaagcctctgagcaaggggctttgctttggctacccataaaatatggaataccgctttcttacataggcaacgggcaaggccccgacaatataattaacgcagagaaagagattatagcgaactggataattaagtaa

SEQ ID NO: 30242 - protein, 149 aa, Unknown
  Obtained from environmental sample
  DOMAIN (1)...(149): SRP54-type protein, GTPase domain
  misc_feature (1)..(149): Xaa is any amino acid
MGALEQMEAFAAAADIDWERIASPEEVPEVFERLRDKSTVLVDTAGRSLKNEEHEAELTVFYEAIRPDEVHLVLPLNMRNRDLENATEAYLALKANRMVFTRQDEASEQGALLWLPIKYGIPLSYIGNGQGPDNIINAEKEIIANWIIK

SEQ ID NO: 30243 - DNA, 390 bp, Unknown
  Obtained from environmental sample
  misc_feature (1)..(390): n is a, c, g, or t
atggttttgcttaccgtccctgttccgttaagcattttgccgcttgggcgttttgagggggctttgatattcggcgagtatgcggggacgttatttttgggggcaagcgccaccgccctgggggttttcctttcaggcatttccaaaaatcaggccgccgcgtttgtgggaagcgtagtggccctgcttgcggtaatgctcatgcaccagctgacggagaacctgccttccggccttgcgtcattaataaattacctttccctggcttttcattttgaaagcttttcccgggggcttttggacagccgcgacatggccttcttccttataaccacgatcctctttttgtttcttaatacccaggttctcgtctatagaaggtggaaatag

SEQ ID NO: 30244 - protein, 129 aa, Unknown
  Obtained from environmental sample
  misc_feature (1)..(129): Xaa is any amino acid
MVLLTVPVPLSILPLGRFEGALIFGEYAGTLFLGASATALGVFLSGISKNQAAAFVGSVVALLAVMLMHQLTENLPSGLASLINYLSLAFHFESFSRGLLDSRDMAFFLITTILFLFLNTQVLVYRRWK

SEQ ID NO: 30245 - DNA, 324 bp, Unknown
  Obtained from environmental sample
  misc_feature (1)..(324): n is a, c, g, or t
atggttattcgccaactttcagagggcatgaactcggtggcggagggcagggacatgaccaccgtggtatttccggacgcggaacaccgcttctacctggacgcctccgcggaagcccgcgcccgccgcagatttgaccagggggtatccaaactcaaccttgaggaaataaaagaggcgataatgcaaagggacgctattgacaggaataaaaaagaggggagcctcgccatagccgagggcgtggaatatattgacacatcgggcttgaccataaaccaggtttatgccatattagaggagagaataagtaaggaaaactaa

SEQ ID NO: 30246 - protein, 107 aa, Unknown
  Obtained from environmental sample
  DOMAIN (2)...(101): Cytidylate kinase
  misc_feature (1)..(107): Xaa is any amino acid
MVIRQLSEGMNSVAEGRDMTTVVFPDAEHRFYLDASAEARARRRFDQGVSKLNLEEIKEAIMQRDAIDRNKKEGSLAIAEGVEYIDTSGLTINQVYAILEERISKEN

SEQ ID NO: 30247 - DNA, 438 bp, Unknown
  Obtained from environmental sample
  misc_feature (1)..(438): n is a, c, g, or t
ttgtcgccgcaccgcgtaatttttatgaattactccaataaaagagacgcgcttttagctctggcggaaaatctggctgccgccccgcaggtgaaaaacaggcaggagttgtccacggaaattttaaaacgcgagggactgatgagtaccgccatcggctgcgggattgccattccccacgtccgtctttcctcgataactgatcttgtcgtctctgtcggcgtaagcaaaacgaacattgtcgatttttttcctttagatgacgaacctgtaaaccttgtttttatgattgcggcggcgcaaagccagcacgcctattatttacaaacattgtcgtggttcagtacccgtttgaaaaataaaaagttgagggattccctcttgcaggcgcagacggagcaacaggtttacgatcttttagtcaaaaacaacgcctaa

SEQ ID NO: 30248 - protein, 145 aa, Unknown
  Obtained from environmental sample
  DOMAIN (1)...(143): Phosphoenolpyruvate-dependent sugar phosphotransferase system, EIIA 2
  misc_feature (1)..(145): Xaa is any amino acid
MSPHRVIFMNYSNKRDALLALAENLAAAPQVKNRQELSTEILKREGLMSTAIGCGIAIPHVRLSSITDLVVSVGVSKTNIVDFFPLDDEPVNLVFMIAAAQSQHAYYLQTLSWFSTRLKNKKLRDSLLQAQTEQQVYDLLVKNNA

SEQ ID NO: 30249 - DNA, 336 bp, Unknown
  Obtained from environmental sample
  misc_feature (1)..(336): n is a, c, g, or t
ttgaaacttgtgcagagttacaaatacgaaagaccccaaaaagggagtgattttttaaatcttgttacggcaattaccgaaggcaggggagactgcgacagcagagcgatgatctgcgcgattttactgtcaaaagcggaaatgcacgccgcgatgatgatttcgcggcaatacagccacgctatggggcttgtcgatgtcaacggaaacggcgcgcgttttgagtctcacgggacaaagtggcttgtcgcggaaactacggcggacgtagatattgggttgatagcgcaggatgtaagcgatccggcttactggttaggcgttgtttttgactaa

SEQ ID NO: 30250 - protein, 111 aa, Unknown
  Obtained from environmental sample
  misc_feature (1)..(111): Xaa is any amino acid
MKLVQSYKYERPQKGSDFLNLVTAITEGRGDCDSRAMICAILLSKAEMHAAMMISRQYSHAMGLVDVNGNGARFESHGTKWLVAETTADVDIGLIAQDVSDPAYWLGVVFD

SEQ ID NO: 30251 - DNA, 1257 bp, Unknown
  Obtained from environmental sample
  misc_feature (1)..(1257): n is a, c, g, or t
atgaaagaaaaaccggaaaattatactgaaggcatccataatgacgactacgaagacgaatatctccaaacacgccttaacgctttgcggcttgtaaatattacgggacgtgaaacggagtctcttaacggcaaatggaatttcggaattgatctttacgacacctgccgccgttcccattggtggagggaggagcgtttcagcgcggacgggcgcgaacttccggttgattatgactgggaaagctgggaatatattactgttccttcctgctggaatctgcaaaaagacgaactgcgttattacgaaggttacggcatatacacaaggactttccgatatttccggctggcacagggcgaacgtttgctgctccggtttgaaggagccgcatacagaacgacagtttttctgaacggaaaaataatcggaacgcatgacggcgcatccactccgttcaatgcggacattacagacattgttaaaaaagataaccggatagtagtatcggttgacgcaagccgcagtcctttccgcgttcctatggaaaataccgactggtttaactacggcggcatttaccgcagcatctatctagtccgtcttccgcaagtttatatcaaagactggtttgtgcggctcggcggagatttttcgacagtgttagctgatgtgtatgcggcggatgccggcggaacgcgggttagcggaaaaatatgcatggaaatccctgaacttgggatacgccatgatatttcagttgaaaacggaaagggagaagcggcaatttccgttaagcctgaactgtggagtactgaaaatcccaaactttatgatgttatttttacatataaagccggatcgtatattgatactgtaatggatcgtatcggtttcaggacaatcactgtaaaggggcatgaaatattccttaacgggaaaaaaatatttttaagcggagtatgcgttcacgaagatcattttgccttagggaagacaaccagcgaagaaataatacgcgcggcaatccgtgatttaaaggaaatgaacggtaattatttcaggcttgctcattatccgcatgacgcgcgttttgcgcgtattgccgatgaagagggcgtgctgttatgggaagaaatcccagtctactgggcaatagcttttgacaatcccgaaacttacaatgatgcggaaaaccagctttcagaacttatactcagggatcgcaaccgcgcaagcgttatcatctgtcaatag

SEQ ID NO: 30252 - protein, 418 aa, Unknown
  Obtained from environmental sample
  DOMAIN (36)...(203): Glycosyl hydrolases family 2, sugar binding domain
  misc_feature (1)..(418): Xaa is any amino acid
MKEKPENYTEGIHNDDYEDEYLQTRLNALRLVNITGRETESLNGKWNFGIDLYDTCRRSHWWREERFSADGRELPVDYDWESWEYITVPSCWNLQKDELRYYEGYGIYTRTFRYFRLAQGERLLLRFEGAAYRTTVFLNGKIIGTHDGASTPFNADITDIVKKDNRIVVSVDASRSPFRVPMENTDWFNYGGIYRSIYLVRLPQVYIKDWFVRLGGDFSTVLADVYAADAGGTRVSGKICMEIPELGIRHDISVENGKGEAAISVKPELWSTENPKLYDVIFTYKAGSYIDTVMDRIGFRTITVKGHEIFLNGKKIFLSGVCVHEDHFALGKTTSEEIIRAAIRDLKEMNGNYFRLAHYPHDARFARIADEEGVLLWEEIPVYWAIAFDNPETYNDAENQLSELILRDRNRASVIICQ

SEQ ID NO: 30253 - DNA, 666 bp, Unknown
  Obtained from environmental sample
  misc_feature (1)..(666): n is a, c, g, or t
gtggctatcttaatatccggagattttcacgcaaacgcaaaaggcgagttgaattatatttccgaaaacgcgcttcttgaaaagtacaaagaacctttatacaaaaagattaattaccatataattttaggcgacgccggatttttatggccggaaaacgaggaagcggagaatttaaattttttaaaactggctaaacgacccttccccgtgttatatgttttaggcaaccatgatccggtcttgggacgccacgatttaccggaagttgatatgggaataggtgaaaaagtagtattggtaaataaagataatccgtttacggcataccttaagagaggaaaaatatataatattgaaaatcataagtttcttgttttaggcggcgctttatccatagataagatataccgcgtatcgggcaggagctggtggaaacaggaatattggagcgacgaggaaaaaaccgatattttcctgctgctggaaaaagagaataattttgattatgtgctttctcataccggtccaagccggataaataaaattattaataattttaacgctgcctttacgcctaaatttaaagacgaagtatcggtgttgaacgagagaatagacggaaaaattaccctgcaagcagtggttttgcggtcattggcataa

SEQ ID NO: 30254 - protein, 221 aa, Unknown
  Obtained from environmental sample
  DOMAIN (1)...(195): Calcineurin-like phosphoesterase
  misc_feature (1)..(221): Xaa is any amino acid
MAILISGDFHANAKGELNYISENALLEKYKEPLYKKINYHIILGDAGFLWPENEEAENLNFLKLAKRPFPVLYVLGNHDPVLGRHDLPEVDMGIGEKVVLVNKDNPFTAYLKRGKIYNIENHKFLVLGGALSIDKIYRVSGRSWWKQEYWSDEEKTDIFLLLEKENNFDYVLSHTGPSRINKIINNFNAAFTPKFKDEVSVLNERIDGKITLQAVVLRSLA

SEQ ID NO: 30255 - DNA, 669 bp, Unknown
  Obtained from environmental sample
  misc_feature (1)..(669): n is a, c, g, or t
atgaggacgggttttgcctgtattttttcgggcccccccggaacaggaaaaaccgagaccgcgtatcagatagcgcgtaaaacaggcagggacattatgcttgtaaatatagcggaaacaaaaagcatgtggttcggggaaagcgagaagcgtattaagcatgtttttgaccgctaccggagcgccgtgaaaaacggcggcctcgcgcccatcctgctctttaacgaggcggacgcggttctggggaaacgacgggaactgtcggaatcgcgcagcggccccgatcaaaccgagaacgccattcaaaatattatccttcaggaaatggaaaatctgaacggcatccttatcgctacgaccaacatgacggttaaccttgacaaggcctttgagcgccgtttcctttataaaatcgaatttgaaaaaccgaatgtcgcgtcaaaaacacagatgtggcaaagttttattccgagtcttgatgaaaacgacgccgcccggcttgcggaaaaatatgatttttcagggggacagatagagaacatagcccgaaaaaataccgtcgcctttatcttaaaggggacaaattcagatttttcaattctggaaaatttttgcaaagaagaattgatggaaaaggccgctgtcagaataggtttctgcagcgagtag

SEQ ID NO: 30256 - protein, 222 aa, Unknown
  Obtained from environmental sample
  DOMAIN (6)...(191): ATPase family associated with various cellular activities (AAA)
  misc_feature (1)..(222): Xaa is any amino acid
MRTGFACIFSGPPGTGKTETAYQIARKTGRDIMLVNIAETKSMWFGESEKRIKHVFDRYRSAVKNGGLAPILLFNEADAVLGKRRELSESRSGPDQTENAIQNIILQEMENLNGILIATTNMTVNLDKAFERRFLYKIEFEKPNVASKTQMWQSFIPSLDENDAARLAEKYDFSGGQIENIARKNTVAFILKGTNSDFSILENFCKEELMEKAAVRIGFCSE

SEQ ID NO: 30257 - DNA, 624 bp, Unknown
  Obtained from environmental sample
  misc_feature (1)..(624): n is a, c, g, or t
ttgggatggctcttctgggtttggctggtacggcttcatgctggcagtgcaggtgctgcaaacggcttggctgctcatgcgtttatgacaacatctatttcggcagctgcggcaatgctttcgtggatggctatggatgtgatttttagccgcaagcccaccttaataggtgcctgcacgggagttgtagcagggcttgtcggcatcactccggcagctggatttgttccaatttgggctgctttcataatcggctttttggtaagccctgtttgctatggcggtattttgctggttaaaaagaaactgaaaatagacgattcattagacgcctttggatgccacggaataggaggcatttttggcgggcttatgaccggtttgtttgccgaccctgctgttggtgaaaccgctggcttgttctttggcgatcccgcacagctcggacgtcaagcacttgctatattaatcagcatagctcttgctgttgttggctcattggtttgcgctggaattgtccgttctttcacatcgttgcgcgttgagagaaaacacgaactttctgggctagacatatctgaacacggtgaaaacgcttatcccgcatataacggtttggattaa

SEQ ID NO: 30258 - protein, 207 aa, Unknown
  Obtained from environmental sample
  SIGNAL (1)...(19)
  DOMAIN (1)...(200): Ammonium Transporter Family
  misc_feature (1)..(207): Xaa is any amino acid
MGWLFWVWLVRLHAGSAGAANGLAAHAFMTTSISAAAAMLSWMAMDVIFSRKPTLIGACTGVVAGLVGITPAAGFVPIWAAFIIGFLVSPVCYGGILLVKKKLKIDDSLDAFGCHGIGGIFGGLMTGLFADPAVGETAGLFFGDPAQLGRQALAILISIALAVVGSLVCAGIVRSFTSLRVERKHELSGLDISEHGENAYPAYNGLD

SEQ ID NO: 30259 - DNA, 744 bp, Unknown
  Obtained from environmental sample
  misc_feature (1)..(744): n is a, c, g, or t
gtgcctacagtttctttggatattaaatatgaacaagcacagaacagtttacaggaaattttttcatatcttaaaaagagtggcaaaaccatttacatagctatagatgaatttcaacaaattatggattatccagaaaaaggagtagaagctctgcttcgttcttatatgcaatttttgcctaatgttcattttattttctctggaagcaaaaaacatctgatggatgctatgttttcttcggtgaacaggccattttaccaaagtacgcaaaaaataattttaaaggaaatagaaattgaatcttacagaaaatttgcaatagctctgttttcaaaatacagaaaaaaattaccagcaaaagtatttgattttgtttatgaaaatttacaagggcatacttggtacgtccaattggttttaaatttactgttcgctatggacagagcaaattattctgagcaaaacgcaaaggatgcaataaatggaattttgcaagaagaaaacgcaacatataaaacctattgcgaaatgataaccagagggcagctatgcttgctaagagcaatagcaagggagcatagcgtaaaatctccttatgaatactcttttatgcaaaaacatggtttaaaagctgccagtagcgttaagttggcacttaaatctttaatggacaaaaccttaattttgaaagatgaaaaaggttattattatgtttatgatagatttttttcgttgtggtga

SEQ ID NO: 30260 - protein, 247 aa, Unknown
  Obtained from environmental sample
  misc_feature (1)..(247): Xaa is any amino acid
MPTVSLDIKYEQAQNSLQEIFSYLKKSGKTIYIAIDEFQQIMDYPEKGVEALLRSYMQFLPNVHFIFSGSKKHLMDAMFSSVNRPFYQSTQKIILKEIEIESYRKFAIALFSKYRKKLPAKVFDFVYENLQGHTWYVQLVLNLLFAMDRANYSEQNAKDAINGILQEENATYKTYCEMITRGQLCLLRAIAREHSVKSPYEYSFMQKHGLKAASSVKLALKSLMDKTLILKDEKGYYYVYDRFFSLW

SEQ ID NO: 30261 - DNA, 825 bp, Unknown
  Obtained from environmental sample
  misc_feature (1)..(825): n is a, c, g, or t
gtgcgctcaattgaatcgtcgttttgggaagatcctgccagcgtaaaatttttaaaaataattgacggagagcaaaaacctgagacagaccgtgacattgtgttaggtgaaacgctggcttccaatatgggagtaagggtcggagatacggtgcggctgatgactgtaagaaacgcagataacggacgtcttatgccaaagtccgcttcttttacggttagaggcatattgtcctgcggttataatgaacttgacgcattatggtgcataataaacacggaaggaggaacacgggttctttctcccgatcagggttcggcaagtctgattgtaaaagttgacgatccttataatatatctgatacctttatatgggatatatatgaaaagttgggcggcggatacagtatttatacatggaaagaccttttacagtaccagtacagttcctatgagtctacaaagcagcttttattatttatcatggctttgattgtattggtagccgccgtaaatgtttcctcggctacaagcatgcttgtttttgagcgtaacagagacatcgccgttcttaaagtttcgggcgcaggtataaatggtgttacgagcatttttcttttgggaagtcttcttacggggcttgcaggcgcaattatcgggataacgcttgggctgataatcggaaccaatatcaattttttgcttcgctctcttgaaaagctccttagttttttttctcgtctttttaacggcggtgaaatcaggatactcgatcccggtttttaccttgaaacattcccattattgttgactggaaatccgtag

SEQ ID NO: 30262 - protein, 274 aa, Unknown
  Obtained from environmental sample
  DOMAIN (106)...(274): Predicted permease
  misc_feature (1)..(274): Xaa is any amino acid
MRSIESSFWEDPASVKFLKIIDGEQKPETDRDIVLGETLASNMGVRVGDTVRLMTVRNADNGRLMPKSASFTVRGILSCGYNELDALWCIINTEGGTRVLSPDQGSASLIVKVDDPYNISDTFIWDIYEKLGGGYSIYTWKDLLQYQYSSYESTKQLLLFIMALIVLVAAVNVSSATSMLVFERNRDIAVLKVSGAGINGVTSIFLLGSLLTGLAGAIIGITLGLIIGTNINFLLRSLEKLLSFFSRLFNGGEIRILDPGFYLETFPLLLTGNP

SEQ ID NO: 30263 - DNA, 1233 bp, Unknown
  Obtained from environmental sample
  misc_feature (1)..(1233): n is a, c, g, or t
ttgggggttaaggggggcgggggaattttcccgatggcgcaaaaacactcaggtccaaaatgggcaatggcccatccgaaccttcttataagagaccccgttatgtaccggatcccccgcgaacaccattaccgcgccggggacaagtggtgcatctaccccatgtacgattttcagcacccactgtttgacgctaaggagggaataacccactcgctctgttcccttgaatacgaaattcatcggcccctttacgagtggttcattaacgaagctgaagtctttcaatcgcggcagattgaatttgcgcggctcaacatgacgcgcaccgtgatgagcaagcgctggcttttgcgcctcgtcgaagaaaagtacgtctcaggctgggatgacccaaggatgcccacgattgcggggctccgccgccgtggctatacgcctgaggccatacgcagtttcgtctcgcaggtgggaatcgcgaaaaccgacagcatggcggacatcgcctttcttgagtactgccttagggaagacctgaacaaaaccagccttagggtaatggcggttgtaaagcccctggagcttgttatcgacaactggccagcgggaaaggttgaggaagtcgaagcggtgaacaaccctgaagacgaatcggctgggaaacggaaaataccctttacaggaaaattgtggatcgaacgggaggatttcgagaaagtcccgccgccaaagtatttccggcttttccctggcaacagcgtgcggctgcgttacggctacatcgttacctgtaccggctgcgacaaggatgcggcgggaaacgtcaccgccgttcactgcacttacgatcctgaaacaaagggcgggaacgcgccggacaacaaaaaagtaaaaagcaccatacactgggtgtccgcgaaaaccgccgtgccgcttgaggcgcgcatatacgattacctgttcagcgttgaaaggccgatggaggttcccgcccgccccgacgggagccccggcagttttaccgacaacatcaacccccattcgctggaagtaatcggcggcgcgtggggcgaaccctgccttgcaaacgccgcgccgggggacatttttcagtttgagcggcttggctattttgcccgcgaccccgactccggcgctggcgggcggcccgtttttaacaaaaccgtcggcctgcgcgacacctgggcgaagataaaatcaagtaacaaataa

SEQ ID NO: 30264 - protein, 410 aa, Unknown
  Obtained from environmental sample
  DOMAIN (1)...(181): tRNA synthetases class I (E and Q), catalytic domain
  misc_feature (1)..(410): Xaa is any amino acid
MGVKGGGGIFPMAQKHSGPKWAMAHPNLLIRDPVMYRIPREHHYRAGDKWCIYPMYDFQHPLFDAKEGITHSLCSLEYEIHRPLYEWFINEAEVFQSRQIEFARLNMTRTVMSKRWLLRLVEEKYVSGWDDPRMPTIAGLRRRGYTPEAIRSFVSQVGIAKTDSMADIAFLEYCLREDLNKTSLRVMAVVKPLELVIDNWPAGKVEEVEAVNNPEDESAGKRKIPFTGKLWIEREDFEKVPPPKYFRLFPGNSVRLRYGYIVTCTGCDKDAAGNVTAVHCTYDPETKGGNAPDNKKVKSTIHWVSAKTAVPLEARIYDYLFSVERPMEVPARPDGSPGSFTDNINPHSLEVIGGAWGEPCLANAAPGDIFQFERLGYFARDPDSGAGGRPVFNKTVGLRDTWAKIKSSNK

SEQ ID NO: 30265 - DNA, 600 bp, Unknown
  Obtained from environmental sample
  misc_feature (1)..(600): n is a, c, g, or t
ttggaggacaaaatggtatatggctatatccgcgttagtacggacacgcagacggtggaaaaccagcggtacgagattgagcagttttgtaaaagcaacaagctccggatcgggcaatggatcgaagagacgatcagcgggactgttgccccgtccaaaaggcagcttgggggcattttgaaaagcgtctgcagggacgaccttattatttgctccgaattatcgcgccttggaagaaacctgtatatgattatgacaatcatttcccactgccacgaagtcggggcgagaatatggacaataaaagacggctacaggcttgaggacaacatccaaagcaaggtgcttgccttcgccttcggccttgccgcagaaatagagcgaaacctaatcgcgcagcgcacgaaagaggcgttggctcgttgcaaagctgaagggataaaattgggccgtaggcccggcagtgccaacaagcccaagcttgcgggccatgaaaaagaaatcaggaaaatggtaaaggccggaatgaacaacgttgaaatcggcaggcgttttggggttcacagggaaactgtcaggatttttaaaacggagcgctga

SEQ ID NO: 30266 - protein, 199 aa, Unknown
  Obtained from environmental sample
  DOMAIN (6)...(148): Resolvase, N terminal domain
  misc_feature (1)..(199): Xaa is any amino acid
MEDKMVYGYIRVSTDTQTVENQRYEIEQFCKSNKLRIGQWIEETISGTVAPSKRQLGGILKSVCRDDLIICSELSRLGRNLYMIMTIISHCHEVGARIWTIKDGYRLEDNIQSKVLAFAFGLAAEIERNLIAQRTKEALARCKAEGIKLGRRPGSANKPKLAGHEKEIRKMVKAGMNNVEIGRRFGVHRETVRIFKTER

SEQ ID NO: 30267 - DNA, 363 bp, Unknown
  Obtained from environmental sample
  misc_feature (1)..(363): n is a, c, g, or t
atgatgaaggttgtcggcgaagaaggaacaagcatcgaagactacattattttcttaaagggcgaccttatagactccgtatacttccagcaaaactcttttgacgaagtagacgcggcggtaaaacccgaaagacaaaaatatgtttttgctaaattactgtttattcttggctctaaatttacatttacggacaagaatgacgcgcgtacatggtttaacaagctcaggcaaaaattcctcgattataacggcagcccatggaagagcgaacgttttgacaaacttgaatccgaaattgaatcggctgtaaagggccaatcacagggtcttgataagacagccgaaaaaattatttattag

SEQ ID NO: 30268 - protein, 120 aa, Unknown
  Obtained from environmental sample
  misc_feature (1)..(120): Xaa is any amino acid
MMKVVGEEGTSIEDYIIFLKGDLIDSVYFQQNSFDEVDAAVKPERQKYVFAKLLFILGSKFTFTDKNDARTWFNKLRQKFLDYNGSPWKSERFDKLESEIESAVKGQSQGLDKTAEKIIY

SEQ ID NO: 30269 - DNA, 582 bp, Unknown
  Obtained from environmental sample
  misc_feature (1)..(582): n is a, c, g, or t
ttgataagacagccgaaaaaattatttattagggcgggaattatgaacaaagtatatagcaagattgaatcaataacgggaagcgttatcactgtcaaggcggacggcgttcgttacggcgacttggcggaagtcgatacggtattcggcacttctcttgccgaggtaaacaggcttcaaggcgatacggtatcgcttcaggttttcgcaggcggtcgcggtatctcgactggcgatacaatccgctttttaggccgccccatgcaggtggcattttccgataacctaatgggcagggtgttcacgggttcaggcaaaccgcgcgataacggtcccgaattaacagataataaaatcccgattggcggtccctccgtaaatccgtcccagcgtattattccgcgcaagatgatccgcaccggtatcccgatgatcgatctattcaacacattggtcgtctcgcagaaactgcctattttctccgtctccggcggaccgtacaacgaccttctagcccgtatagccatgcaggccgaagtagacgtaatcatcctccgcggaaatgggcttaaaatacgatga

SEQ ID NO: 30270 - protein, 193 aa, Unknown
  Obtained from environmental sample
  DOMAIN (22)...(85): ATP synthase alpha/beta family, beta-barrel domain
  misc_feature (1)..(193): Xaa is any amino acid
MIRQPKKLFIRAGIMNKVYSKIESITGSVITVKADGVRYGDLAEVDTVFGTSLAEVNRLQGDTVSLQVFAGGRGISTGDTIRFLGRPMQVAFSDNLMGRVFTGSGKPRDNGPELTDNKIPIGGPSVNPSQRIIPRKMIRTGIPMIDLFNTLVVSQKLPIFSVSGGPYNDLLARIAMQAEVDVIILRGNGLKIR

SEQ ID NO: 30271 - DNA, 354 bp, Unknown
  Obtained from environmental sample
  misc_feature (1)..(354): n is a, c, g, or t
atgattacgtctacttcggcctgcatggctatacgggctagaaggtcgttgtacggtccgccggagacggagaaaataggcagtttctgcgagacgaccaatgtgttgaatagatcgatcatcgggataccggtgcggatcatcttgcgcggaataatacgctgggacggatttacggagggaccgccaatcgggattttattatctgttaattcgggaccgttatcgcgcggtttgcctgaacccgtgaacaccctgcccattaggttatcggaaaatgccacctgcatggggcggcctaaaaagcggattgtatcgccagtcgagataccgcgaccgcctgcgaaaacctga

SEQ ID NO: 30272 - protein, 117 aa, Unknown
  Obtained from environmental sample
  misc_feature (1)..(117): Xaa is any amino acid
MITSTSACMAIRARRSLYGPPETEKIGSFCETTNVLNRSIIGIPVRIILRGIIRWDGFTEGPPIGILLSVNSGPLSRGLPEPVNTLPIRLSENATCMGRPKKRIVSPVEIPRPPAKT

SEQ ID NO: 30273 - DNA, 780 bp, Unknown
  Obtained from environmental sample
  misc_feature (1)..(780): n is a, c, g, or t
atgggcttaaaatacgatgactatcttaactttaaagacacgttggaaaacgccggcgctctcgcccgtaccgtaatgtttgttcacaccgcaagcgatcctacggttgaatgcctgatgattcccgatatgtcactcgccgtagccgaacaatttgccctgcagggcaaggacgtgcttgtcctgttgaccgacatgacaaactttgccgacgcgatgaaggaaatctcaatcattcaagagcaggttccttcaaaccgcggttatcccggcgacttgtacagccagttggcgagccgttatgaaaaagcggtagactttgaaaccgcgggttcaattacggtccttggagtcacgacaatgcctggtgacgacgttacccacccggtaccggataataccggttacattacggaaggtcagtattatcttaaaaacggccgtattgagccgtttggctccctgtcacgccttaaacaacaggttaacggcaagacgcgcaaagaccaccgcgcccttatggacggtatgatcaaactttattcagccttccgcgacactctggaaaaaaaggcgatgggctttatcatgacaccttgggacgaaaaacttttaaaatacggcgttcaatttgaaaaaagaatgatggatctttcagtcaatattccgcttgaaaaggcgttggatttgggctgggaaatcttatcggattgttttaacaaagaagaaacaggcttgcgcacggaattaattaatgaattctggccaaaaaaagaatag

SEQ ID NO: 30274 - protein, 259 aa, Unknown
  Obtained from environmental sample
  DOMAIN (1)...(156): ATP synthase alpha/beta family, nucleotide-binding domain
  misc_feature (1)..(259): Xaa is any amino acid
MGLKYDDYLNFKDTLENAGALARTVMFVHTASDPTVECLMIPDMSLAVAEQFALQGKDVLVLLTDMTNFADAMKEISIIQEQVPSNRGYPGDLYSQLASRYEKAVDFETAGSITVLGVTTMPGDDVTHPVPDNTGYITEGQYYLKNGRIEPFGSLSRLKQQVNGKTRKDHRALMDGMIKLYSAFRDTLEKKAMGFIMTPWDEKLLKYGVQFEKRMMDLSVNIPLEKALDLGWEILSDCFNKEETGLRTELINEFWPKKE

SEQ ID NO: 30275 - DNA, 735 bp, Unknown
  Obtained from environmental sample
  misc_feature (1)..(735): n is a, c, g, or t
atgatttacctcacaggttttcacgctattgaggagaggataaaatcagggcggccatgcggcccgcttctggtcgcaaagcctggcccaagagcccgctcgctatctgttctggcatacgaaaaaaaaattcgcaccgaaagggtcggtactatagaccttgaccatttggcgccccttcacaggggcatagccctggcagtagacgaaggcggttttaacgctgaaacttcccttgatgaattccttgaaagccttgcgaataacgacaaaaaaagcgacgcccttgtagtaatattagacgagataaccgatccgcacaattacggcgctatactgcgttcctgcgatcaattcggcgttgatcttgtaataagccgccacagacgaattgccaaacacgcagaaacagtggctaaaacttctgcgggcgcttccgcctgggttccgcaggcagaaaccgccaatttgccctgcgccgtagaagagctgaaagaagtcggcttctggatttacggagccgacatggaaggcgaatgcctgtacagccgcgatcttcggggtaaaactgccattattctgggcggcgaaggctcaggcatctcgcggcttttaagggatagctgcgatgctatgatcgctatcccttatctgggacgcattgattccctgaatgtatcggtagccgcaggggtgctgttttacgaagtaatgcgccaaagaagaaatgaataa

SEQ ID NO: 30276 - protein, 244 aa, Unknown
  Obtained from environmental sample
  DOMAIN (3)...(74): RNA 2'-O ribose methyltransferase substrate binding
  misc_feature (1)..(244): Xaa is any amino acid
MIYLTGFHAIEERIKSGRPCGPLLVAKPGPRARSLSVLAYEKKIRTERVGTIDLDHLAPLHRGIALAVDEGGFNAETSLDEFLESLANNDKKSDALVVILDEITDPHNYGAILRSCDQFGVDLVISRHRRIAKHAETVAKTSAGASAWVPQAETANLPCAVEELKEVGFWIYGADMEGECLYSRDLRGKTAIILGGEGSGISRLLRDSCDAMIAIPYLGRIDSLNVSVAAGVLFYEVMRQRRNE

SEQ ID NO: 30277 - DNA, 882 bp, Unknown
  Obtained from environmental sample
  misc_feature (1)..(882): n is a, c, g, or t
ttgccctttccggcactcccgtggaaaaccgccttggaagacctgcgttctctttttgactttatactgcccggttatctggaaaacgcagatcaattcaggaaccagtttcgaatacccattgaagttatgcgaaaccgtgaaaaggcggaatccctgaaaaaaattacttctcctttcctgttaagaaggcttaaaacagacaagaagatcatcaaagacctgcctgaaaaaattgtcaccaatgaatacgccgtacttgaaaaagaacaggccgccctgtacgaaagcgtcgtttccgaatccataaaaaaatcagaaagagcgcaagccaaagaacgctccgcgctgattcttgaaatgctaacttccttaaagcagatatgcgatcacccgcgggtgtttgacaaggaaagccccgccgtcccggaactttccggcaaagctcagcttcttgttacccttcttcaggaaattctcgcaaaccgcgaaaaagttttagttttcagccaatatgttgagactcttgaatgcctgcggctgatcataaaaaaagaactgggcgaggtatcgcttgtctaccacggcgggcttgggcagaatacccgcacaagccttgtcgagcagttccagaatgatatggcggcgcggataatgctggtaagtttaagggcgggaggactcggccttaacctgacggcggcaagcagaattatccattatgacctgtggtacaatcccgcggttgaaaatcaggcgacagaccgcgctttccgcataggccagaaacgcaatgtgtttgttcacaggtttattacaaaaaacagcttcgaggaaaaaatcgacgccatgattccagcaagcgcgaattggccgacatga

SEQ ID NO: 30278 - protein, 293 aa, Unknown
  Obtained from environmental sample
  DOMAIN (183)...(261): Helicase conserved C-terminal domain
  misc_feature (1)..(293): Xaa is any amino acid
MPFPALPWKTALEDLRSLFDFILPGYLENADQFRNQFRIPIEVMRNREKAESLKKITSPFLLRRLKTDKKIIKDLPEKIVTNEYAVLEKEQAALYESVVSESIKKSERAQAKERSALILEMLTSLKQICDHPRVFDKESPAVPELSGKAQLLVTLLQEILANREKVLVFSQYVETLECLRLIIKKELGEVSLVYHGGLGQNTRTSLVEQFQNDMAARIMLVSLRAGGLGLNLTAASRIIHYDLWYNPAVENQATDRAFRIGQKRNVFVHRFITKNSFEEKIDAMIPASANWPT

SEQ ID NO: 30279 - DNA, 672 bp, Unknown
  Obtained from environmental sample
  misc_feature (1)..(672): n is a, c, g, or t
atggacccgcaggaattttcgcgcctgcttaaaaaattaaaagacgcgccgcccggttttaatgatttcttaaaagcgcatttttcgggcgattccgttcttgctttcgacgcccgcgaaaccatcaataatatcttccgcgagcagaattttccgattccggacgcgcttaccgccaaactcaggccgtaccaaaagcgtggctataactggatatgttcgcttttatattcaggtttcggctgtatactcgcggacgacatggggcttgggaaaaccgttcagtctatagcatcaatattacggctgaaagaggaaagactgttaaaaaacggctgtcttgtcgtagctccggcagccctcctttccaactgggaaaacgaactggggcgttttgccccgtcgttgaaaatttcccgctatcacggaaaccgccgcatccttgacagaaaacgcgacgtgtttttaaccacctaccaaaccgcggttcgcgacgcggaaaagctcaaggcagaagccttttccctgcttgtcatagacgaggcgcatcttatgaaaaacgccgatacccgcatatcgcgcacggtaaaacagcttcgttcacaataccgccttgccctttccggcactcccgtggaaaaccgccttggaagacctgcgttctctttttga

SEQ ID NO: 30280 - protein, 223 aa, Unknown
  Obtained from environmental sample
  DOMAIN (62)...(216): DEAD/DEAH box helicase
  misc_feature (1)..(223): Xaa is any amino acid
MDPQEFSRLLKKLKDAPPGFNDFLKAHFSGDSVLAFDARETINNIFREQNFPIPDALTAKLRPYQKRGYNWICSLLYSGFGCILADDMGLGKTVQSIASILRLKEERLLKNGCLVVAPAALLSNWENELGRFAPSLKISRYHGNRRILDRKRDVFLTTYQTAVRDAEKLKAEAFSLLVIDEAHLMKNADTRISRTVKQLRSQYRLALSGTPVENRLGRPAFSF

SEQ ID NO: 30281 - DNA, 774 bp, Unknown
  Obtained from environmental sample
  misc_feature (1)..(774): n is a, c, g, or t
atgaactatattaccggctttcactctattgaagaacgaattaaagcaagcaaaaacacgggtcaggcttgcggccctctcctggtcgcgaaagcgaacccacgggccagggaaattgtgaccctggcggttgacagcaaggttcgcatagacaggatcggcgtttttgaacttgaccgccttgcgcctgacaacaggggcatagcccttcaggttgaagatatttttcaggacaacgccattctcagccttgataattttttaaacgggttgggtgatcgcgccgacgcactggcgcttatccttgacgaaataaccgatccccacaattacggggcaatattgcgttcatgcgatcagtttggggttgatattgtaatcagccgcaaccggagaaacgcgaaacatgccgatgttatttccaaaacgtcggcgggaacagtgtcctgggttccccaggcggatgtcccaaatctggtacgcgccgccggccagttaaaagaagccggtttttggctgtacggcgccgatatgcagggcgagcctgtatacgcaaaagacctgcggggaagggttgcgctggtgctgggcggcgagggatcaggcatttcccgtttgttacgggagtgctgtgacagccttgtgggtatcccgtcgacaggcaagatcgattcacttaatgtgtccgttgccgccggggtactgttatatgaagtcagacgccaacttgtaataaataacaagcgagcctttccagctagatntattttntag

SEQ ID NO: 30282 - protein, 257 aa, Unknown
  Obtained from environmental sample
  DOMAIN (3)...(78): RNA 2'-O ribose methyltransferase substrate binding
  misc_feature (1)..(257): Xaa is any amino acid
MNYITGFHSIEERIKASKNTGQACGPLLVAKANPRAREIVTLAVDSKVRIDRIGVFELDRLAPDNRGIALQVEDIFQDNAILSLDNFLNGLGDRADALALILDEITDPHNYGAILRSCDQFGVDIVISRNRRNAKHADVISKTSAGTVSWVPQADVPNLVRAAGQLKEAGFWLYGADMQGEPVYAKDLRGRVALVLGGEGSGISRLLRECCDSLVGIPSTGKIDSLNVSVAAGVLLYEVRRQLVINNKRAFPARXIX

SEQ ID NO: 30283 - DNA, 1248 bp, Unknown
  Obtained from environmental sample
  misc_feature (1)..(1248): n is a, c, g, or t
gtggagcgtaatgattgcgtcacagaatcgtttatcaagaaagaagtcaaccagataattaggtttacaattatcattgcgtttgtagctctgatagccgcggtggtaatcatataccttgttctgagcggtactaccaaaccaatcgtcaatgtagccgacaccctcagggacatatccgaaggcgaaggggacctaacccatgttattaatgttagttccaatgacgaagtaggcgatcttgccaagtacttcaataaaactcttgaaaaaatcaaaaacatggtgttccagattaaaaaacaggcgggtctgttgtcgaacatcggcaatgacttgtccaataatatgacccaaacagcatcggcgataaacgaaattacctcaaacattcagagtataaagggcagggtaattaaccagagcgcaagcgtaaccgagaccaacgcgacaatggaaaatgttattgccaacatcaacaaactcaacagtcatattgaaagaatggcggaaaatgtcaattcagtaacaaacacgttgatcaacaacgccgccaatgtaaaaacattactggaagcctccgaagtgggaaagacgggattgcaggaagtagtgactgacattaatgaaatctcccaagaatccgaaggtttgatggagattaatgcggtaatgcaaaacatagccagccagaccaacctgttgtcgatgaacgccgctattgaagccgcccacgctggagaagcgggaaaaggtttcgcggtagtcgccgatgaaatccgcaaacttgcggaaagttccagcgaacagtcaaaaacgattggcaatgttttaaagaagataaaagaatcaatcgacaagataaccaaatccgccgaagccgtaacaactaggtttgagtccatagattcaagcgtcaaaactgtggcggatatggaagaaaacatcctcaacgcaatggaaaaacagggagaagagagcaaccatacgggcaacgccagtttaaccgaaattacacatatggtaaaaagcggttccgaggaaatgcttgaaggtagcaaggaagtaataaaagaaagccagaaccttgaaaaagtaacgcaggaaataacaggcggaatggacgaaatggctaacggcgcggagcaggtaaacacagcggtaaacaatgtcaatgagatgactgcccaaaaccgtacagccattgactctttgttaaaagaagtttcacggtttaaggtggagtaa

SEQ ID NO: 30284 - protein, 415 aa, Unknown
  Obtained from environmental sample
  DOMAIN (139)...(415): Methyl-accepting chemotaxis protein (MCP) signaling domain
  misc_feature (1)..(415): Xaa is any amino acid
MERNDCVTESFIKKEVNQIIRFTIIIAFVALIAAVVIIYLVLSGTTKPIVNVADTLRDISEGEGDLTHVINVSSNDEVGDLAKYFNKTLEKIKNMVFQIKKQAGLLSNIGNDLSNNMTQTASAINEITSNIQSIKGRVINQSASVTETNATMENVIANINKLNSHIERMAENVNSVTNTLINNAANVKTLLEASEVGKTGLQEVVTDINEISQESEGLMEINAVMQNIASQTNLLSMNAAIEAAHAGEAGKGFAVVADEIRKLAESSSEQSKTIGNVLKKIKESIDKITKSAEAVTTRFESIDSSVKTVADMEENILNAMEKQGEESNHTGNASLTEITHMVKSGSEEMLEGSKEVIKESQNLEKVTQEITGGMDEMANGAEQVNTAVNNVNEMTAQNRTAIDSLLKEVSRFKVE

SEQ ID NO: 30285 - DNA, 714 bp, Unknown
  Obtained from environmental sample
  misc_feature (1)..(714): n is a, c, g, or t
atggctgtacggttttgggcagtcatctcattgacattgtttaccgctgtgtttacctgctccgcgccgttagccatttcgtccattccgcctgttatttcctgcgttactttttcaaggttctggctttcttttattacttccttgctaccttcaagcatttcctcggaaccgctttttaccatatgtgtaatttcggttaaactggcgttgcccgtatggttgctctcttctccctgtttttccattgcgttgaggatgttttcttccatatccgccacagttttgacgcttgaatctatggactcaaacctagttgttacggcttcggcggatttggttatcttgtcgattgattcttttatcttctttaaaacattgccaatcgtttttgactgttcgctggaactttccgcaagtttgcggatttcatcggcgactaccgcgaaaccttttcccgcttctccagcgtgggcggcttcaatagcggcgttcatcgacaacaggttggtctggctggctatgttttgcattaccgcattaatctccatcaaaccttcggattcttgggagatttcattaatgtcagtcactacttcctgcaatcccgtctttcccacttcggaggcttccagtaatgtttttacattggcggcgttgttgatcaacgtgtttgttactgaattgacattttccgccattctttcaatatga

SEQ ID NO: 30286 - protein, 237 aa, Unknown
  Obtained from environmental sample
  SIGNAL (1)...(27)
  misc_feature (1)..(237): Xaa is any amino acid
MAVRFWAVISLTLFTAVFTCSAPLAISSIPPVISCVTFSRFWLSFITSLLPSSISSEPLFTICVISVKLALPVWLLSSPCFSIALRMFSSISATVLTLESMDSNLVVTASADLVILSIDSFIFFKTLPIVFDCSLELSASLRISSATTAKPFPASPAWAASIAAFIDNRLVWLAMFCITALISIKPSDSWEISLMSVTTSCNPVFPTSEASSNVFTLAALLINVFVTELTFSAILSI

SEQ ID NO: 30287 - DNA, 891 bp, Unknown
  Obtained from environmental sample
  misc_feature (1)..(891): n is a, c, g, or t
atgaacagcgccaacaccaacgcacttttgcgttacacgcagaaccgcgaactctcgtggctcaaattcaacgagcgcgtccttgaggaggcgcaggacgcaaatgtccctatccttgagcggttgaagttcgtgtccatattcacgaacaacctcgacgagttcttcatggtgcgcgtgggcagtttgtgcgacctcgccatagagcacggcgacgccatagacaacaagtcggggctaacgccgagcggtcagcttgaggtcgtctacaacgccgtgcggccgctctacgccaaacgcgacgaagtgtactccgaaatcatgagccagatacggcaatacggcatctgctcgctcgacgtcgccgacctcacaaacgaggagaggaagtttgtaaagaactacttcaaacttgaggttcttccggtcatgtcgccgcaaatcgtgggctcgcaccacccgttcccccatctgtcaaacaaggcgattcacgtcgcggccatgctgcagcgcaaaaacagcgccatggtcggcatcgcggcgctgccggacaccgtgccggaggtgctattccttcccggcgacgacctcagatacatcacgcttgacaaaatagtgctcgaaaatatagacgctctctttgagttgtacgagatagccgagaagaacgtcttgtgcgtaacgcgaaacgccgatatagactacgaggaggaaggcgaagagatagagggcgacttccgtttcctcatgaaaaaattgcttaagaagcgccgccgcctctccgtagtccgattggagatggccgcgccaccggaagagaatttcgagaaggtgttctgcgagaggctgcaaatcggaagacgtgagattttcgcgaccaaacacccatga

SEQ ID NO: 30288 - protein, 296 aa, Unknown
  Obtained from environmental sample
  DOMAIN (13)...(295): Polyphosphate kinase
  misc_feature (1)..(296): Xaa is any amino acid
MNSANTNALLRYTQNRELSWLKFNERVLEEAQDANVPILERLKFVSIFTNNLDEFFMVRVGSLCDLAIEHGDAIDNKSGLTPSGQLEVVYNAVRPLYAKRDEVYSEIMSQIRQYGICSLDVADLTNEERKFVKNYFKLEVLPVMSPQIVGSHHPFPHLSNKAIHVAAMLQRKNSAMVGIAALPDTVPEVLFLPGDDLRYITLDKIVLENIDALFELYEIAEKNVLCVTRNADIDYEEEGEEIEGDFRFLMKKLLKKRRRLSVVRLEMAAPPEENFEKVFCERLQIGRREIFATKHP

SEQ ID NO: 30289 - DNA, 1509 bp, Unknown
  Obtained from environmental sample
  misc_feature (1)..(1509): n is a, c, g, or t
ttggcaaattacctgccggaattcatagggaagcagattgacacggaaacgcaatatggcccttatttaaacgatgtcgaagatgctatcaaaaacgcccaggaatgggagggtacggcttacgaccccgaactgaaaacaaacatggtaatggcagtcgccaatgttcccataggggtttccccgacaacatggtcggtaatggtcggctcgaccgaggcctacatcatgaaagatgtcaacgcgatgagaaactttatcatcattttggcgtccatagcccttgcggcggcggtggcgcttatataccttgctctcaatagtacaaccaaaccaatcgtcaagctggctgacacgctgaaggacatttccgaaggcgaaggcgacttgacgcggactattgccgtcaattccaaagacgagataggcgaacttgccctgtacttcaacaaaacgctggataaaatcaagaatatgatcatccatatcaaggatgaggcgaacggtttgtcggacataggcaatgatcttgccggcaacatgaccgaaaccgctgcggcgatcaaccaaatcactgccaacatccagagcatcaagggcaggattatcaaccagagcgccagcgttaccgagaccaacgccaccatggaacaggttgtaaccaccatcaacaaacttaacggccaagtggaagaccaaagcagcaatatctccaaggcttcgtccgccatcgagcagatggtagccaatgtcggttcggtaacacaaacgctggttagaaacgctgataatgtaaaaacattggaggaagcctccgaagtgggccgcagcggattagagggagttacggcggatattcaggaaatagcccgcaaatctgaaaacctgttgaaaattaactttgtaatgaaagacatcgccagccagaccaatatgctttcgctgaacgcggcgattgaagccgcccacgccggggaagcaggcgagggtttcgccgttgtcgcagatgaaatccgcaaactggcggaaagctccagcgaacagtcaaataccaacggcgccgtacttaagaatataaaggcatctatcgacaaaataaccctttccgcaagagaagcttctgaagcggaccgggacggattacagggagtcgcggcggacattcaggaaatagcccgtaaatccgaagacctgttgaaaattaacttgttaatgaaagacatcgccagccagatcaatatgctttcgataaacgcggcgattgaagccgcccacgccagagaagcgggcaaaggcttcgccattgtcgcagatgatatccgcaaactggcggaaagctccggcgaacaatccaagaccatcggcgccgtacttaagaatataaaggcatcaatcgacaaaataactctttccacggaaaatgcgcttaacggatttgaagaaattgattcaaatgtcaaaacgatcgtggaacagggcgtgagaaacaagcagatacaggcagcgtaa

SEQ ID NO: 30290 - protein, 502 aa, Unknown
  Obtained from environmental sample
  DOMAIN (231)...(464): Methyl-accepting chemotaxis protein (MCP) signaling domain
  misc_feature (1)..(502): Xaa is any amino acid
MANYLPEFIGKQIDTETQYGPYLNDVEDAIKNAQEWEGTAYDPELKTNMVMAVANVPIGVSPTTWSVMVGSTEAYIMKDVNAMRNFIIILASIALAAAVALIYLALNSTTKPIVKLADTLKDISEGEGDLTRTIAVNSKDEIGELALYFNKTLDKIKNMIIHIKDEANGLSDIGNDLAGNMTETAAAINQITANIQSIKGRIINQSASVTETNATMEQVVTTINKLNGQVEDQSSNISKASSAIEQMVANVGSVTQTLVRNADNVKTLEEASEVGRSGLEGVTADIQEIARKSENLLKINFVMKDIASQTNMLSLNAAIEAAHAGEAGEGFAVVADEIRKLAESSSEQSNTNGAVLKNIKASIDKITLSAREASEADRDGLQGVAADIQEIARKSEDLLKINLLMKDIASQINMLSINAAIEAAHAREAGKGFAIVADDIRKLAESSGEQSKTIGAVLKNIKASIDKITLSTENALNGFEEIDSNVKTIVEQGVRNKQIQAA

SEQ ID NO: 30291 - DNA, 306 bp, Unknown
  Obtained from environmental sample
  misc_feature (1)..(306): n is a, c, g, or t
atgtccgccgcgactccctgtaatccgtcccggtccgcttcagaagcttctcttgcggaaagggttattttgtcgatagatgcctttatattcttaagtacggcgccgttggtatttgactgttcgctggagctttccgccagtttgcggatttcatctgcgacaacggcgaaaccctcgcctgcttccccggcgtgggcggcttcaatcgccgcgttcagcgaaagcatattggtctggctggcgatgtctttcattacaaagttaattttcaacaggttttcagatttgcgggctatttcctga

SEQ ID NO: 30292 - protein, 101 aa, Unknown
  Obtained from environmental sample
  misc_feature (1)..(101): Xaa is any amino acid
MSAATPCNPSRSASEASLAERVILSIDAFIFLSTAPLVFDCSLELSASLRISSATTAKPSPASPAWAASIAAFSESILVWLAMSFITKLIFNRFSDLRAIS

SEQ ID NO: 30293 - DNA, 708 bp, Unknown
  Obtained from environmental sample
  misc_feature (1)..(708): n is a, c, g, or t
atgaaaatcaccattgaaataataagaatgtcgctaggcgaccctgttaccatagccgtccttttgatactcggttttttctcgctaattgcatggggaataatcttgacaaaatatttttccttaaaaagtatgcagagagcaaattttacattttataaaacttttgagcgcataaaaagctttgcagaaattgaggctttttccgtgaaagccgtggaatgccctttgagagctataacagacgctgcgattgaagaggctaaaaatctaagcccctatgtaagcgttgatactatggctccacgctcggagatgttggaagacaccatgcaacgcgaggttgaagcgtgcagaatgcaagaggattccaagctcccttttttagctatggcttccaacgcttcgccattctttgggctttttggaactgtgtggggcataatgcagtctttttacgagataggctcgcacggctcggcggatttgagcgttgttgcgcctggtatagcggtggctcttataactactgttgcaggcttgattacggcaattccctcatctatggcttttaactactttgtttcccgcaacaaccgccaagaggttttttattataactttgcctctcatctgctcagtttattcaagcgtggggatttgcaagctatagaaaaagtccaaactcttagagaagggcaaaaatga

SEQ ID NO: 30294 - protein, 235 aa, Unknown
  Obtained from environmental sample
  DOMAIN (77)...(210): MotA/TolQ/ExbB proton channel family
  misc_feature (1)..(235): Xaa is any amino acid
MKITIEIIRMSLGDPVTIAVLLILGFFSLIAWGIILTKYFSLKSMQRANFTFYKTFERIKSFAEIEAFSVKAVECPLRAITDAAIEEAKNLSPYVSVDTMAPRSEMLEDTMQREVEACRMQEDSKLPFLAMASNASPFFGLFGTVWGIMQSFYEIGSHGSADLSVVAPGIAVALITTVAGLITAIPSSMAFNYFVSRNNRQEVFYYNFASHLLSLFKRGDLQAIEKVQTLREGQK

SEQ ID NO: 30295 - DNA, 402 bp, Unknown
  Obtained from environmental sample
  misc_feature (1)..(402): n is a, c, g, or t
atgaaacgcagccgtagcaaatctctgaaccaggagatgaaccttaccaacatgatagatgttgtgtttgccattctcatcgtgtttctaatttccgcaccgctcatgagccagggaataaaagtggatttgccaaatgccgaagctcctactttggagcagaaaaaaatgctcaaggtcaccataacaaaggatgaaaaaatttttgtgtcggatatggaagtgcatctaaatgacttcaatgagattttcaaatccctttggcaagatgagatgccggttgtgataaatgcagatgagtccgtgaattatggaattgtaatgaaggttgtatctttggcgcaggtagctggcgttaagcagctaggttttttaactttggacaaggataagaaaaaatga

SEQ ID NO: 30296 - protein, 133 aa, Unknown
  Obtained from environmental sample
  DOMAIN (6)...(129): Biopolymer transport protein ExbD/TolR
  misc_feature (1)..(133): Xaa is any amino acid
MKRSRSKSLNQEMNLTNMIDVVFAILIVFLISAPLMSQGIKVDLPNAEAPTLEQKKMLKVTITKDEKIFVSDMEVHLNDFNEIFKSLWQDEMPVVINADESVNYGIVMKVVSLAQVAGVKQLGFLTLDKDKKK

SEQ ID NO: 30297 - DNA, 435 bp, Unknown
  Obtained from environmental sample
  misc_feature (1)..(435): n is a, c, g, or t
ttgcaggacattatgatcgccggtggcgcggacgagctgagcccggtggacgccgccatttttgacacgcttttcgcggcaagtaccaaaaacgaccggccccaatccaccccggccgcctatgacaaaagccgcgacggtcttgtggtgggggagggcgccggggccctgattcttgaggaatgggaacacgccgtcaaacggaaagcgaacatttacgcggaacttgtaggctttggaaccaacacggacggcagccacattacccagcccaccagcgaaaccatggctggcgcgctgaaacttgccctggacagcgggggcattgcgcctgacgcaatcgggtatgtgaacacccacggaaccgccaccgactcaggcgacattgccgaaagctgggcgactgcggatatttccaaagacccgttcctgtaa

SEQ ID NO: 30298 - protein, 144 aa, Unknown
  Obtained from environmental sample
  misc_feature (1)..(144): Xaa is any amino acid
MQDIMIAGGADELSPVDAAIFDTLFAASTKNDRPQSTPAAYDKSRDGLVVGEGAGALILEEWEHAVKRKANIYAELVGFGTNTDGSHITQPTSETMAGALKLALDSGGIAPDAIGYVNTHGTATDSGDIAESWATADISKDPFL

SEQ ID NO: 30299 - DNA, 1092 bp, Unknown
  Obtained from environmental sample
  misc_feature (1)..(1092): n is a, c, g, or t
ttgctcttattattatatctggcatataagaaaggtagaaattttttgtatcttccacgcatggatagtttgctgacctatttaaaccagtttgtgaaaatagaagagggagtttattttttgggaaattccctgtggaactggcttttggcaatagcaacggccacgttagtttactttataataaagcccatttttggcttaatcgttaaaaaaatagataaggtgattaaccacaaactcaacaagaccggtgatattgcggtggatacactcaaacacagcaaagcctggttttttatagccattgcctttttctttggagcaaaatttttaaaacttggcgaatatgattttctcccgtttagaattttgatgttctcaatattcgttcaagcagggatttggtcaaacgttatatttagcaagggtctaaggaactggagccaaaaacatgaaaacccatctcagcacaccgcaattgtgattgttctatggtttggcaggttcattatatgggctacggttttgctcttgattctagaccatctgggaatagaagctgtttcgctcttggcagggcttggagttggcggtatagccattgccctagctatgcaaaaaatcttgggcgatttgttcgcctctatttccataatgctggagaaaccctttgaaataggggactttgtgatggtgggcgaaatcagaggcacagtggaatccataggcataaagacaactcgcatacgctccgtaaacggggagcaaattgtaatttccaacagcgaccttttggaaagccgggtgaacaactttaagcgtatgacggagagacgcatagtttttagcctaaatgtgagcaatcttaccacaaaagaaaacatacacgccattacagaagttgtaaaaaatatcatagataaccaagaaaacgctcgctttgaccgaggacatctgaaaggttttagcccaggttccatagattatgaatttgtttanntggataaaagcccagaattcatagtatatatgggatgtcagcagaaaataaacttggcaattatagacgaatttgcagagagaaaataa

SEQ ID NO: 30300 - protein, 363 aa, Unknown
  Obtained from environmental sample
  DOMAIN (166)...(361): Mechanosensitive ion channel
  misc_feature (1)..(363): Xaa is any amino acid
MLLLLYLAYKKGRNFLYLPRMDSLLTYLNQFVKIEEGVYFLGNSLWNWLLAIATATLVYFIIKPIFGLIVKKIDKVINHKLNKTGDIAVDTLKHSKAWFFIAIAFFFGAKFLKLGEYDFLPFRILMFSIFVQAGIWSNVIFSKGLRNWSQKHENPSQHTAIVIVLWFGRFIIWATVLLLILDHLGIEAVSLLAGLGVGGIAIALAMQKILGDLFASISIMLEKPFEIGDFVMVGEIRGTVESIGIKTTRIRSVNGEQIVISNSDLLESRVNNFKRMTERRIVFSLNVSNLTTKENIHAITEVVKNIIDNQENARFDRGHLKGFSPGSIDYEFVXXDKSPEFIVYMGCQQKINLAIIDEFAERK

SEQ ID NO: 30301 - DNA, 687 bp, Unknown
  Obtained from environmental sample
  misc_feature (1)..(687): n is a, c, g, or t
atgaaaaacgaatggtggaaaaaagcggtcgtctaccaggtttacccgcgtagtttctgtgacttcaacggcgacggcattggcgacataaacggcattatgtcgaagctcggctacatcaaagaactgggcgtggatgtgatatggctttcccctgtttaccaaagccccatgcgcgacaacggctacgacattagcgattaccgcgccatcaatttagaattcgggacgatggcggattttgaccactttctgggacaggcgcatgaactgggtttgaaggttgtaatggatctggtcgtcaaccattcgtcagaccagcatctctggtttaaagaaagccgctcaagtcgtgagaatcccaaacgcgattattatatctggcgcgatggcaaaaacggcgggcctccaaatgactggaaggcctggttcggcggttccgcatggacgttagacgaaacgacggggcagtatttcctgcatattttttcgccgttccagcccgacctcaactgggataatcctgctttacgcaacgaaatttacgatatgatgcgctggtggcttgataagggaattgacggcttcaggatggatgccatcagcctgatttcaaaacacaaaactttccagatggcaacgcanaagaactcatacccaacggccttcatatacacgattatttga

SEQ ID NO: 30302 - protein, 228 aa, Unknown
  Obtained from environmental sample
  DOMAIN (13)...(228): Alpha amylase, catalytic domain
  misc_feature (1)..(228): Xaa is any amino acid
MKNEWWKKAVVYQVYPRSFCDFNGDGIGDINGIMSKLGYIKELGVDVIWLSPVYQSPMRDNGYDISDYRAINLEFGTMADFDHFLGQAHELGLKVVMDLVVNHSSDQHLWFKESRSSRENPKRDYYIWRDGKNGGPPNDWKAWFGGSAWTLDETTGQYFLHIFSPFQPDLNWDNPALRNEIYDMMRWWLDKGIDGFRMDAISLISKHKTFQMATXKNSYPTAFIYTII

SEQ ID NO: 30303 - DNA, 462 bp, Unknown
  Obtained from environmental sample
  misc_feature (1)..(462): n is a, c, g, or t
atgaaactcttgattgactatcctgctatggaagaagaaaaggagatggtcagccgggtgcttgaaggcggaacaggtgcggagctctcccttgagggtgtccagacggtcctgtcaccggaggaatttgtcgcgattcgcgatacggcttcgcgagtccgcgccgtccccgaggtaattgactacgcggtaaggcttgtttccgcaactagagaggggggggcaatcgagaccggcgccggcccccgcgggagccttgcccttattcgctgcgcaagaggccgtgcgctccttgagcgccgggactttgtgattcccgacgatgtgaaggcgcttgcggttccggttctgatccaccgcattgccctttcgtcagaaagcgaactggaggggcagaacgaagcgcaggcggtgaaagctcttctgtccagggtcgaagcgcccagagcggagtttgaatga

SEQ ID NO: 30304 - protein, 153 aa, Unknown
  Obtained from environmental sample
  misc_feature (1)..(153): Xaa is any amino acid
MKLLIDYPAMEEEKEMVSRVLEGGTGAELSLEGVQTVLSPEEFVAIRDTASRVRAVPEVIDYAVRLVSATREGGAIETGAGPRGSLALIRCARGRALLERRDFVIPDDVKALAVPVLIHRIALSSESELEGQNEAQAVKALLSRVEAPRAEFE

SEQ ID NO: 30305 - DNA, 1728 bp, Unknown
  Obtained from environmental sample
  misc_feature (1)..(1728): n is a, c, g, or t
atgcccagtgttatattcttattctatactgcgttaatgctgattagcggctggtattcttcttattatcttcttatctgtcttgctttatgcggattaagctgcttgtatttcagtttttacagaacagttacctatattgttttacagaatatcgcggtcgctgttttgataataaggggcattcccgtcatggggcccggctcaacgtttggagcttcggcggaaagctgggttcttttagcgctttccggcgttatcatgcttgtaattacaaggtccgccactatctcgttatccaaggcgcttgaacatcaaacttcatttaacaacctgcttgccacgacagagaactttgtcgccatggttgatgaaaacaatagagttgtttacgcgagcaaaactctctcccaacttggcagtgttgatgaacccgcgattgttcaaggatggccgcttatcgatcttttccccgggaagagattaaaaatgttcgcaggtcagatgttaaaaagcaaagacaactatgccgaagactgggaattttcgcttaacgggcagaaaaggtattttaaagcgtcgtctcacgctttgccgggaactgtcggcaactcacttataaacttgtacgatatgacattccttgcggaacgcgatgaaatcgccgccatgaaagacagcatgaaaatcggtcttttctacatggatcaaaactgcgtcatacaggatcactattcgcgctatctggaagaactgctgtccgaagaaaatcttttcggcaaactgtttacggacgttatcgcgaattcagtcacgccgaaagaactggtaagcataaaagattatttcagcatggtgcttgaaaacacctacgatcaggagatgttagacgatataaacccgttaaacgaactgcactatataaatgtaagaacgggcgacagaaaagtattccagtgcgcgtttaccacggtagaacgcgggcacggagagctctttctgctggtaacggtttatgacataaccgcaagggtagaactgcagcaaaaactggctgaagaagaggcaaagcgtcaggaagagatgcaggctgtttttgagcttattcaggttgaaccttccgtgttcagcgacttcatggaagatatggaatttgaattcggatctatcgacaagattctgaagaatgacgaattatccgcccatgacgcgcttgtaaaagtttatcagtctgttcacgccataaaatcaaacgcggtaattttggggttaaacgtattcggcaacaaagtgcataatctggaatcgaagattaaaaagttacgcgaacaggaaggcgaagtgccgtttgttgaaatgctgaacctgactgtagatatagaaaagatatcaaatgaaagggaaggtttcaaagaaattctggacaagctccagtcttatgccggcggcggaggcggattagccggagtcggcggcacaggcggcgcgagacagaacgtaaaagttttggttgaatcccttaccaagaccacggcaagggtcgcgcaggacatgggcaaacaaattaaatttgccgccggcgaagtggacccggaagcgttagataacagtccaaggcgcgttattaaagatattcttatgcagttaatcccgcaactccgcccgtacacggtattgaaacgcctgatgtacgcaaaaagaggggcaagaacgagacccgcgttgtaa

SEQ ID NO: 30306 - protein, 575 aa, Unknown
  Obtained from environmental sample
  misc_feature (1)..(575): Xaa is any amino acid
MPSVIFLFYTALMLISGWYSSYYLLICLALCGLSCLYFSFYRTVTYIVLQNIAVAVLIIRGIPVMGPGSTFGASAESWVLLALSGVIMLVITRSATISLSKALEHQTSFNNLLATTENFVAMVDENNRVVYASKTLSQLGSVDEPAIVQGWPLIDLFPGKRLKMFAGQMLKSKDNYAEDWEFSLNGQKRYFKASSHALPGTVGNSLINLYDMTFLAERDEIAAMKDSMKIGLFYMDQNCVIQDHYSRYLEELLSEENLFGKLFTDVIANSVTPKELVSIKDYFSMVLENTYDQEMLDDINPLNELHYINVRTGDRKVFQCAFTTVERGHGELFLLVTVYDITARVELQQKLAEEEAKRQEEMQAVFELIQVEPSVFSDFMEDMEFEFGSIDKILKNDELSAHDALVKVYQSVHAIKSNAVILGLNVFGNKVHNLESKIKKLREQEGEVPFVEMLNLTVDIEKISNEREGFKEILDKLQSYAGGGGGLAGVGGTGGARQNVKVLVESLTKTTARVAQDMGKQIKFAAGEVDPEALDNSPRRVIKDILMQLIPQLRPYTVLKRLMYAKRGARTRPAL

SEQ ID NO: 30307 - DNA, 354 bp, Unknown
  Obtained from environmental sample
  misc_feature (1)..(354): n is a, c, g, or t
ttggttgaaaggttaagcgacgatgcaggactattcaaagattttgtcaatacgaccattgtgccacagagaactgatatacaaatcattgagccgacgaagtcagttaaagaacgcctgtacaaagagcaaaacggtttgtgcaacggttgtaaaacgcagtttgaaattcggaatttggaaatagaccacattattccaaaatcaaagggcggtggcgattactacgaaaactatcagctattgtgtagcgcctgcaaccgaatgaaaggcgacagaccaatggaatacctacgaatgaaaaggagcaaagaagaggaattgttaaaggacaaaatcatttttggagaataa

SEQ ID NO: 30308 - protein, 117 aa, Unknown
  Obtained from environmental sample
  DOMAIN (46)...(94): HNH endonuclease
  misc_feature (1)..(117): Xaa is any amino acid
MVERLSDDAGLFKDFVNTTIVPQRTDIQIIEPTKSVKERLYKEQNGLCNGCKTQFEIRNLEIDHIIPKSKGGGDYYENYQLLCSACNRMKGDRPMEYLRMKRSKEEELLKDKIIFGE

SEQ ID NO: 30309 - DNA, 318 bp, Unknown
  Obtained from environmental sample
  misc_feature (1)..(318): n is a, c, g, or t
ttggacgcgataaacgccattcttccggcgggcactctttccggagcgccgaaaatacgcgccatgcagatcataaatgaactggaacagaacaagcgcggcatttacggcggcgcggtcggttatcttgactttaccggaaacatggacacctgcatcgcgattagaatcgtgtacaagaaaaaaggcaaagtgttcatccgctgcggggcgggaatagtcgcggacagcaatcccgaatccgagtatcaggaatgcgtaaacaaatcaaaggcggcgcaaaacgcgcttatgcaatcgtcgggagggatagactga

SEQ ID NO: 30310 - protein, 105 aa, Unknown
  Obtained from environmental sample
  DOMAIN (1)...(97): chorismate binding enzyme
  misc_feature (1)..(105): Xaa is any amino acid
MDAINAILPAGTLSGAPKIRAMQIINELEQNKRGIYGGAVGYLDFTGNMDTCIAIRIVYKKKGKVFIRCGAGIVADSNPESEYQECVNKSKAAQNALMQSSGGID

SEQ ID NO: 30311 - DNA, 630 bp, Unknown
  Obtained from environmental sample
  misc_feature (1)..(630): n is a, c, g, or t
atgcgtaaacaaatcaaaggcggcgcaaaacgcgcttatgcaatcgtcgggagggatagactgatgatactcttaattgataattacgacagtttttcctataacctgtaccagtgcataggctcgattgatcccgacattaaagttgtgcgtaacgatgaaatcaccgtggacgaaataaaaaaactctccccctcgcgcattgtgatctctcccggccccggcaaaccttccgacgcgggcatttgtatcgaagttataagaaatctctattccatgtcgccgattatcggcatctgtctcggtcatcaggcgatttttgaggcttttggcgggactgtctcctacgcgagccgccttatgcacggtaaatcatcggaagtaaaagttgacacaagcaaccccctgttcaaaggtttgccgcagaaaatacaggcggcgcggtatcattcgctggcgggaattaaatcgacattgccggatgttctgcgcgtaatcgccgaaaccgacgacggcgaaattatgggagtttgccacaaagagcgccccatatatggcgtacagttccaccctgagtcaatacttacgccgggaggggagaccaatattaacaattttatgattaattag

SEQ ID NO: 30312 - protein, 209 aa, Unknown
  Obtained from environmental sample
  DOMAIN (22)...(192): Peptidase C26
  misc_feature (1)..(209): Xaa is any amino acid
MRKQIKGGAKRAYAIVGRDRLMILLIDNYDSFSYNLYQCIGSIDPDIKVVRNDEITVDEIKKLSPSRIVISPGPGKPSDAGICIEVIRNLYSMSPIIGICLGHQAIFEAFGGTVSYASRLMHGKSSEVKVDTSNPLFKGLPQKIQAARYHSLAGIKSTLPDVLRVIAETDDGEIMGVCHKERPIYGVQFHPESILTPGGETNINNFMIN

SEQ ID NO: 30313 - DNA, 1302 bp, Unknown
  Obtained from environmental sample
  misc_feature (1)..(1302): n is a, c, g, or t
ttgggtatacctgtcctcggtatctgctacggtctgcatctgatttgccatacgctcggcggcaaagtcgcgcccggcgattccggtgaatatgggcgtgtaaccgtaacgcctggcggaagctcgtcaaaattattcggtaaggaaccttttaccgcccttatgagccacagggacgccgcagagcgtctacctgaaggttttcatgtaacggcaaaaaccgccgcctgcattgccgcctttgaaaacagcgcgaaaaagatctacgccgtgcagttccaccccgaaaccaagcacaccgagggcgggcgcgaaattctccgcaaatttttatacgatgtctgccacgccgcaggcgactataaacttgacgattacatagaaacgcaaatagcccttatgcaaaaaaaggttggcgataaaaaggccctgctcgctttgtcaggcggcgtcgattcgtctgtttgtgcgagccttttatccctggcaatacccggacagttgacctgcatctttgtcgatcacggcttaatgcgcctaaacgaaggcgatgagatagagcgcgttttttcaaaacggaacctccgcttcatccgcgtcaacgcgcaaaagcgtttccttgccaaattgaagggcgtgacggagccagagaaaaagcgcaagatcatcggcgaagaatttatccgcgtgtttgaggaagaatccgcaaaactgggcgatattccttttctggcgcaggggactatatacccggatgtcgttgagtccggcggcaaatacggcgcggttattaaaagccatcacaacgtgggcgggcttcccgaaaatcttaaatttacagggatcgtggagccattatcgcggctttncaaggatgaggtacgcgcgctaggcaaaaaacttaagctgccggcatcgcttgttaaccgccagccattcccggggccggggcttgccatccgcgtcatgggcgaagtgacggaagaaaaactggatgttttacgccgcgccgatgcaatcctccgcgaggaactggacgccatgaaacacaggcccaatcaatacttctgcgttatgaccggcacgcgctctgtaggcgttaaaggggacgacaggacttatgattttgtaatcgccgtccgggccgtaacaaccgacgattttatgacttgcgagtacacccccctaccgcataatgtattaagccgaatatcctcacggatcacaagcgaaataccgcaggcaagccgtgttgtttacgatatcacatcaaaacccccggcaacggtggaatgggagtag

SEQ ID NO: 30314 - protein, 433 aa, Unknown
  Obtained from environmental sample
  DOMAIN (2)...(114): Glutamine amidotransferase class-I
  misc_feature (1)..(433): Xaa is any amino acid
MGIPVLGICYGLHLICHTLGGKVAPGDSGEYGRVTVTPGGSSSKLFGKEPFTALMSHRDAAERLPEGFHVTAKTAACIAAFENSAKKIYAVQFHPETKHTEGGREILRKFLYDVCHAAGDYKLDDYIETQIALMQKKVGDKKALLALSGGVDSSVCASLLSLAIPGQLTCIFVDHGLMRLNEGDEIERVFSKRNLRFIRVNAQKRFLAKLKGVTEPEKKRKIIGEEFIRVFEEESAKLGDIPFLAQGTIYPDVVESGGKYGAVIKSHHNVGGLPENLKFTGIVEPLSRLXKDEVRALGKKLKLPASLVNRQPFPGPGLAIRVMGEVTEEKLDVLRRADAILREELDAMKHRPNQYFCVMTGTRSVGVKGDDRTYDFVIAVRAVTTDDFMTCEYTPLPHNVLSRISSRITSEIPQASRVVYDITSKPPATVEWE

SEQ ID NO: 30315 - DNA, 585 bp, Unknown
  Obtained from environmental sample
  misc_feature (1)..(585): n is a, c, g, or t
gtgacggttatcggagagggcgcgttttccttctgcgtccttacggacgtgacgatttcggaaagcgtggaatctatcgaagaagcggcgttttccgttaatacccgcctgacgtccgtgactattcccaaaggcgtgaagtttatcgaaaaacacgcgtttgacgtgtgcgtcggtttgaagtctataaatgtaagcgtagacaattccgtatacagttcggttgacggagtattgttcaacaaagccaaagatacgctgatactgtacccgcaaggcaaagaaggcgcgtacaccgtcccgaacggtgtgacaactataggaagcaacgcgattttcggcaacgccaaattgacgtcggtgacgattcctggcagtgtgacgcatatcggatacgatatgtttgagaaatgcgccggcttggcggccgtaataagtttaaatcccgtcccgccgaaagccggaatgttcaatttccctcgcggccaggagccttgtttgtatgtgcctgacagttgcatagtcaaatataacgaggcttggggatggcgggattttgactgcatcaggccccttcccaaataa

SEQ ID NO: 30316 - protein, 194 aa, Unknown
  Obtained from environmental sample
  misc_feature (1)..(194): Xaa is any amino acid
MTVIGEGAFSFCVLTDVTISESVESIEEAAFSVNTRLTSVTIPKGVKFIEKHAFDVCVGLKSINVSVDNSVYSSVDGVLFNKAKDTLILYPQGKEGAYTVPNGVTTIGSNAIFGNAKLTSVTIPGSVTHIGYDMFEKCAGLAAVISLNPVPPKAGMFNFPRGQEPCLYVPDSCIVKYNEAWGWRDFDCIRPLPK

SEQ ID NO: 30317 - DNA, 735 bp, Unknown
  Obtained from environmental sample
  misc_feature (1)..(735): n is a, c, g, or t
atgaaatttgtacccggccctgatcctggttttccttaccttgacgaaaacagccggttccgtttcccttccccggaaaaatggacggacagcattgtcgccgtcggcggcaatctttcgccgggaatgttgctatcagcttacgaacatggcatcttcccctggtacggtccggatgacccgcttatctggcaatctcccgatccccgcatggtgattttcccggaaaaattacacatgtcgcgctccatgaaaaaaattttcgaaaaaggggaatttagaattaccctgaaccgcgactttgccgcagtcatccgcggctgcgccgaaattgaccgccccggacagggcggcacatggataagcgatgacataatcgccgcttatacggaaatgcaccggctgggctggattatttcagcggaggcctggcttgacagtgaactcgcgggcggctgttacggcattcacatgggcaaggttttttgcggcgagtccatgttcgcgcgaaaaccaaacgcgtccaaagccgccttcctcggccttgcgtcgctccttttcaacaacggcgtaacattcatcgactgccagatgccctcaaaacaccttcgcagcctcggcggcgaagaaatatcccgcgcggaattccctgcgctgttaaaacggggatttgaaaactggcaattgacattatccatcgtttatggcattgtgaaacaatatgagggccgctag

SEQ ID NO: 30318 - protein, 244 aa, Unknown
  Obtained from environmental sample
  DOMAIN (40)...(213): Leucyl/phenylalanyl-tRNA protein transferase
  misc_feature (1)..(244): Xaa is any amino acid
MKFVPGPDPGFPYLDENSRFRFPSPEKWTDSIVAVGGNLSPGMLLSAYEHGIFPWYGPDDPLIWQSPDPRMVIFPEKLHMSRSMKKIFEKGEFRITLNRDFAAVIRGCAEIDRPGQGGTWISDDIIAAYTEMHRLGWIISAEAWLDSELAGGCYGIHMGKVFCGESMFARKPNASKAAFLGLASLLFNNGVTFIDCQMPSKHLRSLGGEEISRAEFPALLKRGFENWQLTLSIVYGIVKQYEGR

SEQ ID NO: 30319 - DNA, 720 bp, Unknown
  Obtained from environmental sample
  misc_feature (1)..(720): n is a, c, g, or t
ttggcgcagtatatatatttgatgagatatattgagtacaaactccgtattgtgcccagggttaccttgttacccaatcagtttgtcgagtacggtaatgttgatttggtggtggacataggtaattcgcgcacttgcgcggtattgttcgacggaagcaggttcgacaggtcgagtccgctgttgttgcaggatctcaccgatccggttttatccgtaaagggcaagtcgggcgagggtctcgaaagcaagctcagaaaataccacgaatcgtttgatatgcgtttggcgtttcgagaggccgatttcggcggtaatttcgggtttgaggagagcaggcaattcgtttatccgagtattgtcaggttgggaaaggaggcgaacggtttaatatatcgggcgaccaatgtaagtatgggaaattcggagaaaaaatgcactttttccagcccgaagcgcttcttatgggacacaaaaccgcaaaaacaggagtgggaattcgtgaggttggaggctgagacggccaagtccgcgtttatttacattaaaggaatatcggaacagttgaatttcgacggtacgctcaacaccgagggcgacggcggcgccgaaacgcaatattcgcgcagggcgcttatgacgttcgcgtttcttgaaatactcgcgcaggctagaatgcagatcaacagtttcgagcaacgcgatcattggaaagactaa

SEQ ID NO: 30320 - protein, 239 aa, Unknown
  Obtained from environmental sample
  misc_feature (1)..(239): Xaa is any amino acid
MAQYIYLMRYIEYKLRIVPRVTLLPNQFVEYGNVDLVVDIGNSRTCAVLFDGSRFDRSSPLLLQDLTDPVLSVKGKSGEGLESKLRKYHESFDMRLAFREADFGGNFGFEESRQFVYPSIVRLGKEANGLIYRATNVSMGNSEKKCTFSSPKRFLWDTKPQKQEWEFVRLEAETAKSAFIYIKGISEQLNFDGTLNTEGDGGAETQYSRRALMTFAFLEILAQARMQINSFEQRDHWKD

SEQ ID NO: 30321 - DNA, 1353 bp, Unknown
  Obtained from environmental sample
  misc_feature (1)..(1353): n is a, c, g, or t
atgcctgaacttgatttaacctccttcggcggggccggagacgggattacagataactcaggcccctttgtcatcgcgttgcagaccctcaaagaggcgggcggcggcaatctcatgattggcaagggggtgtggcgcaccggcccgattgagttattatcaggcattacgattaacctggacgaggatgcggttctttcttttataccggagcccgagcgttacagccccgtatggacccgctgggaagggcaggaatgttacgcgatgcacccctgcattttcgccacggggcaggaaaatatcgccattaccggcaaggggattctcgacggtaacggcaggtattggtgggacacgctgaaggaaaaaaaggccaggggccagcaaagcccccagaccccgcaggaaatggcgctggccgcgctcaacaagggttacgaaaaccagcagtcgggcggcggcggcaggaaaatgcagttcctgcggccccccctgctccagttccttaactgctcaaaaataaagctggaaggttttaccctgcagaattcgccgttctggactttgcatcccctgtactgcagtgatgtcgtcatatcgggcgttaccgtcaaaaatccttttgacgcgcccaataccgacggcatggacatcgattcctgcgaggacgtgttggttgaaaactgcgcggtttctgtgggggatgacggcattgtgctcaagtcaggctcgggcgaagacggcatacgcgtagggaaaccgtgccggagggtaacggtgcggaactgcacgatagaagacggccatggggggatagtaatcggcagcgagaccgcggcgggcgtttccgaagtgctgaccgaggaatgtctgttcaggggaaccgaccgcggaatcagaattaaaacccgccggggccgcggggggcaaattcacgatctggaattccgcaggctgaccatggaaaacaacctttgcccccttgcgattaatatgttctaccgctccggcgccgcttcgacggacggctgtttcagccagagcgcccttccggttaacgcggctacgccctcgatcaaaaatatccgcatctcggatatccgggcctcaggctgcagggcctcggccggttttatcgccggtttgcctgaatcaccggtggaaaacgtcagcatcaaccgctgtgaattctccaccgacgagcagtccggcgtaagccccgacgagtccgacatgtttttgggagtccccgcgattacggaaaagagcatacgcctgcttaatgtaaaaaatatccaattcaacgaggtaaatgtccggggtccggcggaggctttcatttaccggtag

SEQ ID NO: 30322 - protein, 450 aa, Unknown
  Obtained from environmental sample
  DOMAIN (33)...(408): Glycosyl hydrolases family 28
  misc_feature (1)..(450): Xaa is any amino acid
MPELDLTSFGGAGDGITDNSGPFVIALQTLKEAGGGNLMIGKGVWRTGPIELLSGITINLDEDAVLSFIPEPERYSPVWTRWEGQECYAMHPCIFATGQENIAITGKGILDGNGRYWWDTLKEKKARGQQSPQTPQEMALAALNKGYENQQSGGGGRKMQFLRPPLLQFLNCSKIKLEGFTLQNSPFWTLHPLYCSDVVISGVTVKNPFDAPNTDGMDIDSCEDVLVENCAVSVGDDGIVLKSGSGEDGIRVGKPCRRVTVRNCTIEDGHGGIVIGSETAAGVSEVLTEECLFRGTDRGIRIKTRRGRGGQIHDLEFRRLTMENNLCPLAINMFYRSGAASTDGCFSQSALPVNAATPSIKNIRISDIRASGCRASAGFIAGLPESPVENVSINRCEFSTDEQSGVSPDESDMFLGVPAITEKSIRLLNVKNIQFNEVNVRGPAEAFIYR

SEQ ID NO: 30323 - DNA, 489 bp, Unknown
  Obtained from environmental sample
  misc_feature (1)..(489): n is a, c, g, or t
atgcgtaaaaaaaatatgaaaaagcaccaaattcttcttttcaacgaagcggacgcggtaataggaaaacggcagtttttaggagaaaaccacaacggcccggctcagacggagaatgccattcaaaacatcattttacaggaaattgaaaacctgaacggcattcttatcgccacaacgaatctttcagctaatatggacaccgcatttgaacgccgtttcctgtataaaattgaatttaaaaagccggatattgacgcaagaaaaactatctggcgttctttaattaccgatctttccgacgaagaagccgaagtcctggcagaacgatttgatttttcaggcggacagattgaaaacatcgcccgcagatcaacagtacaccgggtactttccggtaaaattcccgtactggaggaattagtaaatttttgcaaaatggaatgtttaaacaagaataatgctaaaacgatagggttcgcaacttga

SEQ ID NO: 30324 - protein, 162 aa, Unknown
  Obtained from environmental sample
  misc_feature (1)..(162): Xaa is any amino acid
MRKKNMKKHQILLFNEADAVIGKRQFLGENHNGPAQTENAIQNIILQEIENLNGILIATTNLSANMDTAFERRFLYKIEFKKPDIDARKTIWRSLITDLSDEEAEVLAERFDFSGGQIENIARRSTVHRVLSGKIPVLEELVNFCKMECLNKNNAKTIGFAT

SEQ ID NO: 30325 - DNA, 492 bp, Unknown
  Obtained from environmental sample
  misc_feature (1)..(492): n is a, c, g, or t
ttgcgttcctgcccccctccccatcaagacagacctcgtgccaatgttcgactggctgcatggcaaaggtctcccgccgcaggagtgcctcgaccgcatggggaggctcctggccgaccccgtgggcttcgggatcgagacgggattcagcggggaactggacggcatcgagcaccacctcccagaggggatgctcctgaccgtgacccgcgggacaaaggtgggggccttgctcgccatgcccaaggcaaagcccctcgcggtgatagacaagctcaagaagatggcgcaggactatgggatcggcgaggcggcgatgcgctcaatggttgccgcgttccggcccgacatagccgacaggtggaagtccgccgacagcggcaaacagccgcaactccgcttcgacgggctcaggggcatcagcaggagcatgcgccgatcccccgattggcgcaagaagccgacgcggcaagcgtcaaagggaaccagtag

SEQ ID NO: 30326 - protein, 163 aa, Unknown
  Obtained from environmental sample
  misc_feature (1)..(163): Xaa is any amino acid
MRSCPPPHQDRPRANVRLAAWQRSPAAGVPRPHGEAPGRPRGLRDRDGIQRGTGRHRAPPPRGDAPDRDPRDKGGGLARHAQGKAPRGDRQAQEDGAGLWDRRGGDALNGCRVPARHSRQVEVRRQRQTAATPLRRAQGHQQEHAPIPRLAQEADAASVKGNQ

SEQ ID NO: 30327 - DNA, 1191 bp, Unknown
  Obtained from environmental sample
  misc_feature (1)..(1191): n is a, c, g, or t
ttgaccgtaggcggcaatttagtaacgctcacggcaaacacgcaaagccccgcccccacgcttccggcggcatacgtggcaggaacggcggctgatcccttcctcgttaccaatggaaccgatctccgcaaagtcggaaccggcacggacggctggacgctttcggcgcactacaaacagacggcgaacatggcaatggcatctaccgcatttccgccgattggtacaagtaccaacaaattcaccggatcgtatgacggggacggaaaatacattaccggattgaacctaaccaccacaagcgcaacttatttagggctttttggttatatcggcgaaggcggcacggtgaaaaacatgaccgttaccggaacggtatcgaacggcggaaaccagaccaccggaggaattgcaggagcaaaccaaggcacgattgacaattgcgtttttaacggaaccgtcaacggcggcacaagcgtcgatcaggtcggcggcattgccggatataatttccccacaggcacagtgataaacagcagaaacaacgcaacgataaccggcaggacgatggttggcggcattgcaggagtaaataacggaaaaatcgaaaacagttacaacacgggaaacgttagcggcaacagtcaagtcggcggtgtcgtgggaactaattccagcagcggcacttatgtaaagaactgctataacacgggcaatgttaccggcgaaatgtttcccggcggcattgccggagcaaaccaaaacagcgcaataatagaatactgctacaataccggcaacgttaccggcgctagcggggctttcggcatatcgggaagcaataccgctggaagcaccgtgcgatactgcgtagcgctcagtcctaagctaaccacgaccaacagcgcgtctgtcggaagaattgcaagcgataccggcactctcaccaacaataaagcccgtgcggatatgaaaaccggctttagcggttcagaggcgacagtaccctcaagtcaaacaggagtaaatcactttaacggcgcagatgtcagtttgggtacgacagtgacaaccgttttcaacaactttgatccgaacatttggtatatatggaacacacccatgaatataggcggtgatttgcccacattgaggaagaaagaggaaagccccgcccccacgcttccgtga

SEQ ID NO: 30328 - protein, 396 aa, Unknown
  Obtained from environmental sample
  DOMAIN (242)...(269): The GLUG motif
  misc_feature (1)..(396): Xaa is any amino acid
MTVGGNLVTLTANTQSPAPTLPAAYVAGTAADPFLVTNGTDLRKVGTGTDGWTLSAHYKQTANMAMASTAFPPIGTSTNKFTGSYDGDGKYITGLNLTTTSATYLGLFGYIGEGGTVKNMTVTGTVSNGGNQTTGGIAGANQGTIDNCVFNGTVNGGTSVDQVGGIAGYNFPTGTVINSRNNATITGRTMVGGIAGVNNGKIENSYNTGNVSGNSQVGGVVGTNSSSGTYVKNCYNTGNVTGEMFPGGIAGANQNSAIIEYCYNTGNVTGASGAFGISGSNTAGSTVRYCVALSPKLTTTNSASVGRIASDTGTLTNNKARADMKTGFSGSEATVPSSQTGVNHFNGADVSLGTTVTTVFNNFDPNIWYIWNTPMNIGGDLPTLRKKEESPAPTLP

SEQ ID NO: 30329 - DNA, 1128 bp, Unknown
  Obtained from environmental sample
  misc_feature (1)..(1128): n is a, c, g, or t
gtgttgggcagggtttacgaatacttccttggtcagtttgcccttgcggaaggcaaaaagggcggtcagttctatacgccgcgctgtgttgttcagttgcttgttgaaatgctcgaaccttttgaagggcgcgtactcgacccgtgctgtggctccggcggtatgttcgttcaaagtgagaagtttatcgaagctcacgccgatcgatacaatggtaaagcaaaggaaattgacaagctgtttgaaagcgttgtgtctatttttgggcaagaaagcaaccagactacatggcgattgtgcaagatgaaccttgccttacgcggtatcgacagttccaatgtgaagtggaataacgaaggttctttccttaacgacgctcatccagaccttaaagcagattttgttattgccaatccgccgttcaacgatagcgactggtcgggcgatttactccgcacggatggtcgttggcagtacagccgcgaaacaccgccgccttcgggcaacgcaaactacgcatggatacagcacttcgtctatcatttgaacccgaaaggctctgccggatttgtgcttgctaaaggctcgctttcatcaaagacgaatggtgaggataaaatccgcaaggctcttattgacgaggggcttgtggattgtatagttaatttgccgaccaagttgtttctcaatacacagatacccgcttgtctatggtttctttgccgcgctaaggagagtgacaaaaaacacccgagatgtgataaaattctgtttatcgacgcacggaatatgggctcgcttatcagccgaaaaacacgcgaactaaccgaaaaggatatccgtacaattgcggacacttaccatacatggaaatccggcaaaggttataaggatataccgggattttgcaaatctgcgcttgtcgccgaagtcgccgcccttgattatgttctcacgccggggcgttatatcggcttacctgatgacgaagacgatttcgacttcgcggaacgggtgaaaactttgaccaccgaactggaagcgcaaatgaaggaaagcgtattacttgataagcgtatccgcgacaatctggcgaaagtagatggagtgaaaaaggatgcttattaa

SEQ ID NO: 30330 - protein, 375 aa, Unknown
  Obtained from environmental sample
  DOMAIN (1)...(332): N-6 DNA Methylase
  misc_feature (1)..(375): Xaa is any amino acid
MLGRVYEYFLGQFALAEGKKGGQFYTPRCVVQLLVEMLEPFEGRVLDPCCGSGGMFVQSEKFIEAHADRYNGKAKEIDKLFESVVSIFGQESNQTTWRLCKMNLALRGIDSSNVKWNNEGSFLNDAHPDLKADFVIANPPFNDSDWSGDLLRTDGRWQYSRETPPPSGNANYAWIQHFVYHLNPKGSAGFVLAKGSLSSKTNGEDKIRKALIDEGLVDCIVNLPTKLFLNTQIPACLWFLCRAKESDKKHPRCDKILFIDARNMGSLISRKTRELTEKDIRTIADTYHTWKSGKGYKDIPGFCKSALVAEVAALDYVLTPGRYIGLPDDEDDFDFAERVKTLTTELEAQMKESVLLDKRIRDNLAKVDGVKKDAY

SEQ ID NO: 30331 - DNA, 579 bp, Unknown
  Obtained from environmental sample
  misc_feature (1)..(579): n is a, c, g, or t
atggcgagcttcatgggcggtcctctgccccatgtgatatctgcaaaagcaatcgctttccgtgaagcggcttcccccgatttcaaacagtacgcgcaaaaaatcgtaaataactgtcaggcgcttgccgcttcctgtattaagaacggacttgaagtgctgacaggcggaacggacaatcacttattactggtcaatattcataaagcgggtcttacgggcaggcaggcggaaagcgcattgcaggattgcaatataaccgttaaccgcaacagccttccccgcgatccgaacggcccgtggtacacgtcggggttaaggcttggcaccgccgctgttacaagccttggcatgggggaagctgaaatggcggaaataggtgcgttgattgcggatgtaacaaaagcgacaactcagttgcccgacaataaagaaccgtccaaaaacagcaaggtaaagtacagcattgacgcaggcgcaaagagcgaaattataagcagggtgaaaagtcttatggataggtttcctgtgtatcctgagcttgatttggaattaatgaagaaagcttttgttatttaa

SEQ ID NO: 30332 - protein, 192 aa, Unknown
  Obtained from environmental sample
  DOMAIN (1)...(130): Serine hydroxymethyltransferase
  misc_feature (1)..(192): Xaa is any amino acid
MASFMGGPLPHVISAKAIAFREAASPDFKQYAQKIVNNCQALAASCIKNGLEVLTGGTDNHLLLVNIHKAGLTGRQAESALQDCNITVNRNSLPRDPNGPWYTSGLRLGTAAVTSLGMGEAEMAEIGALIADVTKATTQLPDNKEPSKNSKVKYSIDAGAKSEIISRVKSLMDRFPVYPELDLELMKKAFVI

SEQ ID NO: 30333 - DNA, 654 bp, Unknown
  Obtained from environmental sample
  misc_feature (1)..(654): n is a, c, g, or t
gtggctattttagtaaatctattattacccactccccctctttcaattcatctaatccataaccgcctattttgctcctatgcaaagcgacaaccttgttcccaaccgctgcaaacacagactcgtggcttgtgggtgcgtggcttcactttgggttccttgggcaatatagcaaaaattcctttgaagatgttttctatattaccgctaaatatgagaatttatttggataattgttgctataacagaccatttgataaccagtctgacataattgttaaactggaatcagaggctgtatcttttatccaagaacagataaaactcggaaaattagaccttgtgtggtcttacattatggattatgagaactcctttaatccttttgcagataggcaaatttctattgaaaaatggaggcaatatgcgaaagaagatgtgaatgtgaataacgaaatagtaaaacaggcagaaaatttaatatcattgaatataaaaaaaaaggatgctttgcatatagcctgtgcattgtatgctaaatgtcgatattttctcacaacggatttaaaattattgaataaaacggttgatggaatttcaataataaatccattagattttcttaaagttcaaggagttcaaaatgacaactga

SEQ ID NO: 30334 - protein, 217 aa, Unknown
  Obtained from environmental sample
  misc_feature (1)..(217): Xaa is any amino acid
MAILVNLLLPTPPLSIHLIHNRLFCSYAKRQPCSQPLQTQTRGLWVRGFTLGSLGNIAKIPLKMFSILPLNMRIYLDNCCYNRPFDNQSDIIVKLESEAVSFIQEQIKLGKLDLVWSYIMDYENSFNPFADRQISIEKWRQYAKEDVNVNNEIVKQAENLISLNIKKKDALHIACALYAKCRYFLTTDLKLLNKTVDGISIINPLDFLKVQGVQNDN

SEQ ID NO: 30335 - DNA, 519 bp, Unknown
  Obtained from environmental sample
  misc_feature (1)..(519): n is a, c, g, or t
gtgtgtcagggaacccgccggtacggaatttccgagcgggtgcggcaaattttgctggatccaacgcataaaggcaaaatgaacgatataaccgaattgctcttatacaatgcggctcgctcgcagctgatatatgaggtgattaaaccagctctggaaaagggggttgcggttttggcagaccgctttgcgtacagcaccctcgcatatcaaggctacggcaggggattgaacgtagatgtcataaaaaatttgctgcgtataacttgcggggattgttttcccaacaaaacatttatcttggatataccggttgctttgagcagggaaaggcagaaaaaagataagtcacggagcggtgccgaccgcattgaattggaaaagaatgatttttttgagcgagtttgtcagggctaccgtgcaatagcaaaagaaaatccggataactgcattttgctggatgctcaaaaaccacctgatgaaattttcaaacttatgcttaattctcttcaaagatga

SEQ ID NO: 30336 - protein, 172 aa, Unknown
  Obtained from environmental sample
  DOMAIN (1)...(166): Thymidylate kinase
  misc_feature (1)..(172): Xaa is any amino acid
MCQGTRRYGISERVRQILLDPTHKGKMNDITELLLYNAARSQLIYEVIKPALEKGVAVLADRFAYSTLAYQGYGRGLNVDVIKNLLRITCGDCFPNKTFILDIPVALSRERQKKDKSRSGADRIELEKNDFFERVCQGYRAIAKENPDNCILLDAQKPPDEIFKLMLNSLQR

SEQ ID NO: 30337 - DNA, 813 bp, Unknown
  Obtained from environmental sample
  misc_feature (1)..(813): n is a, c, g, or t
ttgtgtatcatagaactatctacattacggcctatgcaaagtgggcataaagaaaatgtttctagcgtaataaagccaattagggatttaggcaaaaaaaaattgctctggattcttgtttttgggtttcctgtgattttgggcttggtggctatttgcatagtgtggtttaaactcgctccaacgctgccttcttttgaaaaactggaaactatagaacctcgcttgataacaaaaatttatgataaggattctattctagttcacgaattttttgtggaaaaaagaatttggacacccatagatagcattcccgatatggtgaaaaatgctgttttggcaacggaggatcgcaaattctggaatcactggggcatgaacccccttgcaattccaagcgcagtattagagagtgttagaactggcaacaagatgagaggggcaagctcgctaactcagcagcttacaaaacttttatttttaacaccggaacgttcaatcacccgcaaaatacgcgaagccatgactgccattcgcttggaaaaaacctataccaaagaagagattttggaattttatatgaacgaggtttatttggcaggtgggaattatgggtttcagtctgcggggcagttctattttggtcgccctttggattcgcttaccgttcccgaaatagcagtgcttgcaggaatgctccaacgccccgaagcctaccgccccgatcgcaaacccgaagctgccattgcccgcagaaacacggttttatacgctatgagagatgctggctatatttcaaaagagngattataa

SEQ ID NO: 30338 - protein, 270 aa, Unknown
  Obtained from environmental sample
  DOMAIN (78)...(245): Transglycosylase
  misc_feature (1)..(270): Xaa is any amino acid
MCIIELSTLRPMQSGHKENVSSVIKPIRDLGKKKLLWILVFGFPVILGLVAICIVWFKLAPTLPSFEKLETIEPRLITKIYDKDSILVHEFFVEKRIWTPIDSIPDMVKNAVLATEDRKFWNHWGMNPLAIPSAVLESVRTGNKMRGASSLTQQLTKLLFLTPERSITRKIREAMTAIRLEKTYTKEEILEFYMNEVYLAGGNYGFQSAGQFYFGRPLDSLTVPEIAVLAGMLQRPEAYRPDRKPEAAIARRNTVLYAMRDAGYISKEXL

SEQ ID NO: 30339 - DNA, 813 bp, Unknown
  Obtained from environmental sample
  misc_feature (1)..(813): n is a, c, g, or t
atggcggaatactaccgccagatgggccttcacgtgctactcctcgcggactctacaagccgctgggcgcaggccctccgcgaaatgtccgggcgcctggaagaaatccctggcgaagaagcgttccccgcctacctggaatcgaccatcgccggcttctacgaaagggcgggccttgtgaggcttaaggacggttccataggatcggtaaccataggcggtacggtaagccctgccggcggtaactttgaagagccggtaacacaggcgacactcaaggtcgtaggcgcgttccacggtctttcccgtgagcgttccgacgcccgcaagttcccagccatacatcccctggattcctggtccaagtaccagggaatcatttcggaccaaaaggtcagttacgcgcgcaagatcctcatgcgcggtaccgaagtggaacagatgatgaaggttgtcggcgaagaaggaacaagtctggaagactttataacttaccttaaagctgagttcattgatgctgtgtatttccagcaaaactcctttgacgccgtagatcaggccgcaagtccggaacggcagaaatacgtatttacccagatactcaggattctgggaagcagctttaacttcaaagacaaggaagaagcccgtacctggtttaacagcctgcgccagaagttcattgactataacttctcggcatggcaaagcgacgggttcaagaaaatagaggcggaacttttggctttggtcagggataaggctggcaaaatggatccaacggcggaaaaatttatagccggcttgatatag

SEQ ID NO: 30340 - protein, 270 aa, Unknown
  Obtained from environmental sample
  DOMAIN (1)...(121): ATP synthase alpha/beta family, nucleotide-binding domain
  misc_feature (1)..(270): Xaa is any amino acid
MAEYYRQMGLHVLLLADSTSRWAQALREMSGRLEEIPGEEAFPAYLESTIAGFYERAGLVRLKDGSIGSVTIGGTVSPAGGNFEEPVTQATLKVVGAFHGLSRERSDARKFPAIHPLDSWSKYQGIISDQKVSYARKILMRGTEVEQMMKVVGEEGTSLEDFITYLKAEFIDAVYFQQNSFDAVDQAASPERQKYVFTQILRILGSSFNFKDKEEARTWFNSLRQKFIDYNFSAWQSDGFKKIEAELLALVRDKAGKMDPTAEKFIAGLI

SEQ ID NO: 30341 - DNA, 384 bp, Unknown
  Obtained from environmental sample
  misc_feature (1)..(384): n is a, c, g, or t
atgggataccgtcccccgccgccaaacccggcgaatattgcgcgttcaagagatttaacagcttcggcaagacgcattttagaaagcaatacaacggcgcagtacgaagttgcgctcgcgcagttaaacgaagccatttcattaaacccaaataatacggaggcgccgcaagtaagagaccgcctgttaagcagaatgagcgttcccggaaacattgttctttcaagcgcggacgaagccgattaccagcgtgcgttacgtgaattaaacgcaaacaacattcttacggcgctttcgctggttgagcgtcttatgcaaaaccccagaaaccgcaatatgacaaaattagtggaattacagagaaggatacaatcggcattatga

SEQ ID NO: 30342 - protein, 127 aa, Unknown
  Obtained from environmental sample
  misc_feature (1)..(127): Xaa is any amino acid
MGYRPPPPNPANIARSRDLTASARRILESNTTAQYEVALAQLNEAISLNPNNTEAPQVRDRLLSRMSVPGNIVLSSADEADYQRALRELNANNILTALSLVERLMQNPRNRNMTKLVELQRRIQSAL

SEQ ID NO: 30343 - DNA, 558 bp, Unknown
  Obtained from environmental sample
  misc_feature (1)..(558): n is a, c, g, or t
atggccgaggattatctctttgctgatatcataaggatcatccttacctggttctcgggcggagagttcggcaggcccatggagattttggccagtattacagatccatatcttgactggtggcggcggagactcaacctgagggcgggctacctggatctttcccctgttgtcgcaatggcggctctctctgtagcgcagactatatgttccgccattgcccaaacaggaaggtttacactggggcttttacttgccgtatgtctttccgcgctgtggtcggcggtttcttttttactgggtttttgcctcgtcgtgcttatcctccgcctgattgcctattttatcaacgccgatatgttcggcatattctggcgggtcatagattccatatcacggcctatcctgtaccgcgtcagccggataattttcggaaatcgaatagtccgtttttcaacaagtattattatcaccattcttgctctgactgcgctttggattggcggaaaagtcgtcatacagtttgtttcgttttttttattcaggctgccattgtaa

SEQ ID NO: 30344 - protein, 185 aa, Unknown
  Obtained from environmental sample
  DOMAIN (1)...(73): YGGT family
  misc_feature (1)..(185): Xaa is any amino acid
MAEDYLFADIIRIILTWFSGGEFGRPMEILASITDPYLDWWRRRLNLRAGYLDLSPVVAMAALSVAQTICSAIAQTGRFTLGLLLAVCLSALWSAVSFLLGFCLVVLILRLIAYFINADMFGIFWRVIDSISRPILYRVSRIIFGNRIVRFSTSIIITILALTALWIGGKVVIQFVSFFLFRLPL

SEQ ID NO: 30345 - DNA, 1020 bp, Unknown
  Obtained from environmental sample
  misc_feature (1)..(1020): n is a, c, g, or t
ttggcggaaaagtcgtcatacagtttgtttcgttttttttattcaggctgccattgtaaaatgctgcttcgttccataaaagcgccgttaactgcaatccagggcatcggccagcgaataatgaaggaaaatgcgccgaaaatagcgcgcctggggataagggatgtagccggccttttatgccattacccgcgcgactgggaggatcgcaggtttactgtcccaatagccgaattccaacgggcaaaggtatgtaccgaagttaccgtactcgcccatgactggattggttttggtcataaaaggacgcctaaagtttatgttgaggataaaagcggcagggccgttctggtcggttttaccgcccctggcttgcgaaaagatggatgtcggcgggcgttccgcgtttggggcggttttgaatacaaatacggcgagattcaatcaagtaattttgaatttgaagagtcttccaaagcggagaattttaacacgatgatgccggtttatcctctttgcgccggactcagacaggctatgcttcgccattttacagctaacgccattaagcaatacgccgcccaactggaaaacgaactgcccgatgaaataatggccagggacaagctgcttccaaaagcagccgccgtcagggcgtatcattatccgtcttcacccgaagaactggaactggcaagaaaaaccctgatatatgaagaattgttttatcttgagataatggtaggcaaacgggcgctggagagaaaagggagtagggagtggggagtggggagtgggaacatgtttnantgcgngggtcacacaccgcgccggatcgtttattcaggcagggtgcatgcgatcacaatcggccgtgatgacggggaaatcggtatatacgctaaccactccccctttaccgcacattctgttacaggcccgctccgcattaaagacgacaagggcaactggcgcactcgcgtttgtctgcggcggcatcctgcaggtaaaagaacataa

SEQ ID NO: 30346 - protein, 339 aa, Unknown
  Obtained from environmental sample
  misc_feature (1)..(339): Xaa is any amino acid
MAEKSSYSLFRFFYSGCHCKMLLRSIKAPLTAIQGIGQRIMKENAPKIARLGIRDVAGLLCHYPRDWEDRRFTVPIAEFQRAKVCTEVTVLAHDWIGFGHKRTPKVYVEDKSGRAVLVGFTAPGLRKDGCRRAFRVWGGFEYKYGEIQSSNFEFEESSKAENFNTMMPVYPLCAGLRQAMLRHFTANAIKQYAAQLENELPDEIMARDKLLPKAAAVRAYHYPSSPEELELARKTLIYEELFYLEIMVGKRALERKGSREWGVGSGNMFXCXGHTPRRIVYSGRVHAITIGRDDGEIGIYANHSPFTAHSVTGPLRIKDDKGNWRTRVCLRRHPAGKRT

SEQ ID NO: 30347 - DNA, 861 bp, Unknown
  Obtained from environmental sample
  misc_feature (1)..(861): n is a, c, g, or t
ttgtcccaaaatacagctttgaacacaaagnccattgtttttggattaagcggcggtattccaaaatatttggaactttttgatgattccattccgctgaggaaaaacataataaggaattttttttcaacaagcgggtatttatatgaagagccttcaaacttgttgaaacaggagttgagggagccgcaaaaatataattcaataatagaagccatagctacaggggcttccaagctaaacgacatagccaccaaaacgggcttggaatcaagcacaacctctgtttatatttcttctttaatttctcttggcattgtgaataaagaaggtgccattaccgaagaaacaaacaaacgcaaaacgctctatagccttgcagacacaatgtttcttttttggtatcgccacgtttttggaaaccaattttctgtgattagcggcaatgcagaaagtttctacgatatggaaatcagttcagggttgcagcaatttatggggtatatttttgagaaaatttgcagggaatatttaaaaattcaaaattctctgaacaaattgccttttcccctaactcaaatagggtggtggcgaggaactaatcagcaaacaaagagtgaagcggaaatagatattgttggcattaacaaaaagcagaattccgttttgctatgcgaatgcaagtttcgcaacgcaaaaacagatttagcagttttaaaagatttgcaagataaatcttttcactttgcagattacgcaaacaagcactttatgctattttcaaaaagtgaatttacaagcagtttaaagcagaataaaggcagcaatgttcatttagtgggtattagcggggtttattaa

SEQ ID NO: 30348 - protein, 286 aa, Unknown
  Obtained from environmental sample
  DOMAIN (134)...(235): Archaea bacterial proteins of unknown function
  misc_feature (1)..(286): Xaa is any amino acid
MSQNTALNTKXIVFGLSGGIPKYLELFDDSIPLRKNIIRNFFSTSGYLYEEPSNLLKQELREPQKYNSIIEAIATGASKLNDIATKTGLESSTTSVYISSLISLGIVNKEGAITEETNKRKTLYSLADTMFLFWYRHVFGNQFSVISGNAESFYDMEISSGLQQFMGYIFEKICREYLKIQNSLNKLPFPLTQIGWWRGTNQQTKSEAEIDIVGINKKQNSVLLCECKFRNAKTDLAVLKDLQDKSFHFADYANKHFMLFSKSEFTSSLKQNKGSNVHLVGISGVY

SEQ ID NO: 30349 - DNA, 411 bp, Unknown
  Obtained from environmental sample
  misc_feature (1)..(411): n is a, c, g, or t
ttggaacgcacctggaaaagcggcgacacggtggaagaagcggatgtaacatataatgaggtcacgtattcctacaacgatggcacaaactggttctttttagacccaagcggtgaaatggtggaaataccaaaagacgccctcaatggcgcagagctttggctcctagatggcgcagccgtgcaggtgacctggtggaatggaaaggctatagaagttattccgcctacattcgtggatttgctgattgtggagtccccaccgggggttcaaggcaacacgagcggcaacgttatgcgcgccgctatcttagagactggtgcagaggtgcaaatcccgcttttcatagagcaggggatgcgcataaaggtggacacccgtaccggtgaatatgtagagcgttccaaataa

SEQ ID NO: 30350 - protein, 136 aa, Unknown
  Obtained from environmental sample
  DOMAIN (18)...(71): Elongation factor P (EF-P) OB domain
  misc_feature (1)..(136): Xaa is any amino acid
MERTWKSGDTVEEADVTYNEVTYSYNDGTNWFFLDPSGEMVEIPKDALNGAELWLLDGAAVQVTWWNGKAIEVIPPTFVDLLIVESPPGVQGNTSGNVMRAAILETGAEVQIPLFIEQGMRIKVDTRTGEYVERSK

SEQ ID NO: 30351 - DNA, 483 bp, Unknown
  Obtained from environmental sample
  misc_feature (1)..(483): n is a, c, g, or t
atgatgttcgagaaatgcagggaaatcctgttgagggaaagcgaactggtgcagagaattgccggtttgcagaatcttattcgtgaagcggttatgaaccgtaattggactgattttgagggtcattttaacgatttgggcaagattcgggccgaattcgccgctctggagggcgaacgggaactgctttttaccggaactccgggggaagcggggtcttctgcttctttttatacccttgccgcgcagcttcccccgcggcaacgcgccgaactgacggaaatctaccgcagtctgaaacttgaaaccctgcggcttcaggtctccggcgaagcgctgatgagttacattaccgaagtgcgcgccgctatggcgggttttttcgaggttgcctttcccgaccggggcggcaaaatatataccccgcatggggtaccggtatcccacgatatgcgcagcatggttttgaaccgggctttttag

SEQ ID NO: 30352 - protein, 160 aa, Unknown
  Obtained from environmental sample
  misc_feature (1)..(160): Xaa is any amino acid
MMFEKCREILLRESELVQRIAGLQNLIREAVMNRNWTDFEGHFNDLGKIRAEFAALEGERELLFTGTPGEAGSSASFYTLAAQLPPRQRAELTEIYRSLKLETLRLQVSGEALMSYITEVRAAMAGFFEVAFPDRGGKIYTPHGVPVSHDMRSMVLNRAF

SEQ ID NO: 30353 - DNA, 786 bp, Unknown
  Obtained from environmental sample
  misc_feature (1)..(786): n is a, c, g, or t
atgacttcaacttttatgggaattgaaattggcaaacggggcgttcaagcccatcagcaggccctgtatgttaccgggcataaccttgacaatgccggcaacgacggctattcccgccagcgtgttgaaatgtccgcattcgagccaatttatctgccggggctgaaccgcgcggaaacgccgggacagataggacagggcgttgtcattgaacgcattgaacggatgagggatcaactgcttgataagagaatcatactgcaatcttccaatgaaggttactgggccgcccgcgatccctatatccgtatgatggaaaatgtgtacctggaaccgggggagaattcggtgcggtcaaagatggacgcgttttgggattcatggcaagaactttccatgtttcccgcggactccgctccccgcaccgcagttatagagcggggcaaaacgcttattgacggtattcacaatcgctatcagagcctgaaaggtttgcaggatcaggccaatgaagacatagaactcaccgtgcgccgcgtcaacgagctttcccgccagatagcatccatcaacggcgacattcagcggataaaagcccagggcgatatgcccaatgatcttatggatcgccgcgatctgttagttgataaacttgcctccataattgacatcagtatcagcaatcaggacccggatgaatttatggtgcatacttccggctttgtgcttattcaggggcagataggccgccagtttgactgcgaagggaaagactcggccatctga

SEQ ID NO: 30354 - protein, 261 aa, Unknown
  Obtained from environmental sample
  misc_feature (1)..(261): Xaa is any amino acid
MTSTFMGIEIGKRGVQAHQQALYVTGHNLDNAGNDGYSRQRVEMSAFEPIYLPGLNRAETPGQIGQGVVIERIERMRDQLLDKRIILQSSNEGYWAARDPYIRMMENVYLEPGENSVRSKMDAFWDSWQELSMFPADSAPRTAVIERGKTLIDGIHNRYQSLKGLQDQANEDIELTVRRVNELSRQIASINGDIQRIKAQGDMPNDLMDRRDLLVDKLASIIDISISNQDPDEFMVHTSGFVLIQGQIGRQFDCEGKDSAI

SEQ ID NO: 30355 - DNA, 939 bp, Unknown
  Obtained from environmental sample
  misc_feature (1)..(939): n is a, c, g, or t
atggtaggggtgcgcgtagtaggagagttaaattcaaaaatagcggacaggacgtttctggactacatcagaatctcggaggcgcatcaggcgcgtgaattatcgaaaatagccgaaaaaatttacagcaaacacgacaagattaaaatgatccttattgccggcccttcaagctcgggaaaaacaacaagcgctaaaaggctttcaatagagctgatggttcttggccttaacccaatcgccgtaagtctggacgattattacaggggaacggcggcaacaccgaaagacgaaaacggagaacctgactatgaatgtcttgaagcgctggacgtgccttatcttaacgaacagctgcaggctttgtaccgcggagaggaaattaccctgcccgtttacgattttaagtcaggagagcgaaaggcgacaggcggcaaaaaaatccgcttggacagccggaacgtgcttattgtcgaaggcatacacggccttaatgacgctctcacctacagtataaaccgtgacacaaaattcaagatttacatttcagcccttacccagcttaaccttgacgatcacaaccgaatccccaccagcgacaacaggcttttgcgccgcatggtgcgcgattcccaattcaggggcatgcaggcggcgggcaccataaaaatgtggcccaaagtgcaggccggcgagcgcaagtacattttcccgttccaggacaccgccgacgccacgtttaattccgctctagattacgaactttcagtcttcaaatactttgccgacccgctcttaaaggccgtaaagcccggcatgaacgaatacgccgaagcgataagattgctgtcattcctggaaaacttcacccctattccgccggagtacgtgccgggtacaagtatcttgcgcgagttcattggtgggagtgaattttag

SEQ ID NO: 30356 - protein, 312 aa, Unknown
  Obtained from environmental sample
  DOMAIN (50)...(256): Phosphoribulokinase / Uridine kinase family
  misc_feature (1)..(312): Xaa is any amino acid
MVGVRVVGELNSKIADRTFLDYIRISEAHQARELSKIAEKIYSKHDKIKMILIAGPSSSGKTTSAKRLSIELMVLGLNPIAVSLDDYYRGTAATPKDENGEPDYECLEALDVPYLNEQLQALYRGEEITLPVYDFKSGERKATGGKKIRLDSRNVLIVEGIHGLNDALTYSINRDTKFKIYISALTQLNLDDHNRIPTSDNRLLRRMVRDSQFRGMQAAGTIKMWPKVQAGERKYIFPFQDTADATFNSALDYELSVFKYFADPLLKAVKPGMNEYAEAIRLLSFLENFTPIPPEYVPGTSILREFIGGSEF

SEQ ID NO: 30357 - DNA, 705 bp, Unknown
  Obtained from environmental sample
  misc_feature (1)..(705): n is a, c, g, or t
atgatgacacaacttaatcttgacggttcctggaagcttgccacattaagcggtaggccggataaattaaagcaaaaagaaatagagaccgaagttccaggctctgttttggacacgtgggtaaaagcgggcattgttcccgatccgtactacggcgaaaatgaaaaacaaattactccgctttttaacaacgactttgaatattcacgtactttttctgcaagcgccgagctattggctgaagatgtagttgaattggtatgtctgggtattgatactctgggtgaaatttttgttaatgacagaagcgttgccaaggtaaacaatatgcaccgcagttggcgctttaatgtcaaagcgatgcttaaacccggcgaaaacacaatccggatagttctgttttctcctaacgcttttattgctgatgctttcaaaaacggtcctgtggaatttgtcgccactggcacaatggcgggaacgagttatcttcgcaaaacccactgccagttcggctgggattggggaccaatgctgcccgatgctggaatctggcggagcattttcctggaaggctggagcgttgcccgtttgagcgatgtatacatcacgcaggaacattccgccgacggaagtgtaaccttacaagcaagaattcaagctgaagcggcggacttaaagcgcttttgggcggaaaacgatcgctaa

SEQ ID NO: 30358 - protein, 234 aa, Unknown
  Obtained from environmental sample
  DOMAIN (1)...(193): Glycosyl hydrolases family 2, sugar binding domain
  misc_feature (1)..(234): Xaa is any amino acid
MMTQLNLDGSWKLATLSGRPDKLKQKEIETEVPGSVLDTWVKAGIVPDPYYGENEKQITPLFNNDFEYSRTFSASAELLAEDVVELVCLGIDTLGEIFVNDRSVAKVNNMHRSWRFNVKAMLKPGENTIRIVLFSPNAFIADAFKNGPVEFVATGTMAGTSYLRKTHCQFGWDWGPMLPDAGIWRSIFLEGWSVARLSDVYITQEHSADGSVTLQARIQAEAADLKRFWAENDR

SEQ ID NO: 30359 - DNA, 489 bp, Unknown
  Obtained from environmental sample
  misc_feature (1)..(489): n is a, c, g, or t
ttggaagaagccctttacgcttccaaaatcgtctcttacgctcaggggtatctcttaatgagggaagcggctaaagaatacaaatggaatcttaactacggcggcatcgcccttatgtggaggggcggctgtattatccgctccgtcttcctcggaaaaataaaagaagcttttgataaaaatccgaatcttgagaacctcttattggacccttacttttcaaaaacaatcaaagaagcaggcgagtcctggcggcgcgtagtttcaaccgcagtccttaacggaataccgatccccgccctttcaagcgcgctgtcctacttcgacgggtacagaagcgagaggcttccggcaaatcttttacaggcgcaaagggattatttcggggcgcatacctacgaacgtctggacaaaccccgtggcgaattcttccatactaactggacggggcacggcggcgagacaagcgcgtctacctataccgtttaa

SEQ ID NO: 30360 - protein, 162 aa, Unknown
  Obtained from environmental sample
  DOMAIN (2)...(149): 6-phosphogluconate dehydrogenase, C-terminal domain
  misc_feature (1)..(162): Xaa is any amino acid
MEEALYASKIVSYAQGYLLMREAAKEYKWNLNYGGIALMWRGGCIIRSVFLGKIKEAFDKNPNLENLLLDPYFSKTIKEAGESWRRVVSTAVLNGIPIPALSSALSYFDGYRSERLPANLLQAQRDYFGAHTYERLDKPRGEFFHTNWTGHGGETSASTYTV

SEQ ID NO: 30361 - DNA, 762 bp, Unknown
  Obtained from environmental sample
  misc_feature (1)..(762): n is a, c, g, or t
gtgacaatccctaccgtaacttcggtaaccgttacccccgcaagcccgcaaataaaaaggggcgaaggccagacctttacggccaggatagaaggcactggtaacccgggccaggaagtaacgtggaaggttgacggcgtgggcggcacagcgacaaccacaataaccgccaacggcgtgctaataatcagcacgatggaaacactgacacagctccttgttacagccaactctgtagacgaccccacgaaatttggcactacactggtgacgataccggcaatccccgccgccgtaataccaaccccggctccagacgctccctcgtcaacccccaacgcgccaaccacaaccaccccagacggttttcaattgactggcacggtattaaccaaatacgtcggttcaagcctaagtgtaactatccccaacagcgttaccaaaatcggggatggcgcttttatggacaacgcaaacattaccagcgtaaacataccgaacagcgttaccagtataggggatgaggctttttactattgcaccagccttatcagcataaccataccgaacagcgttagaagcattgggaattacgcttttagcagttccggacttaccagcgtaaccataccgaatagcgtcaccagtattggggatgaggctttttccggctgcggcaagctcaccagagtaaccatagcaaacagcgttaccaccattgngtataacgcttttaacattgcggcaatcttgcgagcataa

SEQ ID NO: 30362 - protein, 253 aa, Unknown
  Obtained from environmental sample
  misc_feature (1)..(253): Xaa is any amino acid
MTIPTVTSVTVTPASPQIKRGEGQTFTARIEGTGNPGQEVTWKVDGVGGTATTTITANGVLIISTMETLTQLLVTANSVDDPTKFGTTLVTIPAIPAAVIPTPAPDAPSSTPNAPTTTTPDGFQLTGTVLTKYVGSSLSVTIPNSVTKIGDGAFMDNANITSVNIPNSVTSIGDEAFYYCTSLISITIPNSVRSIGNYAFSSSGLTSVTIPNSVTSIGDEAFSGCGKLTRVTIANSVTTIXYNAFNIAAILRA

SEQ ID NO: 30363 - DNA, 348 bp, Unknown
  Obtained from environmental sample
  misc_feature (1)..(348): n is a, c, g, or t
atgacagatcgacgacctgccgaattcgcaaaacgtaaaggcggcgatttatcgggcggtcagcagcagcagctcgctatcgcccgcgctcttgcggcggaaccgaaaattttaatactggacgaaccgacagagggtattcaaccctcgattattcaggacataggcagggcgataagaagaatcaacactgaaaaagggataactgtccttcttgtggaacagtacctggaatttgtactggagatttcagaccatctgttcattatggaaaaaggaaacgtcgtgttaagcggagcgaccgccgaacaggacgcggaacatattcaaaagatactaacgatatag

SEQ ID NO: 30364 - protein, 115 aa, Unknown
  Obtained from environmental sample
  DOMAIN (2)...(93): ABC transporter
  misc_feature (1)..(115): Xaa is any amino acid
MTDRRPAEFAKRKGGDLSGGQQQQLAIARALAAEPKILILDEPTEGIQPSIIQDIGRAIRRINTEKGITVLLVEQYLEFVLEISDHLFIMEKGNVVLSGATAEQDAEHIQKILTI

SEQ ID NO: 30365 - DNA, 678 bp, Unknown
  Obtained from environmental sample
  misc_feature (1)..(678): n is a, c, g, or t
atgatgatcgataccgtaatttatatgcagataacggaccccaaactttacacttacggcgttataaaccccatgagcgccattgaaaaccttaccagtacgacattgcgtaatattatcggagaactggaacttgacgaaacccttacaagccgtgacatgatcaatacgcggatgcgcacagtccttgacgaagccaccgacccttggggcatcaaggtaaaccgtgttgaagttaaaaacatcgccccgcccaagagtattcaagaagcgatggaaaagcagatgagggccgaacgtgaaagaagggaatcaatcctgaaagccgaaggcgaaaaacagtccgccattcttgtcgccgaaggccagaaagcgtccgcgattttaaaagccgaagctgaaaaagccgcggttatcctacaggcggaagccgcgaaagaggctcaaatccgcgaagccgaaggcgaagcgcaggcaatccttaacgtgcaaaaagcaaccgcggacggccttaacatgataaagagcgtaaacgccgacgatccattaattaagctaaaaagtctggaagcccttcaaaaagtagccgacggccaggcgacaaagattattattccctcagaaatacaaaatttagcgggtcttgttaccagtgttgcggagttagtgaaaaaataa

SEQ ID NO: 30366 - protein, 225 aa, Unknown
  Obtained from environmental sample
  DOMAIN (2)...(113): SPFH domain / Band 7 family
  misc_feature (1)..(225): Xaa is any amino acid
MMIDTVIYMQITDPKLYTYGVINPMSAIENLTSTTLRNIIGELELDETLTSRDMINTRMRTVLDEATDPWGIKVNRVEVKNIAPPKSIQEAMEKQMRAERERRESILKAEGEKQSAILVAEGQKASAILKAEAEKAAVILQAEAAKEAQIREAEGEAQAILNVQKATADGLNMIKSVNADDPLIKLKSLEALQKVADGQATKIIIPSEIQNLAGLVTSVAELVKK

SEQ ID NO: 30367 - DNA, 807 bp, Unknown
  Obtained from environmental sample
  misc_feature (1)..(807): n is a, c, g, or t
ttgcgcaaacttgaatcgcgggacgaaccgcctgaaattgccggtcttgaaacggaaatcgcaaagttatgcgacgagaaaagcgcgtttgtaagcgtgcaggattatgaacacgccgccgaagtccgcgataaagtgcgtgatttaagggcgcgccttgcgcaggcgcaaatcgcgtgggaaagctcatccgtaaatcatcgtccgcaagtgacggacgatgacgtgcgccgcgtcgtaacggaagcgacgggaattcccgttatgcaccttgaagagcatgagtcgcgccgtatgttattaatcgaagaagaactgcgtaaatcaataataggacaggatgaggctgttgggcgcattgcctccgctatcaggcgctcaagagccggggtttcctctccgcgccgtccgttaggctcatttattttccttggacctacaggagtgggaaaaacatatcttgcaaaaaaactcgcgcagtttctgttctcaaatgaagatgcccttgtcagaattgatatgtccgattatatggaaaagcacaattcttcccgtcttgtcggcgctccccccggttacatcggttatgaagaagggggaatgttaacggaaaaaatcaggcgcaatccttatcgtgtggttctatttgacgaaatcgaaaaagcgcattacgacgtatttaacattttactgcaagtgctggaagaaggcgaactgcgggacagccttgggcataccgtcaacttccgcaatacgataataataatgacaagtaacgccggtgcgcgtgaaatttcccaaagataa

SEQ ID NO: 30368 - protein, 268 aa, Unknown
  Obtained from environmental sample
  DOMAIN (140)...(268): ATPase family associated with various cellular activities (AAA)
  misc_feature (1)..(268): Xaa is any amino acid
MRKLESRDEPPEIAGLETEIAKLCDEKSAFVSVQDYEHAAEVRDKVRDLRARLAQAQIAWESSSVNHRPQVTDDDVRRVVTEATGIPVMHLEEHESRRMLLIEEELRKSIIGQDEAVGRIASAIRRSRAGVSSPRRPLGSFIFLGPTGVGKTYLAKKLAQFLFSNEDALVRIDMSDYMEKHNSSRLVGAPPGYIGYEEGGMLTEKIRRNPYRVVLFDEIEKAHYDVFNILLQVLEEGELRDSLGHTVNFRNTIIIMTSNAGAREISQR

SEQ ID NO: 30369 - DNA, 708 bp, Unknown
  Obtained from environmental sample
  misc_feature (1)..(708): n is a, c, g, or t
gtggtaatttcttcattgcggaccgcggcatttcgtaatttgtcggatgctgttgtagaaaccgcggcaaaaaatatttttcttgtaggagaaaacggtcagggcaagacaaattttttggaggccctttatttttgttcctacgcttcgtcctttcgcggggcgcgtgacagtgatatcgcccaaaacgataaaaaaaatttttccgcttctattacgacagcaagccaaccttcggagaaaaacgtccgcggcgaggttcttgttaaattcgaaaggggtaaaaaatccgtttttattgatggaaaaaaagcggaagaccgcaaagagctcctttcggttgttccctgtgtcgtcttttgccatgaggatatggaatttgtagccggcagtcctgaacgatgccgctggttttttgatcagacgctcagcctgtatgatcccgtgtatctggatgatcttcgcggctaccgcagggtgttaaagtcgcgcaacagcgttttgcgggataatcggcagggttttaacgacagcccggagccgttgtttgacacacttgaccaacaggccgcggtatacggggttagacttatggaaaagcgggaaacggcggcgaggttgttctccatggttttctctcagcttttgaaacaagtcagcggtattacaggcatacaggtacagtacaaccctcgtggaggcctgtag

SEQ ID NO: 30370 - protein, 235 aa, Unknown
  Obtained from environmental sample
  misc_feature (1)..(235): Xaa is any amino acid
MVISSLRTAAFRNLSDAVVETAAKNIFLVGENGQGKTNFLEALYFCSYASSFRGARDSDIAQNDKKNFSASITTASQPSEKNVRGEVLVKFERGKKSVFIDGKKAEDRKELLSVVPCVVFCHEDMEFVAGSPERCRWFFDQTLSLYDPVYLDDLRGYRRVLKSRNSVLRDNRQGFNDSPEPLFDTLDQQAAVYGVRLMEKRETAARLFSMVFSQLLKQVSGITGIQVQYNPRGGL

SEQ ID NO: 30371 - DNA, 1014 bp, Unknown
  Obtained from environmental sample
  misc_feature (1)..(1014): n is a, c, g, or t
atggctgtcgatcgtgtggaaattaaggatttccttgtttttaaaggtcagttcgaggttgacttctngccccggcgtcatgtgcttatcggcgggaatggaacggggaagactactctatcaaagacaattttacacagttatgctttatttcgcggggaaccgttagattctaaagtaaagtcgtatttgccttattttgcacaagttaatagtgatatttggcccaaattttatagcggtataaatggccattcacacattaaagaaacaaaacataatatgtntgcgatatttttcaatctatccgcgcgtgattatcacgcaccaaatgagcagaatatgtgtgaaattgatattagtgctgtttttataccggaaaaagatatccttgaacatgctaaggggttgttaccgtttattgaacaaaagcagactggattcagcgaaatatataaagatgtgctgattgccgcgcaggatgttcctacacaagagcaatccgaaatgcagaagtctgtcgggcagaaaatcgccgcgatagtcggcggcgttgtacagtgggaacaaagcgatggtatgttctatactatacggacaaatggtatgcgtataccgtttatatatgaagcaagcggttttaaaaagctcggttatcttgggttgctgttaacaagcggacagattgaacccggtactattttgttttgggacgagcctgagaacagcttgaacccggagcttatacctgaacttgttaatattctgcttgagttgtcacgcaacggcgttcaaattttcattgcgacccacagcgaaatcctcgcgagttattttgctgttaatcgtaaaaagggcgacaacgtaatgttctattcgctgtacaaagacggtgagcaaataaaagcggacgcaaacgaccgtttcgacatacttgaaccgaacaacctcaaagcagaaattgtgaatctttacgaaaaagaaatagagagggggttgggtggtaatggataa

SEQ ID NO: 30372 - protein, 337 aa, Unknown
  Obtained from environmental sample
  DOMAIN (24)...(284): ABC transporter
  misc_feature (1)..(337): Xaa is any amino acid
MAVDRVEIKDFLVFKGQFEVDFXPRRHVLIGGNGTGKTTLSKTILHSYALFRGEPLDSKVKSYLPYFAQVNSDIWPKFYSGINGHSHIKETKHNMXAIFFNLSARDYHAPNEQNMCEIDISAVFIPEKDILEHAKGLLPFIEQKQTGFSEIYKDVLIAAQDVPTQEQSEMQKSVGQKIAAIVGGVVQWEQSDGMFYTIRTNGMRIPFIYEASGFKKLGYLGLLLTSGQIEPGTILFWDEPENSLNPELIPELVNILLELSRNGVQIFIATHSEILASYFAVNRKKGDNVMFYSLYKDGEQIKADANDRFDILEPNNLKAEIVNLYEKEIERGLGGNG

SEQ ID NO: 30373 - DNA, 711 bp, Unknown
  Obtained from environmental sample
  misc_feature (1)..(711): n is a, c, g, or t
gtggctatcgcccgggcgttaataaatgagccgcgcgttctgttactcgacgagcctctttccgcccttgacgcaaaacttcgacagcacatgttgatagagcttgaccgcatccatgatgaaatcggcataacgttcatatatgtgacgcatgatcaacaggaagcgctttcggtctctgaccgtcttgcggtcatgaaccacggcgatattttacaaataggcacgccccatgaaatttatgaaagcccttccacggattttgtcgcccattttataggggaaaccaatctttttgacggcgttattacaagcgtggaaaaagtaaaaattaacgatagcggcgatgaaatggaatatttagcggaagtggaaatccccgagttaggtaaaattaaagtaaccgatgtagacgaggtaaaagtcgggcaacatgtaagttttaccataagacctgaaaaaatcgtcatcaccaaagaagtaccgactacgaaacgttcttatataaatcatttacagggaatagtagacgaacctatttattccggtttccagacaaaattctatgttaaagtgcaagataagactcttattcgcgtgataaaacaacacgccaattattcagacgaaggaccggacatccgctggaaggattccgtctttctttcatggagcgccgttgacggctatatagtcgaggtaaaaagttga

SEQ ID NO: 30374 - protein, 236 aa, Unknown
  Obtained from environmental sample
  DOMAIN (148)...(232): TOBE domain
  misc_feature (1)..(236): Xaa is any amino acid
MAIARALINEPRVLLLDEPLSALDAKLRQHMLIELDRIHDEIGITFIYVTHDQQEALSVSDRLAVMNHGDILQIGTPHEIYESPSTDFVAHFIGETNLFDGVITSVEKVKINDSGDEMEYLAEVEIPELGKIKVTDVDEVKVGQHVSFTIRPEKIVITKEVPTTKRSYINHLQGIVDEPIYSGFQTKFYVKVQDKTLIRVIKQHANYSDEGPDIRWKDSVFLSWSAVDGYIVEVKS

SEQ ID NO: 30375 - DNA, 384 bp, Unknown
  Obtained from environmental sample
  misc_feature (1)..(384): n is a, c, g, or t
atgtctggcaacactaaaatcatcaataactcaacaaaaggtaacggtggcggcgcttctgtaagcagtggtggcgcaatatccggcaatgcaagtattagtggtaataccgccaaagggggcggcggactttatatatccgatggtactcttatcatggaaggcggcgaaatttctgataacaaagccgaaaacggcgctggggtctatgttgaaggaaggggggcttttaaccacaaaagcggaaccattaccggcaacgaagcggactttattggtagtggggtatacttcaaaaacggcgcaagctacaccgccgggggcggcagggtaaccggcaacacttcaggggacatgggcgatgataatgtcttcaggcagtaa

SEQ ID NO: 30376 - protein, 127 aa, Unknown
  Obtained from environmental sample
  misc_feature (1)..(127): Xaa is any amino acid
MSGNTKIINNSTKGNGGGASVSSGGAISGNASISGNTAKGGGGLYISDGTLIMEGGEISDNKAENGAGVYVEGRGAFNHKSGTITGNEADFIGSGVYFKNGASYTAGGGRVTGNTSGDMGDDNVFRQ

SEQ ID NO: 30377 - DNA, 765 bp, Unknown
  Obtained from environmental sample
  misc_feature (1)..(765): n is a, c, g, or t
ttgaaaattgttttggtaggttttggcttgctcgcgagttcggttgcttctgcaattaagcagtctaaattaaaatatacagtttgtgcggttagctcaaaagaaaccctagcaaaggcaaaagaacgttctttagcagatgaattttttgaatatggcgaagtagaaaaatggttgccaaattcaaatttaattttgctgtgcggccccataaagcatattttatccacaattcaaactctcaaaaacaatgcaagtttgctaagcgaagaggttatagttagcgatattggtagcacaaaagagcaaatttgcagtgcgggcttttcgcttggctcaccctttgtttttgtaggtgggcatcctatggctggttcggaaaagcgtggtgttgaacacagcgacccttccatttttgaaaatgcctattggctttattgcctgccaaaaaatttaagtgaattgccaaaaccgctaaacgaacttttaaattttttaggaagccgtccggttcaaatttctccgcaagaacacgactttgcgatgtcttggctaagccacgctccgcagctcttgagcacttcaatggcggctggtctgtcgcaagatattgcaaaaaatcatctgcacttggcagggcgcggctttagggatatgactcgcatcgctggttcttcttggggaatgtggaaagatattttagaaacgaataaaaaaaatgttgcaactgcacttgaaacttatgcaaaaaaagcctggaaataa

SEQ ID NO: 30378 - protein, 254 aa, Unknown
  Obtained from environmental sample
  SIGNAL (1)...(18)
  DOMAIN (5)...(254): Prephenate dehydrogenase
  misc_feature (1)..(254): Xaa is any amino acid
MKIVLVGFGLLASSVASAIKQSKLKYTVCAVSSKETLAKAKERSLADEFFEYGEVEKWLPNSNLILLCGPIKHILSTIQTLKNNASLLSEEVIVSDIGSTKEQICSAGFSLGSPFVFVGGHPMAGSEKRGVEHSDPSIFENAYWLYCLPKNLSELPKPLNELLNFLGSRPVQISPQEHDFAMSWLSHAPQLLSTSMAAGLSQDIAKNHLHLAGRGFRDMTRIAGSSWGMWKDILETNKKNVATALETYAKKAWK

SEQ ID NO: 30379 - DNA, 543 bp, Unknown
  Obtained from environmental sample
  misc_feature (1)..(543): n is a, c, g, or t
ttggaaccgcttatttttatgcttggacaggcctgcgagtatataggcgactggaacggcgcgattgcggcatatacaaattatctgccgtacacgggaacaatagtccccggatttccccaggccgatcaatacgcaaaaaaccaggtggatctcagcaggtcccagaaagattggacgtttgaaagccttagcgcgttaaggaacgcggttgaagacgctttggatgccggcagcgcctatacgctcatgagataccagacaaaggtgaactttttcgcccgttcatgggagcaggtggaaaccgatgatattgggttaaacaagtttaatctttcccaatttatgtccggcaaccatatcaaatataactccacccttgacgcgtcttcaaattcaaccgaagcttttttaagaacaagcggctggtcattttcgcttaatacatggtatttgtacttcagaaagatttatttcccgcaagaccctgaaattcacggaagatgggaatgggccgggatttactacggagaaaaattttga

SEQ ID NO: 30380 - protein, 180 aa, Unknown
  Obtained from environmental sample
  misc_feature (1)..(180): Xaa is any amino acid
MEPLIFMLGQACEYIGDWNGAIAAYTNYLPYTGTIVPGFPQADQYAKNQVDLSRSQKDWTFESLSALRNAVEDALDAGSAYTLMRYQTKVNFFARSWEQVETDDIGLNKFNLSQFMSGNHIKYNSTLDASSNSTEAFLRTSGWSFSLNTWYLYFRKIYFPQDPEIHGRWEWAGIYYGEKF

SEQ ID NO: 30381 - DNA, 723 bp, Unknown
  Obtained from environmental sample
  misc_feature (1)..(723): n is a, c, g, or t
gtgccgttttcaagccgggtctggaaagcggaggcctatgaagagccggacggcgtttttgtgcgttttgaacttaagagccaggacggcgaagagggttttccggggaattttgcggcggcggtcagttacggcctgaccaaatcaaacgagattgtcgccgattatacggcaaaagtggacgctccctgtccggtaaaccttacgaaccacgcttattacaacctggcaggagaagggcggggtatggatgtcctttcaaccgaacttaaattgtactgcccttcctaccttgaagttgacgaaaagcttatcccgacaggaaagatcctccctgtaaaaagcactcctctggatttccagatccgtaaaccaatcggcagggacatcgggcctctggtttcaacaggtatcgggggctacgatcattgttttgttgtagacggggaaatcgggaagttaaggcctttcgcggaagtttacgatccgttctcgggaagatccatgagggggttcacaacccaaccggggcttcagttatatacggcaaacagcatatccccgtttcagggaaaaatcggatctgtctacgaaaaacacggggcattctgcctggaaacccagcattatcctgattcgcccaacaagagcggcttcccttccgcgattttcggtcccggccaggactaccaggaaagggcggttttcgcttttgactggtaa

SEQ ID NO: 30382 - protein, 240 aa, Unknown
  Obtained from environmental sample
  DOMAIN (1)...(237): Aldose 1-epimerase
  misc_feature (1)..(240): Xaa is any amino acid
MPFSSRVWKAEAYEEPDGVFVRFELKSQDGEEGFPGNFAAAVSYGLTKSNEIVADYTAKVDAPCPVNLTNHAYYNLAGEGRGMDVLSTELKLYCPSYLEVDEKLIPTGKILPVKSTPLDFQIRKPIGRDIGPLVSTGIGGYDHCFVVDGEIGKLRPFAEVYDPFSGRSMRGFTTQPGLQLYTANSISPFQGKIGSVYEKHGAFCLETQHYPDSPNKSGFPSAIFGPGQDYQERAVFAFDW

SEQ ID NO: 30383 - DNA, 1167 bp, Unknown
  Obtained from environmental sample
  misc_feature (1)..(1167): n is a, c, g, or t
ttgtatgaaatcannggcagaaaagacatacggggcgatataatagtttttgtaatttgtatagttgtaatattgctntgcgtnttacccatgattaaccttctgncgcagtcacttagcagttccgacgcggttataaacggaagagtgtcctttttgccagttgtcaacaaaggaaatatattaaacagtgaagacgcgcccggcgatgacaataattcatacggcgaagagaatgccttttcttacgatgaatacagttttgaatacgaagaatatgaagaatacgtttatgacgaatattatgaatattcttattatgaagatgacagttattcatacggcgatgattcgcaggactcgcagagcgcgcaaagcgcgcaaagcgatgaagattacggagaatgggcagcccaaagggaagccgtaaaaaacaaatttaaatacggaataaccatggaatcgtacagatatgtatttatggatccggcgtttacaagatcaatgtggtggacggtaattcttactgttatttgcactttggtttctctgacaatgactatactgtgcgcttatccgcttacttatgaaaagctgaaaggcaagacgttaataaatactttaataatatttacaatgtatttcagcgccgggaccatacctaattacatattgatgaaaaatatggggcttcttgataatccgctagtccttattatccctaactgtctttcggtatttaatatgataatccttcgcagctttttctttggaattcccgacagtctgcgtgaatctgcggaattggacggcgcaaatccgtttaccgtattggtacggatatatcttccgttgtccgcgcccgtattggcgactctcgcccttttttacgccgtaggccgctggaacgggttttccgacgccctgttatacataaagtcggcgccgcaatgggttcccatccagttaaaactttggcagttaattcagaatatgacgtctatcgacgtaacaacagtagaaatggttgcgggcaatgtgccgagggcctccgacgcaatcaaggcggcggctattatgttcgctaccgttcctattcttatagtctatccatggctccagcgttactttatcaagggcgttaccataggagccgtaaagggataa

SEQ ID NO: 30384 - protein, 388 aa, Unknown
  Obtained from environmental sample
  DOMAIN (165)...(383): Binding-protein-dependent transport system inner membrane component
  misc_feature (1)..(388): Xaa is any amino acid
MYEIXGRKDIRGDIIVFVICIVVILLCVLPMINLLXQSLSSSDAVINGRVSFLPVVNKGNILNSEDAPGDDNNSYGEENAFSYDEYSFEYEEYEEYVYDEYYEYSYYEDDSYSYGDDSQDSQSAQSAQSDEDYGEWAAQREAVKNKFKYGITMESYRYVFMDPAFTRSMWWTVILTVICTLVSLTMTILCAYPLTYEKLKGKTLINTLIIFTMYFSAGTIPNYILMKNMGLLDNPLVLIIPNCLSVFNMIILRSFFFGIPDSLRESAELDGANPFTVLVRIYLPLSAPVLATLALFYAVGRWNGFSDALLYIKSAPQWVPIQLKLWQLIQNMTSIDVTTVEMVAGNVPRASDAIKAAAIMFATVPILIVYPWLQRYFIKGVTIGAVKG

SEQ ID NO: 30385 - DNA, 873 bp, Unknown
  Obtained from environmental sample
  misc_feature (1)..(873): n is a, c, g, or t
ttgacgcttggaaaaagtcagaaaaggcatggtttacgacatcatatttatggatcatttcatgcccaggatggacggagtgaaacgacaaaaatcatacgcggattggggtatacgcagactataatcgcgctgacggctaacgccattacgggacaggcggaaatgtttttggcgaatggctttgacgggtttatctcaaaaccgatagacatacgccaactgaatgttttgctgaataagtatgtacgcgacaagtacccgcccgaggtggttgaggcggcgcagcggcaggcaataaaaaacaatatggtgaaaaagatacaacagccatccgacccggaattggcggcaatcttcgcgcgggacgccgaaaaggccatcgcaaggctggacgcgatttatgtaaatacgttccgcagaaacgaagacatcaggcaatatgttattgatgttcactccatgaaaagcgcccttgccaatatcggcgagacggagctttccgcaaaagcgtttaaactggaacaggcgggaaaagcggaagataaaacggtaatgatgtccgaaacccccgtttttttgaaagagctgcgtgaagtggttaaaaaaaacaagcaaaaggcaaatgccaatgatactaccgtcacggaagattcgcccgatgccctggcgttcttaaaagaaaaactgcccctcatccagaaagcgtgcgaggaatacgatgaagtaaccgccgctacggctctgtctgaattgaaacagataagctggtcgcattcagtcgaagagacgctggataccataagcgaacatttattgcacagtgattttgaagatgcggcggcgcttgcaaaagaccgattacatagatag

SEQ ID NO: 30386 - protein, 290 aa, Unknown
  Obtained from environmental sample
  DOMAIN (115)...(203): Hpt domain
  misc_feature (1)..(290): Xaa is any amino acid
MTLGKSQKRHGLRHHIYGSFHAQDGRSETTKIIRGLGYTQTIIALTANAITGQAEMFLANGFDGFISKPIDIRQLNVLLNKYVRDKYPPEVVEAAQRQAIKNNMVKKIQQPSDPELAAIFARDAEKAIARLDAIYVNTFRRNEDIRQYVIDVHSMKSALANIGETELSAKAFKLEQAGKAEDKTVMMSETPVFLKELREVVKKNKQKANANDTTVTEDSPDALAFLKEKLPLIQKACEEYDEVTAATALSELKQISWSHSVEETLDTISEHLLHSDFEDAAALAKDRLHR

SEQ ID NO: 30387 - DNA, 564 bp, Unknown
  Obtained from environmental sample
  misc_feature (1)..(564): n is a, c, g, or t
atgccgtttaagggggtcgatgttatggacgttaagaaagaattcgtcttaaaagcgctggacgacagggtggtattcaccgagctttgccgtgaatacggaattggcacgaaatgcgggtacaagtggaaacagaggttccttgaggaagggtacgcgggccttgaggaacactcaagaaaaccgctaaccaacagccggagcataccggagccggtgagcgtggaaatgctgcggataaaaaagctgcaccccgcgtggggggcaaaaaaaatccttgaaatatacaaacggaaccataccgggaagtacgccccggcgcgtggaagcgtggaaaatctttttgtacgcgcgggctacaccggcgtcaggcggagaaggaacatacgcggcggccagataatacaaaaccgtataattcctacaaagccgaacgaggtatggaccgttgattttaagggctggtggtacaccaggaacagggagaaagtaaacccgctgactatacgcgacgaattcagtaaattcatacttgcgatagatgttgtcgaaaaagngcgataa

SEQ ID NO: 30388 - protein, 187 aa, Unknown
  Obtained from environmental sample
  misc_feature (1)..(187): Xaa is any amino acid
MPFKGVDVMDVKKEFVLKALDDRVVFTELCREYGIGTKCGYKWKQRFLEEGYAGLEEHSRKPLTNSRSIPEPVSVEMLRIKKLHPAWGAKKILEIYKRNHTGKYAPARGSVENLFVRAGYTGVRRRRNIRGGQIIQNRIIPTKPNEVWTVDFKGWWYTRNREKVNPLTIRDEFSKFILAIDVVEKXR

SEQ ID NO: 30389 - DNA, 618 bp, Unknown
  Obtained from environmental sample
  misc_feature (1)..(618): n is a, c, g, or t
atgaataaagttgtaaagataatattaaaaatattatccaaaatactttttggaataatattatttattatattatgctattttggattgtggatatatacaataaattatgttcaaaaagattttaaggaatattataaaaatgttaaattacttgatttaaatgaagaacaatataaaattatttggtttacaataactgataataaagattatagatttaaatggcgtccctttatttttgatattatatcagaaataggaaaaccaattaccttagatttacttgcagccgaaaatattattgcattagaatttgattatagagatttaaatcatgcaaatttaaggcattatgctttaatgcgatatataagatttgataataattggaaaaaatgtataagtattatattaaatcattacagttttaaagatagtgaaattaataatatagaaaacgcctctattttttattataaaaaagaattacaaaatattaatgataaagaattaataggattaatattaaaatataatgattataaatatgaaattggaacagattttacacaaaataaaatcaatgaattatatatgaggtataataaagaataa

SEQ ID NO: 30390 - protein, 205 aa, Unknown
  Obtained from environmental sample
  misc_feature (1)..(205): Xaa is any amino acid
MNKVVKIILKILSKILFGIILFIILCYFGLWIYTINYVQKDFKEYYKNVKLLDLNEEQYKIIWFTITDNKDYRFKWRPFIFDIISEIGKPITLDLLAAENIIALEFDYRDLNHANLRHYALMRYIRFDNNWKKCISIILNHYSFKDSEINNIENASIFYYKKELQNINDKELIGLILKYNDYKYEIGTDFTQNKINELYMRYNKE

SEQ ID NO: 30391 - DNA, 594 bp, Unknown
  Obtained from environmental sample
  misc_feature (1)..(594): n is a, c, g, or t
ttgcttaggagccatatgaaaaaatgtacatttatgttggttggcaacgcaaatgagcttattctttccaagagatttcgcgaggatcacaagttctccccgaatagttttacgaggcatcgtcgcatgggcttcgtagacgtcatgggcctttgcctgaattttctcaggaagtcattgcagatagaaatcggccaatacatggagctgaccgatccagaaatagagaggcctattaccaagcaggcgttttccaaagccagacataatatatcacctgatgccttcagggagctttttgaaatgacttgcagcacggtgtttgacattgatgctttcgacagatacaagggttatcgagttttcgcaatagacagcacgaatttgcgtcttccgccgagcaaggatattctgggtgtattcaagcgctgcaaaaaaaccaatccatgcccccatgcccgcgcaagcatactttgcgaggttgtttctggattcaccgcccatgcggccgtaggaactattgaggtaggcgagcgagatttggcaatggagcatctcaattatcttgcgactttcaagcgaagcaaagattaa

SEQ ID NO: 30392 - protein, 197 aa, Unknown
  Obtained from environmental sample
  misc_feature (1)..(197): Xaa is any amino acid
MLRSHMKKCTFMLVGNANELILSKRFREDHKFSPNSFTRHRRMGFVDVMGLCLNFLRKSLQIEIGQYMELTDPEIERPITKQAFSKARHNISPDAFRELFEMTCSTVFDIDAFDRYKGYRVFAIDSTNLRLPPSKDILGVFKRCKKTNPCPHARASILCEVVSGFTAHAAVGTIEVGERDLAMEHLNYLATFKRSKD

SEQ ID NO: 30393 - DNA, 309 bp, Unknown
  Obtained from environmental sample
  misc_feature (1)..(309): n is a, c, g, or t
atgaggaaaatcatcacaaaagcaatagcattgcttatcgcgttcagcacagtcacccttgcccaagagaaaggttcattcaccgacaatagagacggcaaaacctacaagaccgtcaaaattggcgagcaggtttggatggcagaaaatttgaacatcgatttgccaaactcaaagtgctatgacaactacccagccaactgcgaaaaatacggcagattatataattgggaaacggctatgaaagcctgtccagacggttggcatttgccgagcagagaggaatgggaagtantcgtgccgatctga

SEQ ID NO: 30394 - protein, 102 aa, Unknown
  Obtained from environmental sample
  SIGNAL (1)...(21)
  misc_feature (1)..(102): Xaa is any amino acid
MRKIITKAIALLIAFSTVTLAQEKGSFTDNRDGKTYKTVKIGEQVWMAENLNIDLPNSKCYDNYPANCEKYGRLYNWETAMKACPDGWHLPSREEWEVXVPI

SEQ ID NO: 30395 - DNA, 303 bp, Unknown
  Obtained from environmental sample
  misc_feature (1)..(303): n is a, c, g, or t
ttgggcttgtctgctataacggaaacgcacgatgaaaacgaggtgaagtccgctcttgaagcaaaagccagaataataggcgtgaacaaccgcgatttgaaaacttttgaagttgatattgaaaccagcgtaaaactgcgtaaattggtcccggacaatgttctgtttgtgtcggaaagcggcataagaacaagagaggatattctgcgtttaggcagggtgaacgcggtgttaataggcgaaacacttatgcgaagcggggataagaaagcgaagataaaatccctgctcacctctggctaa

SEQ ID NO: 30396 - protein, 100 aa, Unknown
  Obtained from environmental sample
  DOMAIN (1)...(96): Indole-3-glycerol phosphate synthase
  misc_feature (1)..(100): Xaa is any amino acid
MGLSAITETHDENEVKSALEAKARIIGVNNRDLKTFEVDIETSVKLRKLVPDNVLFVSESGIRTREDILRLGRVNAVLIGETLMRSGDKKAKIKSLLTSG

SEQ ID NO: 30397 - DNA, 774 bp, Unknown
  Obtained from environmental sample
  misc_feature (1)..(774): n is a, c, g, or t
atgagtagaatagaaaatgcttttaaaaacggcaaagcttttatagcctttctaactggcggagacccaagccttgagaaaagcgaagagtttattttagaagcggaaaaagctggagcggatttaatagaaataggagttcctttttccgaccctatagcggaaggtgaggtgattcaagcggctaatataagagcgttgacaaacggtacaactatgcacgatttatttgaacttgcatggaaagttaggcaaaaaagcgaaattcctctggtatttttaacttacctcaacccagttcatcactatggctacggaaaatttttcgcaaaatgcaatgaggttggagttgatgggataataattccagatttgccctttgaagaacagagggaactaaaaaccgaagcggaacactacggcgtaaatttaatttcgcttatagctccaacttccaaagagcggattgaaaaaatagcgaaagagggcaaaggattcctctacattgtatcttctatgggtgttaccggagtgcgaagcgaaattgacacggatatatccgctattgtgaacgcggcaaaggccgttagcaaaacgccatgcgctgtgggctttggcatcaacacgccagagcaagccgccaagtttgcggaaattgcagacggagttattgtgggcagcgccattgtgaggattatagcagagcacggggaaaatgctggcaagcatatttacgaatatgttaaacagatgaaagaagtgattactcgctaa

SEQ ID NO: 30398 - protein, 257 aa, Unknown
  Obtained from environmental sample
  DOMAIN (8)...(256): Tryptophan synthase alpha chain
  misc_feature (1)..(257): Xaa is any amino acid
MSRIENAFKNGKAFIAFLTGGDPSLEKSEEFILEAEKAGADLIEIGVPFSDPIAEGEVIQAANIRALTNGTTMHDLFELAWKVRQKSEIPLVFLTYLNPVHHYGYGKFFAKCNEVGVDGIIIPDLPFEEQRELKTEAEHYGVNLISLIAPTSKERIEKIAKEGKGFLYIVSSMGVTGVRSEIDTDISAIVNAAKAVSKTPCAVGFGINTPEQAAKFAEIADGVIVGSAIVRIIAEHGENAGKHIYEYVKQMKEVITR

SEQ ID NO: 30399 - DNA, 528 bp, Unknown
  Obtained from environmental sample
  misc_feature (1)..(528): n is a, c, g, or t
gtggcggctgatcgatcccagctcaagctagaaaagtatagagatgggaaaaaaatatatgcgaacagtcctaaaaataaaaatgaatatttttacgcagcagatacttctataaaatataacgaagaagaagaggaaagaattccctatgtatgggacatagcggcgggacctccaataacgcagagtgatgatccggcggagactgtttcagtgccttcgcgtttgctcaggaagggagagaagttttatgcggcaagtgtccggggcggttcaatgtctgaggctggtataagagacggagaccttgtgcttatccgctatgctgacgtacctaaagacggcgcgatacaggtagtacgttataaagataagtcaacgctcaagcggctgcgtgaaaccgagaaaggctgggaactgcattacgaagacggcagcggacgcgtaattagcggggattccgccgattacgaagtgcagggggaattcattgcggtactggcggtagccgctaattttaaggattaa

SEQ ID NO: 30400 - protein, 175 aa, Unknown
  Obtained from environmental sample
  DOMAIN (87)...(153): Peptidase S24-like
  misc_feature (1)..(175): Xaa is any amino acid
MAADRSQLKLEKYRDGKKIYANSPKNKNEYFYAADTSIKYNEEEEERIPYVWDIAAGPPITQSDDPAETVSVPSRLLRKGEKFYAASVRGGSMSEAGIRDGDLVLIRYADVPKDGAIQVVRYKDKSTLKRLRETEKGWELHYEDGSGRVISGDSADYEVQGEFIAVLAVAANFKD

SEQ ID NO: 30401 - DNA, 1428 bp, Unknown
  Obtained from environmental sample
  misc_feature (1)..(1428): n is a, c, g, or t
atggccatagggttctacaatgtcgagaatctctttgacttcaatcttgacgggacggagtacgacgagttcaagccggggtggcacgggtggagcgcggagatgcagaaaaagcggttgaacagcgccgcgcaagttgtcgcggccgtcggcgccgacgttatggggctctgcgagatcgagaacaagaacgccttgcgggaattgggctcggcgcttgacaacatgggaatgccgtatccgtacgccgcggcggcggacgcgggaggcggggctactactacggctctgctgtctaaatttcccatcgttgagaaacgggacttacctgtgagcggctcgcgctctatccttgaagcggccgtcgcgcgcggcggcgacacgctgcgcttcttcgtcaaccactggccctccaagcggcacccggagtcggcgcgggcggcggcggcgcaaacgctgcggcggcggttagacagcttgcaagcgggcgccgactacgtcgtaatcggcgacttcaactccaattacgacgagtacgcctctttccgctcctccggacacgacgacacgcggggggaaaccggcatcaaccacacgatgaaaaccgtcgtagcgggcgctcgccccgggtcgcccgcgagattcgtctgcgcccgcgaactgccgtcctgcggcggctgccactacaacccgtggctcgacgtggaggagagctcacgtatgagctacgtctacaggggcgccaagaataccatcgacaatatgctactgccggcggcgctcttcgacaccgccggatactcgtacttgcccggttctttccgcgccttcacctgggagggacggctgatgagggacggcgcgccgtaccgctggcaaatgtactacaagggaaaggagaagtaccacaagggcgagggttactccgaccatctcccgataatcgcccgcttggcgagatctaagctcctgtcagacagtatcaactgcgccgacgttaatcccactctggcgataggcgatttcgcggcttcaaccgatggctggttaagcggcgacagccgcttctccgtggaacgagacggcaaacacgccaaaacaggttcccacagcctacgaataagcggcctccatgagtcggaaaaccgcacggcggcaagagcgacgctaacctccacgccgtctcaaaaattcctgacgctgaacatccgcggcgagggcaaactctcaatacgcctaagacgtccaaatgaaaaatggagctaccacaacgcccctgatttcggcgcaaaaaaaaccgccaagtacaacgcttggaaatcggagcgctggaccgccctcaaactgccgctgccgcctgtcaataacaataacggcaatgaaatagacgtgaaatccgagccggcaaggggaactcggccgatctga

SEQ ID NO: 30402 - protein, 475 aa, Unknown
  Obtained from environmental sample
  DOMAIN (1)...(318): Endonuclease/Exonuclease/phosphatase family
  misc_feature (1)..(475): Xaa is any amino acid
MAIGFYNVENLFDFNLDGTEYDEFKPGWHGWSAEMQKKRLNSAAQVVAAVGADVMGLCEIENKNALRELGSALDNMGMPYPYAAAADAGGGATTTALLSKFPIVEKRDLPVSGSRSILEAAVARGGDTLRFFVNHWPSKRHPESARAAAAQTLRRRLDSLQAGADYVVIGDFNSNYDEYASFRSSGHDDTRGETGINHTMKTVVAGARPGSPARFVCARELPSCGGCHYNPWLDVEESSRMSYVYRGAKNTIDNMLLPAALFDTAGYSYLPGSFRAFTWEGRLMRDGAPYRWQMYYKGKEKYHKGEGYSDHLPIIARLARSKLLSDSINCADVNPTLAIGDFAASTDGWLSGDSRFSVERDGKHAKTGSHSLRISGLHESENRTAARATLTSTPSQKFLTLNIRGEGKLSIRLRRPNEKWSYHNAPDFGAKKTAKYNAWKSERWTALKLPLPPVNNNNGNEIDVKSEPARGTRPI

SEQ ID NO: 30403 - DNA, 870 bp, Unknown
  Obtained from environmental sample
  misc_feature (1)..(870): n is a, c, g, or t
gtggccttccccaaacctggattcacggcgcgtccgcccaacgacaggcacaccgccagtatccagatctatgacagcctcggcgaaaagcacagcgtcatgatcacctacgaactggcggccggcactaacgaatggaactactacgtgtgggcgccagacactacccctccgacgtccctgcctccaacgggcacggcctggggcgatgttgaaatgtatcccactgtagtagccggtcatcccaccgtcatcacgaagggagtcctgcaattcaacacaaacggcactctggacaccattgatgacgaggcccttaaggcggccaccatcaccacaggccccgacaggataaacccaagtttccaagttagctggaacaacggcgcggccgcgcagcccatcgagtgggtgattgacaccgcccccggagcgccaaacccggtcttcacactgacacagacggccacaccgcccgggaccagcaacagctcgcagaacggctacggcgccggcaccatcaagggcctcaccgttgaccagaacggtttcatcatcggcacattcaccaacggccagacatacgccatcgcccgcgtcgccctctcgatattcaccaacaacaacggcctcgaaaagtgcggcgacaacatctggaaggagacctacgccagcggccccgccaacgtgggatgcgccaacgacgtcggccgcggctcggtgcttggctcgcaccttgagatgtccaacgtggacgtcgccgacgagttcacgcgcctcataatcacccagcgcggctaccaagccaacagccgcatagtcaccacctcggacgaaatgatgcaagaaacgctgaacctcaagcggtaa

SEQ ID NO: 30404 - protein, 289 aa, Unknown
  Obtained from environmental sample
  DOMAIN (10)...(169): Flagellar basal body protein FlaE
  misc_feature (1)..(289): Xaa is any amino acid
MAFPKPGFTARPPNDRHTASIQIYDSLGEKHSVMITYELAAGTNEWNYYVWAPDTTPPTSLPPTGTAWGDVEMYPTVVAGHPTVITKGVLQFNTNGTLDTIDDEALKAATITTGPDRINPSFQVSWNNGAAAQPIEWVIDTAPGAPNPVFTLTQTATPPGTSNSSQNGYGAGTIKGLTVDQNGFIIGTFTNGQTYAIARVALSIFTNNNGLEKCGDNIWKETYASGPANVGCANDVGRGSVLGSHLEMSNVDVADEFTRLIITQRGYQANSRIVTTSDEMMQETLNLKR

SEQ ID NO: 30405 - DNA, 513 bp, Unknown
  Obtained from environmental sample
  misc_feature (1)..(513): n is a, c, g, or t
gtgttccttgacgaatctggggcgaagacgaacatgaccaggctgtacgggaggtcgcccaagggcaagcgctgtttctgcaaggcccccgacggccgctgggagcgggtgacgatgctttcggcgataaggctggacggctcggtcgagagcatcgtgttcgagggcgcaacggacagggccgcattcgacgagtacataataggcacgctcgcccccacgctgaggccgggggagatacttgtcctggacaacttgagcgtccacaagtcccccgccatgcaggaggcggtcgaggctcgcggcgccgaggtcaggttcctgccggcctacagccccgacatgaacccgatagagaagatgtggagcaaggtgaaggccgccctgcgcaagattgaggcgaggaccaacgaggagcttttcgatgcgattggggtggctttggcgacggtcacggcgagcgacgcgaaagggtggttcgagtcatgtggatatatggcatctcaaagttaa

SEQ ID NO: 30406 - protein, 170 aa, Unknown
  Obtained from environmental sample
  misc_feature (1)..(170): Xaa is any amino acid
MFLDESGAKTNMTRLYGRSPKGKRCFCKAPDGRWERVTMLSAIRLDGSVESIVFEGATDRAAFDEYIIGTLAPTLRPGEILVLDNLSVHKSPAMQEAVEARGAEVRFLPAYSPDMNPIEKMWSKVKAALRKIEARTNEELFDAIGVALATVTASDAKGWFESCGYMASQS

SEQ ID NO: 30407 - DNA, 429 bp, Unknown
  Obtained from environmental sample
  misc_feature (1)..(429): n is a, c, g, or t
gtggacgctcaagttgtccaggacaagtatctcccccggcctcagcgtgggggcgagcgtgcctattatgtactcgtcgaatgcggccctgtccgttgcgccctcgaacacgatgctctcgaccgagccgtccagccttatcgccgaaagcatcgtcacccgctcccagcggccgtcgggggccttgcagaaacagcgcttgcccttgggcgacctcccgtacagcctggtcatgttcgtcttcgccccagattcgtcaaggaacacgagcctgtccgcaggaacttccgcttggaacttggcccactcgcgccgcttttcttggacgtcccccctgtcttgctcgcttgcccgcagcgtttttttttagggtgtagcccagccccgccacgatcttgcacatcgcggcaagcgagcactgcttcttga

SEQ ID NO: 30408 - protein, 142 aa, Unknown
  Obtained from environmental sample
  misc_feature (1)..(142): Xaa is any amino acid
MDAQVVQDKYLPRPQRGGERAYYVLVECGPVRCALEHDALDRAVQPYRRKHRHPLPAAVGGLAETALALGRPPVQPGHVRLRPRFVKEHEPVRRNFRLELGPLAPLFLDVPPVLLACPQRFFLGCSPAPPRSCTSRQASTAS

SEQ ID NO: 30409 - DNA, 366 bp, Unknown
  Obtained from environmental sample
  misc_feature (1)..(366): n is a, c, g, or t
atggagaaagtgtttaatgtttttcccaggttaaaagaacgcatacgccaggttgcgggaacgctttcaggcggtgaacagcagatgctggctatgggacgcgcgctgatggcaagtccacgtctgctgctccttgacgaaccgtcaatgggccttgcccccatccttgtcgatgagatcttctcggttgtcaagaggattaatgaaacaggaacaacggttctgcttgttgagcaaaacgcttacaaggcccttgcgcttgcgtcgcgcgcgtatatccttgagaccggggagattgttaaaagcggcatgacgcctgagttaatgaatgatgaagcggtaaaggccgcctatttaggaggatga

SEQ ID NO: 30410 - protein, 121 aa, Unknown
  Obtained from environmental sample
  DOMAIN (1)...(97): ABC transporter
  misc_feature (1)..(121): Xaa is any amino acid
MEKVFNVFPRLKERIRQVAGTLSGGEQQMLAMGRALMASPRLLLLDEPSMGLAPILVDEIFSVVKRINETGTTVLLVEQNAYKALALASRAYILETGEIVKSGMTPELMNDEAVKAAYLGG

SEQ ID NO: 30411 - DNA, 495 bp, Unknown
  Obtained from environmental sample
  misc_feature (1)..(495): n is a, c, g, or t
atgaaagtatccaaaattatgactcggaatcctgttattacccatcccgatctttctatgaccgacgcgcgttcgctgatggacagggaaaaagtcggccacatacctgtactaaataaaaatatggagcttgtgggacttgtcaccagggccgatctattgaaggctggcccttcatccgcgaccagtcttgacgtgtacgagatcagctatctgctttcaaaactcacggtggaaaaggtgatggaaaagaacgtgatcaccgttcaggaaaacgaagttgtggaagaggcagccaggatcatggcggacaacagtattggctgtctgcctgtattgaacggctcccttttaaccggtattattacagacactgacattttccatttttttattaacgcttacggagcgcgccacaagggtgttcgtataacgattaatttcacgaaaagacccggccagttcgcggcgtttgccggcgcgcatagccgataa

SEQ ID NO: 30412 - protein, 164 aa, Unknown
  Obtained from environmental sample
  DOMAIN (5)...(132): CBS domain pair
  misc_feature (1)..(164): Xaa is any amino acid
MKVSKIMTRNPVITHPDLSMTDARSLMDREKVGHIPVLNKNMELVGLVTRADLLKAGPSSATSLDVYEISYLLSKLTVEKVMEKNVITVQENEVVEEAARIMADNSIGCLPVLNGSLLTGIITDTDIFHFFINAYGARHKGVRITINFTKRPGQFAAFAGAHSR

SEQ ID NO: 30413 - DNA, 1002 bp, Unknown
  Obtained from environmental sample
  misc_feature (1)..(1002): n is a, c, g, or t
atgaaatttaagtttttgttggttttaacggtgtttttttattgtgaagctttattatttccattagggaataaacaacctgatcctgttgcagatttagtattgattgcggattatataccttttcacagttctaaacttgcgtcattagaaaaaaagcccgcgttttctctgaccggcgatttaccggtattggacggagctacggccttatttcccgtttacgcgtcctttgtacaggcagtgtatccgaaagatgaatttaacaaaatatataaggatagggataaatttgatttagagcagagaaataaaataggaaccggttttgtaagatgtacgacaacgcctaacgcgtatagaagcctgataaacagagaagtggatattatattttgcatggaaccgtcaaaagagcaggttaatgaagcggaaagaaaaggtttaaaattaaatatgactcctattggcaaagacgcgtttgtatttattgtaaatattgataatcccataaataatattacgtccgatcaaataagaaagatatattcaggcgagattacaaattggaaagagataggcggaaaagatgaagaaattatcgcgtatcagcgcaataaagacagcggcagtcaaacgcttctagaatcaatcatgggcgaaacgcctataatggaccctccgctcgctcatgccattggaacgatgagcagggtaataacggcggtatccgcgtataataattatcctaacgcgataggttattcatttttattttatacaacggaaatggtaaaaaacaaaaaaataaaacttttgtctatagacggagtaatgccctcaagagaaaccattatatccggcaaatatattttttccaacaccttttacgcgataacaaccggaaatgaaaaagaaaacgcaaaanaactaattaactggatattatccccggaagggcagtatctggtagaaaaaaccggttatgtgccgattaaataa

SEQ ID NO: 30414 - protein, 333 aa, Unknown
  Obtained from environmental sample
  SIGNAL (1)...(17)
  misc_feature (1)..(333): Xaa is any amino acid
MKFKFLLVLTVFFYCEALLFPLGNKQPDPVADLVLIADYIPFHSSKLASLEKKPAFSLTGDLPVLDGATALFPVYASFVQAVYPKDEFNKIYKDRDKFDLEQRNKIGTGFVRCTTTPNAYRSLINREVDIIFCMEPSKEQVNEAERKGLKLNMTPIGKDAFVFIVNIDNPINNITSDQIRKIYSGEITNWKEIGGKDEEIIAYQRNKDSGSQTLLESIMGETPIMDPPLAHAIGTMSRVITAVSAYNNYPNAIGYSFLFYTTEMVKNKKIKLLSIDGVMPSRETIISGKYIFSNTFYAITTGNEKENAKXLINWILSPEGQYLVEKTGYVPIK

SEQ ID NO: 30415 - DNA, 1293 bp, Unknown
  Obtained from environmental sample
  misc_feature (1)..(1293): n is a, c, g, or t
ttgcacgaaggggtaatgcaataccataccgacatcgggcttgtccccgatgttttttcaagggaaacgcttgaaaaactgggaaagggcaatatggcggtaggacacgtccgctattccacaacggggcagaaaagcagggtaaacgcccagccgcttgtcgtaatgcacataaaaggcagcatggctatcgcgcataacggaaacataacaaacgcctcggatctccgcgagaaacttgagttggacggggcgctgtttcattccaccaacgacacggaaataatcctgcacataattaccaagaagaggatacagtcgccgtctattgaaaccgccattgaacaggcaatgtacgagatacagggcgcttattcccttgtgataatgtcgccaagcaagctgatagcggtgcgcgatcctagcgggttccgccctttgagcatggggtctttggggggtgacatcgtattcgcgtcggaatcctgcgcttttgacagtatcggggcggagtttatacgcgacatagaaccaggagaaatcgttatagttgacaacgacgggccgcgcagcattaaaacccactgcggaaagtccggcggaatgtgcgtttttgagtttatttatttcgcgcgccccgattcaattattgagggggcgagcgtccacaccgcgcggcagagggcgggcgcgtttcttgcccttgaacaccctgtccaggcggacgttgtcatcggggtgccggattccggccttgacgccgctttgggctattcgcgccagtcgggcataccttacggggtgggttttataaaaaaccgctacataggcagaacgtttatccagccttcccaggaagagcgcgaccgttccgtacgcataaaactgaacacaatagaggctacaattaaaggaatgcgcgttgttttaatagacgactctatcgtgcgcggaactacaatgagaagaatagtgaaccttgtgcgcgaatcgggagcgaaagaagtccacttgcggatttcatccccgccgtttgtaaacccctgctatttcggcactgatattgacagcagagaaaaccttatcgcctgcaagatgagcataccggagatccgcgattatcttggcgcggacagccttggttaccttcctgtagacaacgtgacaaaaatagcgcagaacgcgaaatgcaatttttgcagcgggtgtttcagcgggaaatatcccgtgcctgaaccatcgcctgtcgcaaaaaataaatttgaaaataaaatcggcagggttgttaattaa

SEQ ID NO: 30416 - protein, 430 aa, Unknown
  Obtained from environmental sample
  DOMAIN (214)...(356): Phosphoribosyl transferase domain
  misc_feature (1)..(430): Xaa is any amino acid
MHEGVMQYHTDIGLVPDVFSRETLEKLGKGNMAVGHVRYSTTGQKSRVNAQPLVVMHIKGSMAIAHNGNITNASDLREKLELDGALFHSTNDTEIILHIITKKRIQSPSIETAIEQAMYEIQGAYSLVIMSPSKLIAVRDPSGFRPLSMGSLGGDIVFASESCAFDSIGAEFIRDIEPGEIVIVDNDGPRSIKTHCGKSGGMCVFEFIYFARPDSIIEGASVHTARQRAGAFLALEHPVQADVVIGVPDSGLDAALGYSRQSGIPYGVGFIKNRYIGRTFIQPSQEERDRSVRIKLNTIEATIKGMRVVLIDDSIVRGTTMRRIVNLVRESGAKEVHLRISSPPFVNPCYFGTDIDSRENLIACKMSIPEIRDYLGADSLGYLPVDNVTKIAQNAKCNFCSGCFSGKYPVPEPSPVAKNKFENKIGRVVN

SEQ ID NO: 30417 - DNA, 510 bp, Unknown
  Obtained from environmental sample
  misc_feature (1)..(510): n is a, c, g, or t
ttgttaatgacgacaacgaaacctccggctgggtcccgaaagagaatattattatttactaacttactaaaggggaattatatgaattttggtgatattttggacaagtgggaaaaacagcggccttccggcggcgattctcccgatgaggctattcaggccaaagatacagaagaaaaaaccaaacaggccggcgcgcaggaaaaacgccgccgcctgcgcaacaaaaaacccgatgcggaactggacatacacggtcaaacccgtgatgaggcatggctgacattggaaacattttttaacaacgcgcgggaaaaagaatttgaaaaagttcttatcatccacggcaaggggaatcattcggcggacgaaccggtgctaaaacgggttgttatggactttattgagcgttgtccgttcgcgggggaaagcggcaagggaaaagccgccgcaggcggggaaggcgcgacatgggtgttattaaaagaattgaaaaaagaaattgcctag

SEQ ID NO: 30418 - protein, 169 aa, Unknown
  Obtained from environmental sample
  DOMAIN (82)...(162): Smr domain
  misc_feature (1)..(169): Xaa is any amino acid
MLMTTTKPPAGSRKRILLFTNLLKGNYMNFGDILDKWEKQRPSGGDSPDEAIQAKDTEEKTKQAGAQEKRRRLRNKKPDAELDIHGQTRDEAWLTLETFFNNAREKEFEKVLIIHGKGNHSADEPVLKRVVMDFIERCPFAGESGKGKAAAGGEGATWVLLKELKKEIA

SEQ ID NO: 30419 - DNA, 495 bp, Unknown
  Obtained from environmental sample
  misc_feature (1)..(495): n is a, c, g, or t
gtgtgttataacaagatgggttttggagaaatacttgaccggtgggataaatatgccggatcgtctggtaaaattggatcatccggcaaagctgcaccggtttacgataaagacgcagattttgcttcggggctcgacttttctgagaccgaatcatccgcttcccggcgcagacggctgctccgtaaacggcccgaggattccatagacctccacggccttaccagggatgaagcctggaatgccctgacctccttttttaacgatgcaaaaaacagggccttggaaaaagtgctgatcattcatggcaagggtaatcatgccctggaaacgggtacgttgaaaaaaatggtccgggaatttattgaacgctgtccctttgcgggtgaaagcggctacagcagcgccaattccggcggtaccggatcaacctgggtattgttaaaaaaaagcggtaattcatangatgccttgacagttttcttccgtaactga

SEQ ID NO: 30420 - protein, 164 aa, Unknown
  Obtained from environmental sample
  DOMAIN (69)...(149): Smr domain
  misc_feature (1)..(164): Xaa is any amino acid
MCYNKMGFGEILDRWDKYAGSSGKIGSSGKAAPVYDKDADFASGLDFSETESSASRRRRLLRKRPEDSIDLHGLTRDEAWNALTSFFNDAKNRALEKVLIIHGKGNHALETGTLKKMVREFIERCPFAGESGYSSANSGGTGSTWVLLKKSGNSXDALTVFFRN

SEQ ID NO: 30421 - DNA, 318 bp, Unknown
  Obtained from environmental sample
  misc_feature (1)..(318): n is a, c, g, or t
atgaatccactagcgatcgaattgaacgaggtgctggataaatgccccgccggcttctttttgtctgccttgggacggcggcttttctttccccggggtatcattgcccagtctgcagaggcaaaaaaaaccgcanaaataaacgccactttggggatggccttttccggaggaaaacccctagtgctttcttctctgcaaaaacagttttccagtctgacgccggaagaaatggtggtttatgcccccacagcggggagtagaagtattcccgtcaacctggaaaacagctctggtaaagaaaaaccctttctttaa

SEQ ID NO: 30422 - protein, 105 aa, Unknown
  Obtained from environmental sample
  misc_feature (1)..(105): Xaa is any amino acid
MNPLAIELNEVLDKCPAGFFLSALGRRLFFPRGIIAQSAEAKKTAXINATLGMAFSGGKPLVLSSLQKQFSSLTPEEMVVYAPTAGSRSIPVNLENSSGKEKPFL

SEQ ID NO: 30423 - DNA, 666 bp, Unknown
  Obtained from environmental sample
  misc_feature (1)..(666): n is a, c, g, or t
atggcgagtatcccaatccatcatctcagcgatctgaagattgccggagttttttcaaaagacgagtttgaggggcgcacggttttggtaaagaagctaaaaatgctgccgtttgaatttatcgtcaggggatatatgttcggcaatatgtgggaggcttattccaaaggccaggaattctgcggtcaaaagatcgagggcaattacaaacttgcagagaaactggctgtcccgctttttaccccttccacaaaagcgcgtgttgggcatgacgagtatattcctgttcatcaagttacggacgcgattggcgcggaactggcagccaggatagaaaaggtttgccttaagatttacaacgactgctacaactacgcttacaacaagaacataattatcgccgatacgaaatttgaattcggccttgatgcgaacaacagcctcctggtcgcggacgaaattcttacgccggattcaagcaggttctggagccttccggattataaggcgggggtttctccaaaaagttacgacaagcaattggtaagggactggcttacggaaaataaaataaacggcgagatgcagtttgacaacgtgagcgacgatgttttgaaaaaaacgtcagagatctacgcggaatgccttcgaaaaataaccggataa

SEQ ID NO: 30424 - protein, 221 aa, Unknown
  Obtained from environmental sample
  DOMAIN (1)...(204): SAICAR synthetase
  misc_feature (1)..(221): Xaa is any amino acid
MASIPIHHLSDLKIAGVFSKDEFEGRTVLVKKLKMLPFEFIVRGYMFGNMWEAYSKGQEFCGQKIEGNYKLAEKLAVPLFTPSTKARVGHDEYIPVHQVTDAIGAELAARIEKVCLKIYNDCYNYAYNKNIIIADTKFEFGLDANNSLLVADEILTPDSSRFWSLPDYKAGVSPKSYDKQLVRDWLTENKINGEMQFDNVSDDVLKKTSEIYAECLRKITG

SEQ ID NO: 30425 - DNA, 432 bp, Unknown
  Obtained from environmental sample
  misc_feature (1)..(432): n is a, c, g, or t
gtgaaaagggtttatgtaaacgagaaatggtgcctgggctgccatttgtgcgaatactactgcgcttttgccgatacagccgaaagcgatatggcgcgcgctttgaaaggcataaaaatacgtccgagaattcatatcgagaaaaaagacggcatcagtttcgctgtttcctgccggcactgcaaggagccgtattgcgtcaagggctgcattactggcgctttgacaatcaaggacggcgtaattacaattaacagtgataaatgtgttagctgctatacctgcattttaagctgcccgtacggagcggtgtccccttcagacgacggcgcggtgcaaaaatgcgaactgtgtaccagtactgttacaggaactcccgcctgtgtcaagggctgcccgaacaacgcaattgtttttgaggaaagagggtga

SEQ ID NO: 30426 - protein, 143 aa, Unknown
  Obtained from environmental sample
  DOMAIN (82)...(105): 4Fe-4S binding domain
  misc_feature (1)..(143): Xaa is any amino acid
MKRVYVNEKWCLGCHLCEYYCAFADTAESDMARALKGIKIRPRIHIEKKDGISFAVSCRHCKEPYCVKGCITGALTIKDGVITINSDKCVSCYTCILSCPYGAVSPSDDGAVQKCELCTSTVTGTPACVKGCPNNAIVFEERG

SEQ ID NO: 30427 - DNA, 600 bp, Unknown
  Obtained from environmental sample
  misc_feature (1)..(600): n is a, c, g, or t
gtgtcaagggctgcccgaacaacgcaattgtttttgaggaaagagggtgatgtgatgaagtatgttattatcggcaattcagcggcaggcgtaggagcggtagaaggtatccgtcaggttgacaagaacggagagattacagttatcaccaatgaaccgcaccatacatattcccgtccgcttatttcctatctcctgcttggcaaagttacagaagagggaatgaaataccgcggcaatgatttctatgcggataacaaatgtacattgatgcgaaatactaccgtaaccgggattgacgccgcagccgggaaggtgattttacaggacggcagcaagctcccctacgataaactgcttgtggctgcaggttcctcgccgtttgttcccccattcgaggggcttgatacagtaaaggaaaaatttactttcatgagtcttgatgatgcgaagaaacttgacgcgtgtcttgaacaaaacaagaaagtgctgattataggcgcggggctaatcggcttgaaatgcgcagaaggtattcacaagcgggtaaaacatataacggtgcttgatcttgcccctcgtattttgtccagtttctga

SEQ ID NO: 30428 - protein, 199 aa, Unknown
  Obtained from environmental sample
  DOMAIN (20)...(195): Pyridine nucleotide-disulphide oxidoreductase
  misc_feature (1)..(199): Xaa is any amino acid
MSRAARTTQLFLRKEGDVMKYVIIGNSAAGVGAVEGIRQVDKNGEITVITNEPHHTYSRPLISYLLLGKVTEEGMKYRGNDFYADNKCTLMRNTTVTGIDAAAGKVILQDGSKLPYDKLLVAAGSSPFVPPFEGLDTVKEKFTFMSLDDAKKLDACLEQNKKVLIIGAGLIGLKCAEGIHKRVKHITVLDLAPRILSSF

SEQ ID NO: 30429 - DNA, 753 bp, Unknown
  Obtained from environmental sample
  misc_feature (1)..(753): n is a, c, g, or t
atgcgtattattccagtagcaagcggaaagggaggtgtcggcaagtcccttgtcgcggcaaaccttggcgtggcttttgcgcaggcagggcagcgggtaatcctggctgatcttgaccttggagcctctaaccttcacctggttcttgggcatcaatctcccaaaacaggaatagggatgtttttgaacgataccaagtcggattttaacgaagttatcgtggatacggatgtgcgggggctcaggttcattccgggggatacggaaattccgggaaccgcgaatctaaagccctttcaattgaagtcccttgtaagacgcttgcttgcattaagtaatgaggcggatattcttatccttgacctgggtgcgggaacgcaccagtccatcctggattttttccttctttccgatcatggtatcgtggtttcggcgcctatggttaccgcagtacttaacgcctatgtgtttctcaagaataccgtgttccgcctgatgtttacgactttcagaaaaaatagtcccgctgccacttttctggaaaaaagccgaaaggacggttcgggccatcagaagctttacattcccaaaatgctggctgaaattaagaagatagatccggattcccatgaaaaatttatgaatcgcattaccaattttcatccccggcttattatgaacatgatagatgatccaaaggacgcggatgtggccatgaagatccgccgttcatgtgaagaatacctcgcctaa

SEQ ID NO: 30430 - protein, 250 aa, Unknown
  Obtained from environmental sample
  DOMAIN (4)...(203): CobQ/CobB/MinD/ParA nucleotide binding domain
  misc_feature (1)..(250): Xaa is any amino acid
MRIIPVASGKGGVGKSLVAANLGVAFAQAGQRVILADLDLGASNLHLVLGHQSPKTGIGMFLNDTKSDFNEVIVDTDVRGLRFIPGDTEIPGTANLKPFQLKSLVRRLLALSNEADILILDLGAGTHQSILDFFLLSDHGIVVSAPMVTAVLNAYVFLKNTVFRLMFTTFRKNSPAATFLEKSRKDGSGHQKLYIPKMLAEIKKIDPDSHEKFMNRITNFHPRLIMNMIDDPKDADVAMKIRRSCEEYLA

SEQ ID NO: 30431 - DNA, 342 bp, Unknown
  Obtained from environmental sample
  misc_feature (1)..(342): n is a, c, g, or t
atggtgaataatgtcccgatgcagggagacatcatcaagattgaccttaatcccaagcaagggcatgagcaaaagggttatcgtccttatatttgcctaagtcatcatcttgtaagtgattatgccaatatagctatttttgcaccaatttctaacaagaccaggcgatatcctctgtatattcctctcgaaaaaaccatatcatctggtgttgtattgcttgatcaactggtagcgattgattataacgctcgtcaatgggattatgtcgaaacggttagtcatgactttctggttgagttgctgaaaaaggttgtcgttatttttcagagcaacaattaa

SEQ ID NO: 30432 - protein, 113 aa, Unknown
  Obtained from environmental sample
  DOMAIN (7)...(110): PemK-like protein
  misc_feature (1)..(113): Xaa is any amino acid
MVNNVPMQGDIIKIDLNPKQGHEQKGYRPYICLSHHLVSDYANIAIFAPISNKTRRYPLYIPLEKTISSGVVLLDQLVAIDYNARQWDYVETVSHDFLVELLKKVVVIFQSNN

SEQ ID NO: 30433 - DNA, 837 bp, Unknown
  Obtained from environmental sample
  misc_feature (1)..(837): n is a, c, g, or t
ttgggcaagaccactctcgcacaggtagtggcgaacgaacttgaaacaggctttgttcagacatccgctcccgctctggacaagccgaaagatctggttgggcttttaacaaacctgaaaaaaggcgatgttttttttatagatgaaattcacaggctaaaacccgctatcgaggaattgctttatattgccatggaagactacggaattgactgggtagtagggcagggtccgatggcaagaaccttaagaatcgccattaatccgtttacgcttgtaggcgcgactaccaaggcgggaattgtttcaagcccgttgataagccgtttcggaattacctgccgtttttctttttacgaacaggaagacatggaagccatagtgcgccgttccgccgggcttttggatattaaaattcaaaacgacgccgcatctcttttagcaaagtcgtccaggggaactccccgcgtagtgaaccggcttttgcggcgcatgcgggatttcgcccagttttcgggagaaaaatcaattaccttgcctgtggtaagttccggactgtcgcggcttgagatagacgcgcttggacttgagaaacaggacagggatattcttaaaattataattgaacgttacaaaggcgggcctgtaggcgcggatacgcttgctatttccatcggtgaatccgtggaaactctggaagattattatgaaccataccttattcaagccggtcttttacagcgcagtccgcgcggaagaatggtaacaagtctcgcctacggccatttgggacttgcttctccctgcagcggaaacagcgaaggttcacttttttaa

SEQ ID NO: 30434 - protein, 278 aa, Unknown
  Obtained from environmental sample
  DOMAIN (2)...(171): ATPase family associated with various cellular activities (AAA)
  misc_feature (1)..(278): Xaa is any amino acid
MGKTTLAQVVANELETGFVQTSAPALDKPKDLVGLLTNLKKGDVFFIDEIHRLKPAIEELLYIAMEDYGIDWVVGQGPMARTLRIAINPFTLVGATTKAGIVSSPLISRFGITCRFSFYEQEDMEAIVRRSAGLLDIKIQNDAASLLAKSSRGTPRVVNRLLRRMRDFAQFSGEKSITLPVVSSGLSRLEIDALGLEKQDRDILKIIIERYKGGPVGADTLAISIGESVETLEDYYEPYLIQAGLLQRSPRGRMVTSLAYGHLGLASPCSGNSEGSLF

SEQ ID NO: 30435 - DNA, 579 bp, Unknown
  Obtained from environmental sample
  misc_feature (1)..(579): n is a, c, g, or t
ttgagcgcggaaaggattctgatcatcgaagatgatcctgaaatacaggaaatgcttaaattcgcttttgtccgcgaaggatggcagctaactatggtttcaacgggggaggaagggcttaaaaaacttcagagcaaggaagcggattgtgtaattctggacataatgcttccgggtatggacggccttaaaacccttaaaaaaatccgggaaaataaaaaccttcaaaacctgcccgtgatcctgtgtaccgcgcgcggcgaggaagccgatattatcgctggccttgaattgggagccgatgattatgttgtcaagccgtacagcccacgcgtgttggcggccaggatacgcgcgggcctaaggcggaaagaagccgcttcatcgcagggcgaagctacccaaaagaaatttttccagcatggaaaaatcagtctggacattgaccggcatacggttcttctggaagaaaagcccctcgatcttttccctaccgaattcgcgatccttgtccagtttatgagcaaccccgatattgtttttcacgacaaagactatcacagcctcggccgaatctga

SEQ ID NO: 30436 - protein, 192 aa, Unknown
  Obtained from environmental sample
  DOMAIN (4)...(118): Response regulator receiver domain
  misc_feature (1)..(192): Xaa is any amino acid
MSAERILIIEDDPEIQEMLKFAFVREGWQLTMVSTGEEGLKKLQSKEADCVILDIMLPGMDGLKTLKKIRENKNLQNLPVILCTARGEEADIIAGLELGADDYVVKPYSPRVLAARIRAGLRRKEAASSQGEATQKKFFQHGKISLDIDRHTVLLEEKPLDLFPTEFAILVQFMSNPDIVFHDKDYHSLGRI

SEQ ID NO: 30437 - DNA, 336 bp, Unknown
  Obtained from environmental sample
  misc_feature (1)..(336): n is a, c, g, or t
ttgtcaaaaatgccccctttccgttccgttgaaagaattgaacggatggtagaaaccgcgatacttatgcttaaagaggcgatttccgcttacctttcacaggacccggacgccgcgagaaaagccgcatcccttgatgaccaaatagatcaggaacataaagccctcaccgatgaagtgcttgaacttatcaaaaaacaaccgacttctgtaaaatccgccgcccgcctcctgcggctttcaggatatatggaacgcctgggagatcatattaccaatatctgcgaagggatcatttatatgatcgaaggcagtcatgaggaattaaacgattga

SEQ ID NO: 30438 - protein, 111 aa, Unknown
  Obtained from environmental sample
  DOMAIN (13)...(98): PhoU family
  misc_feature (1)..(111): Xaa is any amino acid
MSKMPPFRSVERIERMVETAILMLKEAISAYLSQDPDAARKAASLDDQIDQEHKALTDEVLELIKKQPTSVKSAARLLRLSGYMERLGDHITNICEGIIYMIEGSHEELND

SEQ ID NO: 30439 - DNA, 687 bp, Unknown
  Obtained from environmental sample
  misc_feature (1)..(687): n is a, c, g, or t
gtgtatccgcaagtcttcttcgccgtggcaatccgcggcgaccttgacgttaacgaagtaaaactcgcgtccgttcttaaagcaagcgaagtaagccttgccgcggataccgatgttacgcgacttaccaacgcgcctgtcggatttgccggtcctgtcggattaaaaagcttgcctgtcattatcgatcataccgttacgggaatgaatgacgccgtaacaggcgcgcttgcgaaagaccttcactacaaacacgccgcttacgggcgcgattttgaaggctggatgatcgaagacgtgcgtaccgtaaaagcgggagactcttgctcacagtgcggcggcgagttgtactcaaaaatgggaaatgagcttggacatattttcaagcttggatacaaatacacacgctcaatgaacgtaacctaccttgatgtaaacggaaaaacacaaatgcccgtaatgggctgttacggcatcggggttgaccgcactcttgcttccgtaattgaggaacaccacgatgacgcgggaatcatttggcctgtctctgtagctccttatcatgttatcattgttccgattaagtacgacggagaagtgaaagatgccgccgacaaacttgcaacggaactaacacaagcaggcatcgaattttgctggacgaccgcactgaacgcccccgcgtaa

SEQ ID NO: 30440 - protein, 228 aa, Unknown
  Obtained from environmental sample
  misc_feature (1)..(228): Xaa is any amino acid
MYPQVFFAVAIRGDLDVNEVKLASVLKASEVSLAADTDVTRLTNAPVGFAGPVGLKSLPVIIDHTVTGMNDAVTGALAKDLHYKHAAYGRDFEGWMIEDVRTVKAGDSCSQCGGELYSKMGNELGHIFKLGYKYTRSMNVTYLDVNGKTQMPVMGCYGIGVDRTLASVIEEHHDDAGIIWPVSVAPYHVIIVPIKYDGEVKDAADKLATELTQAGIEFCWTTALNAPA

SEQ ID NO: 30441 - DNA, 384 bp, Unknown
  Obtained from environmental sample
  misc_feature (1)..(384): n is a, c, g, or t
atgacttccgaatactggattcttttggtctttctctttttaggcgcattcatagccggtgctgctataatagtcggtaaaattttgggattctcttcaaatgatggcaaagctaagtacagagcctatgaatgtggcatggaagcctttggaaatgcgagggtgcagttcaaagttggatatgtggtttttgcccttatatttttggtgtttgatgttgaggctctgtttctttttccaatagcggtgcattggcgaggcgttgttgacggaacgcttggcattccggtttggctcgcttttgtggatttgggaatattctttgccattttgacagcagctcttgcttattcttggaaaaagggctggctcaggtgggaatga

SEQ ID NO: 30442 - protein, 127 aa, Unknown
  Obtained from environmental sample
  SIGNAL (1)...(21)
  DOMAIN (17)...(126): NADH-ubiquinone/plastoquinone oxidoreductase, chain 3
  misc_feature (1)..(127): Xaa is any amino acid
MTSEYWILLVFLFLGAFIAGAAIIVGKILGFSSNDGKAKYRAYECGMEAFGNARVQFKVGYVVFALIFLVFDVEALFLFPIAVHWRGVVDGTLGIPVWLAFVDLGIFFAILTAALAYSWKKGWLRWE

SEQ ID NO: 30443 - DNA, 1257 bp, Unknown
  Obtained from environmental sample
  misc_feature (1)..(1257): n is a, c, g, or t
ttgcgcgctatgggcatactttcggaggcgaatttgcaatcctatccgaagctccccgagagccgcgtgaacttcggggcggttatgtccgagaaggagaagctcttccgcatagccttcgacaatttttcggacgtgcccgattttaccaagttttgctccaaggaggcttggtggctcgacggctacgccctcttccgcgtcatcaagacgatgcacggggagaagccgtggtgggagtgggaggagtcgtacaagaagcgtgaaaagagcgtcctaaaagccgtgtccgaaaagttcgccgacgacctgcgctaccacaagttcctgcagtacctatttcatctgcaatggcagagggtccgcacgttcgccgcgaagcagggaatcaagctcataggcgacgtgccgttctacaccgcctacgacagctccgatacttggaccgaccccaagcagttcctcttcgacaaaaagctgaagccggtggaggtcgccggagtgccgccggattacttcagcgagaccgggcagctttggggcaacccgctgtacaagtgggacacgatgaagacggacggctacgtttggtggtgccgccgcataaagaagaccctggaatttgccgactacgtccgcatagaccacttccgggcgtttgacagctattgggcgatcccctacgggaacacgacggccgtggacggcaagtggcgcaaaggccccgggaagcgcttcttcgaggtcataaaggagagtctcggcgattttccgctcatagcggaggacctgggcgacatcacggacaacgtcataaaactgcgcgacgcgataggcgctcccggaatgaagatactccagttcgccttcgactccagcccggacaacccgtatctgccctacaacataccgaaggatagcgtgacctacaccggtacgcacgacaacgacacggcgctgggatggttctctacgctgcccctcgccgacaagaagagggtttgcgcctacttgggctgctacactacggaagataagtttttggaagcgttcatacgctgcgcccttgcctcgccgtcgtggctgtgcgttatcccgatacaagacgtattggctttgggctccaaacacagaatgaacacgcccgggacgatgctcgggaactggcagtggcggatgacgcagaagatgccgatttacgaaaaattggaggcttttgccgagttgacgcagatttacggcagagccagaaattag

SEQ ID NO: 30444 - protein, 418 aa, Unknown
  Obtained from environmental sample
  DOMAIN (2)...(413): 4-alpha-glucanotransferase
  misc_feature (1)..(418): Xaa is any amino acid
MRAMGILSEANLQSYPKLPESRVNFGAVMSEKEKLFRIAFDNFSDVPDFTKFCSKEAWWLDGYALFRVIKTMHGEKPWWEWEESYKKREKSVLKAVSEKFADDLRYHKFLQYLFHLQWQRVRTFAAKQGIKLIGDVPFYTAYDSSDTWTDPKQFLFDKKLKPVEVAGVPPDYFSETGQLWGNPLYKWDTMKTDGYVWWCRRIKKTLEFADYVRIDHFRAFDSYWAIPYGNTTAVDGKWRKGPGKRFFEVIKESLGDFPLIAEDLGDITDNVIKLRDAIGAPGMKILQFAFDSSPDNPYLPYNIPKDSVTYTGTHDNDTALGWFSTLPLADKKRVCAYLGCYTTEDKFLEAFIRCALASPSWLCVIPIQDVLALGSKHRMNTPGTMLGNWQWRMTQKMPIYEKLEAFAELTQIYGRARN

SEQ ID NO: 30445 - DNA, 1371 bp, Unknown
  Obtained from environmental sample
  misc_feature (1)..(1371): n is a, c, g, or t
atggtcactgacttaatgggtataggtgagctttccggtttaatgaaagcccgccatatttcatttacgcctaacagcggtttctcctcagtagctattgattcccgcgccgttaaagaaggcgcccttttcttcgcccttaccggttcttccaatgacggacataagtttgttaattccgcctttgcttccggcgcaaagggagccgttgtcgcttcttcaaaactggatcaatttgatttgataaacgccgcccaaaaagcgggtaaagacttaattgtagttgaaaatacgctgaaaggcttacaggacgccgcaagggtctaccttgaaaaattccccaatcttaaaaaagtcgggataacaggctcgtccggaaaaaccacgacaaaagaaattaccgcggcgattatttcgtgcgaaaaaaatacggttatgaacaaggggaatcttaattccgagacggggcttccgttatctgtttttgaagtccgctccgaacatgaagttggagtttttgagcttggaatgaacaggcccaatgaaatattggaaatcgccgaagttcttaaaccaaacatcgcgtcaattacaaacataggttccgcgcatatcgagtttttcggcagtaaatctaaaatagttaacgaaaaaaaatgcatatttaaatttttaaaagacggcgatatagccctaattccacagaatgacgagtatgcgaaagagatggcggaaggcgttacgggaaaagttaaattttacagtcaggataattttaaggaatttgaaggttgcagaagtcttgggttggaagggactgaaattatttgggcgggggaaaaagttcattttgcccttcccgggaaacacagtcttgatgacgcgattgccgccatcgcgatagcgaaggagattccggtttcagataacgcgattatccgggggcttgaattggttaagccgctttttggaaggcttgaaatattaaatggaaagcgggcgaccgtaatccgcgattgttacaacgccaatccagagtctgcggcaaagagcgttgaattctgcgattcgcttgaatggccgggaagaaaagtttacgtaatcgcggacatgcttgaattgggcggcagttccgtatctgaacatgaaaaattgggatttaatttatcagtgtcgtctgcaagaaaagtttttctgtttggcaatgaaataaaagccgccgtacgcaacatggaagataacggcaaatcattcttttattcaagcgatataaatgagctttccaccgcaattgacggttatgtgaaaaaaggggaccttgtgctgcttaaaggttcgcggggttgcgctctgaaaggtaagcgaaagtaa

SEQ ID NO: 30446 - protein, 456 aa, Unknown
  Obtained from environmental sample
  DOMAIN (322)...(408): Mur ligase family, glutamate ligase domain
  misc_feature (1)..(456): Xaa is any amino acid
MVTDLMGIGELSGLMKARHISFTPNSGFSSVAIDSRAVKEGALFFALTGSSNDGHKFVNSAFASGAKGAVVASSKLDQFDLINAAQKAGKDLIVVENTLKGLQDAARVYLEKFPNLKKVGITGSSGKTTTKEITAAIISCEKNTVMNKGNLNSETGLPLSVFEVRSEHEVGVFELGMNRPNEILEIAEVLKPNIASITNIGSAHIEFFGSKSKIVNEKKCIFKFLKDGDIALIPQNDEYAKEMAEGVTGKVKFYSQDNFKEFEGCRSLGLEGTEIIWAGEKVHFALPGKHSLDDAIAAIAIAKEIPVSDNAIIRGLELVKPLFGRLEILNGKRATVIRDCYNANPESAAKSVEFCDSLEWPGRKVYVIADMLELGGSSVSEHEKLGFNLSVSSARKVFLFGNEIKAAVRNMEDNGKSFFYSSDINELSTAIDGYVKKGDLVLLKGSRGCALKGKRK

SEQ ID NO: 30447 - DNA, 651 bp, Unknown
  Obtained from environmental sample
  misc_feature (1)..(651): n is a, c, g, or t
ttgctgggaaccctggccgcttttgagcttttgcaggaattcccttccatagctttgcagagcgcactgtctcaaaacgcttttgagagactttcccttactgcacaccccgtcagcttcgctgccaccccgctagaagcggggacagatttaagctcggactttataatattaaaccaaggcgacgttttgacaatcagcgcgccgtctgggactggcaaaactttgcttgcaaattccatagctggctttttgccaagcgatgcggttatagagcgaaccgatagtttcgtttttttggagcaagagccttttttgttcactggaaccataaaggacaatttgctattcgctagcccaaacgctacggacgaggaaatgcagaacgttctgcgaaaagtgggtttggaaaaattttccctagatttgtggattggcgagcgcggttttgccttgagcggcggcgaaaggcaaaaactttccgctgctcgcgcaatgctctgcaacgtggatttaataatagccgatgaaccctccgcccatttgccaagctatgacgaaaataagttgttcagcgagtttgcgaatttatcaaacaagcccgctgtcttgtggttttcgcattttaaaccggacaatttactatattaa

SEQ ID NO: 30448 - protein, 216 aa, Unknown
  Obtained from environmental sample
  DOMAIN (61)...(216): ABC transporter
  misc_feature (1)..(216): Xaa is any amino acid
MLGTLAAFELLQEFPSIALQSALSQNAFERLSLTAHPVSFAATPLEAGTDLSSDFIILNQGDVLTISAPSGTGKTLLANSIAGFLPSDAVIERTDSFVFLEQEPFLFTGTIKDNLLFASPNATDEEMQNVLRKVGLEKFSLDLWIGERGFALSGGERQKLSAARAMLCNVDLIIADEPSAHLPSYDENKLFSEFANLSNKPAVLWFSHFKPDNLLY

SEQ ID NO: 30449 - DNA, 762 bp, Unknown
  Obtained from environmental sample
  misc_feature (1)..(762): n is a, c, g, or t
atgccgccgtctctgcaagctgccaaaggactaatacagaaaaatccatttacaaagcatcgcgatgctatagtgatttttggcattgtttgcatagtgctgataatggtggtccccctcccgacttgggctttggatatttgccttacatttatgattggcattgcgttgatggttctgatgaccagcatggttatagacaacgttcttgatttttccgtttaccccggtatgcttttggtggtaaccctttttcggctagctttgaacatcgcttctaccagacttattttatcgcagggcaacgcagggcaggttatagcatcattcggaaattatgtgacagctggcaacataatagttggaacaataatgttcataatcttggttgttatacagtttgtggttataacaaaaggttcaacgcgcatagcggaagttgcagcacggttcaccttggatgctatgccgggcaagcagatggcggtagacgccgatttgaacgcaggcaacttaaccgaggaagaagctcgccaaagacgttcggacataagcagagaagcggatttttatggagctatggatggtgcttcaaaatttgtccgaggcgatgccattgcaggcattataataacaattataaacatcataggcggcattattctaggtgttgtgatgcagggaatggaagttatggaggctatggaaacttttaccaagctaaccattggtgatggcttggttacacaaattccagcttga

SEQ ID NO: 30450 - protein, 253 aa, Unknown
  Obtained from environmental sample
  DOMAIN (31)...(253): FHIPEP family
  misc_feature (1)..(253): Xaa is any amino acid
MPPSLQAAKGLIQKNPFTKHRDAIVIFGIVCIVLIMVVPLPTWALDICLTFMIGIALMVLMTSMVIDNVLDFSVYPGMLLVVTLFRLALNIASTRLILSQGNAGQVIASFGNYVTAGNIIVGTIMFIILVVIQFVVITKGSTRIAEVAARFTLDAMPGKQMAVDADLNAGNLTEEEARQRRSDISREADFYGAMDGASKFVRGDAIAGIIITIINIIGGIILGVVMQGMEVMEAMETFTKLTIGDGLVTQIPA

SEQ ID NO: 30451 - DNA, 555 bp, Unknown
  Obtained from environmental sample
  misc_feature (1)..(555): n is a, c, g, or t
ttgtacaacgggatagcgccgtacccggacagaacaacgctcaaactgtcagacatgtttgagaaagcgggagcattcgggctgccggaaaagggaagcgccgcattggagcttgaggtaaatgtaataaacatcaacgagggaaagaacgaagtcatagcgaaaaagtgtaaaacgctggctggttacagcgcatttgtcgccaaggtacgtgcatttgagaaggaaataggggacaagacagaagcgatgaagcaggcggtaaggtactgccgagaccatgacatattgaaagagtttctggaacaaaacgggacggaggtaatgaatatgctgataaacgaatggaacatcgaagacgcgaaaaaagtatggtatgaggatggcctttctcaaggccttgagaaaggccttgagaaaggccgggaggaaggccgggaggaagaatcctttagtatcgcgcaaaacttagtcaaactgggtcttcctattgaaaccattatttccgccacccagcttgatcctgataaagtaaaagcattgtatcaacagtag

SEQ ID NO: 30452 - protein, 184 aa, Unknown
  Obtained from environmental sample
  misc_feature (1)..(184): Xaa is any amino acid
MYNGIAPYPDRTTLKLSDMFEKAGAFGLPEKGSAALELEVNVININEGKNEVIAKKCKTLAGYSAFVAKVRAFEKEIGDKTEAMKQAVRYCRDHDILKEFLEQNGTEVMNMLINEWNIEDAKKVWYEDGLSQGLEKGLEKGREEGREEESFSIAQNLVKLGLPIETIISATQLDPDKVKALYQQ

SEQ ID NO: 30453 - DNA, 885 bp, Unknown
  Obtained from environmental sample
  misc_feature (1)..(885): n is a, c, g, or t
ttgcggtttccggtaacagtaatatcattcacggggctgttattggcatgcccggattcgtcgtcgtcgtcgccggtgcaggtggaagaccagacgccgcaggttgccgactacaatatcggcccactgacgcaatcggagggcagcgttaccgctgtaaccataacgccgaagtcgggcaaatcaagcggcgcgagaacgatctactacgccgggacggacaacacgacctatacaaagagcaaaacactccctacagcgaagggaacctatgacgttacctttgacgtggcggcggcaagcggctggaacgccgctaccggcttatccgccggagagcttgagattaacgacaataaaacccctgtcgcgggggattttgacattggcaacctgacgcaatcagtgggcagcgtaaccgccgtaaccataacgccgaaggcggacaagtcaagcggccaaataacgatctactacgccagtacgacctacgccaaaagcacgacactcccaacggcagccggaacttacgccgttacctttgacgtggcggcggcgacaggctggaatccagcgacaggtttatccgccggaaatctggtggttaatattatcaatcaaactcccgttgagggcgattataactttggcaacctgacgcaatcggcgggtagcgttaccgccgtaaccataacggcgaagtcgggcaagtcaaccggcgcaataacgatcaaatatgcagggaataccatgatcccgcagacagctggatattacgccgttacctttgacgtggcggcggtatcaggctggaacgccgcgacaggattatccgccggatttctgactataacatcatcaggcgacggcgggacattaccataa

SEQ ID NO: 30454 - protein, 294 aa, Unknown
  Obtained from environmental sample
  SIGNAL (1)...(28)
  misc_feature (1)..(294): Xaa is any amino acid
MRFPVTVISFTGLLLACPDSSSSSPVQVEDQTPQVADYNIGPLTQSEGSVTAVTITPKSGKSSGARTIYYAGTDNTTYTKSKTLPTAKGTYDVTFDVAAASGWNAATGLSAGELEINDNKTPVAGDFDIGNLTQSVGSVTAVTITPKADKSSGQITIYYASTTYAKSTTLPTAAGTYAVTFDVAAATGWNPATGLSAGNLVVNIINQTPVEGDYNFGNLTQSAGSVTAVTITAKSGKSTGAITIKYAGNTMIPQTAGYYAVTFDVAAVSGWNAATGLSAGFLTITSSGDGGTLP

SEQ ID NO: 30455 - DNA, 342 bp, Unknown
  Obtained from environmental sample
  misc_feature (1)..(342): n is a, c, g, or t
atggtacgccgnctttttattgatgaatttgacacacagctgcacccattaattctggagaacataatcaagctttttcattcccctgatataaacaagaataacgcccagcttgttatttcctgtcatttggttaatataatgacaaacaagaattttcgccgtgaccagatatggttctgtgaaaaagatcaatacggggcgacaaatttatattctcttgttgaatatgatgagccggtacgaaacgacgccgcattcgggaaaaattatttacaggggaaatacggcgcaattccctatataaatgaaatcgcgttacaatttgggaaaaaagaataa

SEQ ID NO: 30456 - protein, 113 aa, Unknown
  Obtained from environmental sample
  misc_feature (1)..(113): Xaa is any amino acid
MVRRLFIDEFDTQLHPLILENIIKLFHSPDINKNNAQLVISCHLVNIMTNKNFRRDQIWFCEKDQYGATNLYSLVEYDEPVRNDAAFGKNYLQGKYGAIPYINEIALQFGKKE

SEQ ID NO: 30457 - DNA, 444 bp, Unknown
  Obtained from environmental sample
  misc_feature (1)..(444): n is a, c, g, or t
atggggcatgataaattgtttcagaaaaaaaatgtactgaaacgtcccgaaaaaacacgccaacttcgcaggattttgattgtttgcgaaggtaaaaaaaccgagcctaattattttaaaaagtttaaaactaatcccgaagtatttgacgccattgatgtacagggaaccggttataatacggtttctttaatagaaaaggctattaaaataaagaatgaggcaattcaaaaaagtgaaccatatattgaaacatggtgcgtctttgataaagatgatttttccgttgaatcatttgaaaaagcaataaagatggctgagcaaaaccaaataaaatgcgcttactccattgaagcttttgaaatatggtatatgcttcattttaatttttatgaaactgccttttcacgatcacagtataaggaagagctttcaagttactga

SEQ ID NO: 30458 - protein, 147 aa, Unknown
  Obtained from environmental sample
  misc_feature (1)..(147): Xaa is any amino acid
MGHDKLFQKKNVLKRPEKTRQLRRILIVCEGKKTEPNYFKKFKTNPEVFDAIDVQGTGYNTVSLIEKAIKIKNEAIQKSEPYIETWCVFDKDDFSVESFEKAIKMAEQNQIKCAYSIEAFEIWYMLHFNFYETAFSRSQYKEELSSY

SEQ ID NO: 30459 - DNA, 339 bp, Unknown
  Obtained from environmental sample
  misc_feature (1)..(339): n is a, c, g, or t
atgacagatcggccgagttcccggatttcgattgtgctgcacggcgcgtcgagcgtgccgcaagacctcgtggcgcaaatcaacaaatacggcggaatgttgaaggattcgataggtattcccgaagaccagttgcgcgctgccgccaaatcggccgtgtgcaaaatcaacattgacagcgacggccgcttagccatgacagccgccattcgcaaagtgtttgccgaccagccggccgagttcgacccgcgcaaatacttaggccccgcacgcgatcaactaaaagtattgtatatgcacaaagtaacggaggtactgggaagcaacaaccgttcataa

SEQ ID NO: 30460 - protein, 112 aa, Unknown
  Obtained from environmental sample
  misc_feature (1)..(112): Xaa is any amino acid
MTDRPSSRISIVLHGASSVPQDLVAQINKYGGMLKDSIGIPEDQLRAAAKSAVCKINIDSDGRLAMTAAIRKVFADQPAEFDPRKYLGPARDQLKVLYMHKVTEVLGSNNRS

SEQ ID NO: 30461 - DNA, 612 bp, Unknown
  Obtained from environmental sample
  misc_feature (1)..(612): n is a, c, g, or t
atgcacatcgcagtagcaggcaacatcggtagcggtaagactacgttaacaggcctattagcgcgccattacggatggcaaccgaaatttgaagacgtggacgacaatccatacctgtcggatttttaccacgacatgcaacgctggtcgttcaacttgcaggtctattttctcaataaacggtttgaaggtattgtggaaattaaaaaggcgaaggaaacgattattcaagaccgtactatttacgaagacgcgcgtatctttgcccccaacctgcacaccatggggctgatgaccacccgcgatttcgacaattactgctcgctgtttgatttgatgatttcgttggtggagccgccggatttgttgatatacctgcgctcgagcgtgcccacgctggtgtaccaaattcacaaacgcggccgcgattatgaaaacgccatccgcctcgactaccttaccagcctgaacgaactgtatgaggagtggattgagaagtacgaaaaccgcaagcttatcattgacgtggacactattaaatttagcgaaacgcccgaagatttaagtacggttattgataaaattgatgcgcagttgcacgggcttttttaa

SEQ ID NO: 30462 - protein, 203 aa, Unknown
  Obtained from environmental sample
  DOMAIN (53)...(196): Deoxynucleoside kinase
  misc_feature (1)..(203): Xaa is any amino acid
MHIAVAGNIGSGKTTLTGLLARHYGWQPKFEDVDDNPYLSDFYHDMQRWSFNLQVYFLNKRFEGIVEIKKAKETIIQDRTIYEDARIFAPNLHTMGLMTTRDFDNYCSLFDLMISLVEPPDLLIYLRSSVPTLVYQIHKRGRDYENAIRLDYLTSLNELYEEWIEKYENRKLIIDVDTIKFSETPEDLSTVIDKIDAQLHGLF

SEQ ID NO: 30463 - DNA, 873 bp, Unknown
  Obtained from environmental sample
  misc_feature (1)..(873): n is a, c, g, or t
atggttgtattaagttatatcttcacaataaatattgttgataaatatttaaaacaaaatacgaataatatttttatatccctgcaatcacaaatcatgaccgacctgctggaaccgaagatgacgctggaaaacttttcacagacaatgcgggaaatgattatgaacggcgatgacgcggacaaattgcgggaatatttcaatgacatgtcaaattacctgtctttggacaaacagagctatttgaattttaacggctttatggggtattttgaaacgattcccggcgggcctgtttttatagagagtttacaatggcgcaggccggatgactatgttcttacggatcgcaaatggtatcaggacgcaatcgcggcggatggcaggatcgccgaaacattgatgtatcatgacatggtctatgaggatatcatgctgatatcttcgcgctgcatttttgatgaccatggacggcgtctgggcgtcgtcgccctcagagtaaagattgacaatatcagaaaatatattgttaataccgctatggttcagggcgcatacggaatgttgatcagcggagattggattattctggcccatccaaacgaggcgtttgtaggcgaggacgtgcgcagtctggaaattcccttttcgatttttgtaaatgatttaaataatggaatagaaattaccgaacgtccgctgataacgtatcaaggcgaacgcgccatggcttctttccggttcctgcccaacggctggattatgggcattgtaacgcccaaaggtccgtactataaaagcatatccaatatgctcttaatcctcgttatattgngtacggcgctttcctcggtgctgatcttcgtcccctga

SEQ ID NO: 30464 - protein, 290 aa, Unknown
  Obtained from environmental sample
  misc_feature (1)..(290): Xaa is any amino acid
MVVLSYIFTINIVDKYLKQNTNNIFISLQSQIMTDLLEPKMTLENFSQTMREMIMNGDDADKLREYFNDMSNYLSLDKQSYLNFNGFMGYFETIPGGPVFIESLQWRRPDDYVLTDRKWYQDAIAADGRIAETLMYHDMVYEDIMLISSRCIFDDHGRRLGVVALRVKIDNIRKYIVNTAMVQGAYGMLISGDWIILAHPNEAFVGEDVRSLEIPFSIFVNDLNNGIEITERPLITYQGERAMASFRFLPNGWIMGIVTPKGPYYKSISNMLLILVILXTALSSVLIFVP

SEQ ID NO: 30465 - DNA, 357 bp, Unknown
  Obtained from environmental sample
  misc_feature (1)..(357): n is a, c, g, or t
atgctgggaagtccgcaaatagcgcttaaactgctaaggatgttttccaagcgcatttacgattcaaaacgccggtttatgattctgaccctggaagaacctcaggcgaagatagccgatgtctttctaatgctggatgaaagccaggccgatctggacagaactactgaaaggcgtgaatttaaaactactgtggatgatgttgcccactgggccggcatggctgtggccgatacccgtgatattcttggccattttgccacccagcgccgtattgagatgtacccggacagaatagcggtaaaaaatatcaacgatttttcacgctttgttaattcgcgaagaagaaagacttag

SEQ ID NO: 30466 - protein, 118 aa, Unknown
  Obtained from environmental sample
  misc_feature (1)..(118): Xaa is any amino acid
MLGSPQIALKLLRMFSKRIYDSKRRFMILTLEEPQAKIADVFLMLDESQADLDRTTERREFKTTVDDVAHWAGMAVADTRDILGHFATQRRIEMYPDRIAVKNINDFSRFVNSRRRKT

SEQ ID NO: 30467 - DNA, 603 bp, Unknown
  Obtained from environmental sample
  misc_feature (1)..(603): n is a, c, g, or t
atgagatcccccagagaagtgaatatcgacattaagcttattgattttgttgactcgtttaaatttcccgagcatgtgatgaagtgtttaaaactgcttcttgccaacgaggaacttcaattttctcaagaatacgcaaatacggtttccattataaggcttgggtacaacgatcacggtcccgtccacatgcggacagtgacatataacgccgtgataatgcttgatcttttaaaaaaagccggaataaaaaccagtcttgaatcggacggatgcggcacttatgaagacagctttatcggcgtaatgcttgcttcaatgtttcacgatctcggcatggcgatgggaaggcagaatcacgaatcgcacagtttggttctttccatgcccattattgacagggttttagcccaagtttatcccgatgatttgaaaaaaagagtcatgatcagggcacttgcccttgaaggaatcgccggacacatgggaaccataacaatttcttctcttgaagcgggaataatacaggtagcggacggttgcgacatgaccaagggaagggcgcgtattccaatttctatttcttccataacgcanaagtag

SEQ ID NO: 30468 - protein, 200 aa, Unknown
  Obtained from environmental sample
  misc_feature (1)..(200): Xaa is any amino acid
MRSPREVNIDIKLIDFVDSFKFPEHVMKCLKLLLANEELQFSQEYANTVSIIRLGYNDHGPVHMRTVTYNAVIMLDLLKKAGIKTSLESDGCGTYEDSFIGVMLASMFHDLGMAMGRQNHESHSLVLSMPIIDRVLAQVYPDDLKKRVMIRALALEGIAGHMGTITISSLEAGIIQVADGCDMTKGRARIPISISSITXK

SEQ ID NO: 30469 - DNA, 942 bp, Unknown
  Obtained from environmental sample
  misc_feature (1)..(942): n is a, c, g, or t
ttgtgccggatagttccacgcaacgctttcggacaaaaacccagtccccgatccccagtccccagtccccatcttgctaaaccggcatttctatgctattataaaaaaatgagcgcggtgcgtctcctggcccttgatttggatgatacccttctcaggtcggatttaaccatttcctaccaaaccagaaacgccataaaaaaggcggaagctgccggggtggttttggttttggcttcgggaaggatacccgcggcaatgaatcagtttgcctcgcttttggggatgcataaaaagaccggttaccttatatgcaacaatggcaccttaatacaggaaagccataccgggaaaatcatctatgaaatcagaatggactcaaaaaccgcgcttaccgcttttgatttggccgatgccgagggctttcccgtacagctttatgaagacgatattatgtatgtgtcacgccataacgaatataccggttatgatcagaagcttaccggcctcagacaagtagtagtggaaaattttcgggccatggtgggcggcggctgccataaactgctcatccccggggatcccgcgctccttgtcccgctggaaagcattttgcggacctaccttgaaggcagcgttaccatctttaccagtaaaccatattttcttgaaatactgccgcccaatgtcaacaaaggcacggccctggaaaaggtcgcggatatgctggggattaatcaaaaagatgtgatagccattggggattcgatgaacgatgaagccatgctccgctgggccggcatgggcatagcaatggcaaacagcgatgagagaataaagaatatcgcggatctggtaacatcgaaagataatgatgatgacggcgttgccgaagtcatagaaaaatatatcctgtctaaaacggcggcttccaatgagtga

SEQ ID NO: 30470 - protein, 313 aa, Unknown
  Obtained from environmental sample
  DOMAIN (39)...(305): Sucrose-6F-phosphate phosphohydrolase
  misc_feature (1)..(313): Xaa is any amino acid
MCRIVPRNAFGQKPSPRSPVPSPHLAKPAFLCYYKKMSAVRLLALDLDDTLLRSDLTISYQTRNAIKKAEAAGVVLVLASGRIPAAMNQFASLLGMHKKTGYLICNNGTLIQESHTGKIIYEIRMDSKTALTAFDLADAEGFPVQLYEDDIMYVSRHNEYTGYDQKLTGLRQVVVENFRAMVGGGCHKLLIPGDPALLVPLESILRTYLEGSVTIFTSKPYFLEILPPNVNKGTALEKVADMLGINQKDVIAIGDSMNDEAMLRWAGMGIAMANSDERIKNIADLVTSKDNDDDGVAEVIEKYILSKTAASNE

SEQ ID NO: 30471 - DNA, 402 bp, Unknown
  Obtained from environmental sample
  misc_feature (1)..(402): n is a, c, g, or t
gtgttgcaaagcggcgggcgtatcctgtgttacccgcggcatggcgcggaacgccgccttcacgggttttattcctgcggcattggcgggcatatcgacatagaagacgcgagggatactattgaagaaaccgttattaccggtatgatgcgcgaattaaaagaagaactcgccggttttcgggaagaccgtgtggagcttgtttacaggggcattatcaacgagacgggaagcgatgtcgggcaggttcatctgggactggtgtacgcctgtctgtgcctgggcgattacgcgcctgaaccctcggaagaaacaaccggcatggaatggaaaaccccggaagaactgaaactcatcaataaagagctatggtccgatctggcgctgaagttaatcaaataa

SEQ ID NO: 30472 - protein, 133 aa, Unknown
  Obtained from environmental sample
  misc_feature (1)..(133): Xaa is any amino acid
MLQSGGRILCYPRHGAERRLHGFYSCGIGGHIDIEDARDTIEETVITGMMRELKEELAGFREDRVELVYRGIINETGSDVGQVHLGLVYACLCLGDYAPEPSEETTGMEWKTPEELKLINKELWSDLALKLIK

SEQ ID NO: 30473 - DNA, 531 bp, Unknown
  Obtained from environmental sample
  misc_feature (1)..(531): n is a, c, g, or t
gtgtgggcggctttgcaggatactgatcggattgtaaaagaaaatgctcaaggaatgaaggagttaagggaaatccagaaagaaactacacgtcaaattgggaaactcggcaaacgaatgggcgaagttgttgaatatttggttgaacctaaccttagtgagaaatttaatgagtttgggtttaacttttcccaatctaataaaaataccattatttctgataaagaaaataaaatatcctttgaaattgacgttttccttcaaaactataacaaggctttgttggtcgaagtaaaaaccaaacccaccaccgaacatgtgcaggagcatattgaacgccttgaaaaaatgcgtaaatatgccgatttacatggcgacaagcggacatttttgggtgctgttgcaggggtggttatgtcggacaatgtaaaagaatatatattaaaacaaggctttttcgttatagaaccctctggagaaacttttaatattattcagccatataataaacccaaagaatggtattattaa

SEQ ID NO: 30474 - protein, 176 aa, Unknown
  Obtained from environmental sample
  misc_feature (1)..(176): Xaa is any amino acid
MWAALQDTDRIVKENAQGMKELREIQKETTRQIGKLGKRMGEVVEYLVEPNLSEKFNEFGFNFSQSNKNTIISDKENKISFEIDVFLQNYNKALLVEVKTKPTTEHVQEHIERLEKMRKYADLHGDKRTFLGAVAGVVMSDNVKEYILKQGFFVIEPSGETFNIIQPYNKPKEWYY

SEQ ID NO: 30475 - DNA, 1038 bp, Unknown
  Obtained from environmental sample
  misc_feature (1)..(1038): n is a, c, g, or t
ttggagggggttgactggtcggtggggaggaccggggttgtgacgcccgtggcgcggctgcatcccgtttttctggccgggacgacggtaaagagcgcctcgcttcacaactacgacgaaatcaagcggttggggcttagggtcggggatacggtggaggtggagaagggcggggagatcatccccaaaatcatacgggtctgcgccgacgagcggtttgcgggcagcgagccgtacgagccgccggccgcgtgcccgtcgtgcgggtcgcttctggccaagctcggggacgaggtggcgctgcgctgtctgaaccgctcctgcggggcgcagctaaccgcgtcgatagagcacttcgtgtctcgtgcggctatggacgtgcggggaatgggcccggcggtcgtcaagcagcttttggacggcggtttaatcaaagacgcggcggatttgtacgctctgacggcggagaagctgctgacattggaacgcttcgcggagaagtccgcctccaacatcgcggcggcgctggagaagtcgaagacccgcccgctcgacaggttgatccacggcctcggcataaggatggtcggcgcctcgtcggcgcgcgatttggccggcgccgtcgacgatatttcggaattatacagcatgcggattgaggaattggagttgatagagggtatcgggttattgacggcccagagcatcagactgttctttgacagggccgaaaacgtggatatggcggagaggctgagggcggccggtctgaaccttacgggcggcaagagccgcggcggcgcgtctgccggcgatttcgcggggaagacgttcgtactgacaggaactttggagcgccgcacgcgcgagcaagcgtcggagataatcctaaacggcggcggcaaggtatcctcaagcgtaagctcaaaaacagactacgtcctagccggttcggaggcaggttcaaaactagacaaggcgctgtcgctgggggtcagggttataagcgaggaggagtttgaggaaatgatgaattaa

SEQ ID NO: 30476 - protein, 345 aa, Unknown
  Obtained from environmental sample
  DOMAIN (83)...(110): NAD-dependent DNA ligase C4 zinc finger domain
  misc_feature (1)..(345): Xaa is any amino acid
MEGVDWSVGRTGVVTPVARLHPVFLAGTTVKSASLHNYDEIKRLGLRVGDTVEVEKGGEIIPKIIRVCADERFAGSEPYEPPAACPSCGSLLAKLGDEVALRCLNRSCGAQLTASIEHFVSRAAMDVRGMGPAVVKQLLDGGLIKDAADLYALTAEKLLTLERFAEKSASNIAAALEKSKTRPLDRLIHGLGIRMVGASSARDLAGAVDDISELYSMRIEELELIEGIGLLTAQSIRLFFDRAENVDMAERLRAAGLNLTGGKSRGGASAGDFAGKTFVLTGTLERRTREQASEIILNGGGKVSSSVSSKTDYVLAGSEAGSKLDKALSLGVRVISEEEFEEMMN

SEQ ID NO: 30477 - DNA, 957 bp, Unknown
  Obtained from environmental sample
  misc_feature (1)..(957): n is a, c, g, or t
atgagcgaaggggtgacggtgattgcagattatatctcttatctgggggcggtgcgcggtctttccgcacggacgcttgaggcttacggggatgatctgggcaaatttgccaattactgcgataatcacggaatagagcctgaaaaggcggggccgcacgaggtgaggggctttatcgccgatttgagttttgaacatgcctccgccgccagcgtaaaccgcaggctttcctctgtccggggcttctaccgctggctgaataaatttcgcggtaggcatgataacccctgcgacggcggtccgggcggcattctccgcaatgtcaaagtgccgcagaaactgccgtcactgctgtgggaagacgagatggcggattttgcggatctgccggacgaaaaaaaaatgctgtggccggccagggacaaggctttgattttagccatgtattccgcagggatgcgtatttcagaactggtttcgttaaccagaaaagcgatgacggctaacatggagagcgcgaaaataacaggcaagggcggcaaggagagggtggtgtttttttccgaagaggcgaaagcggcaattcgtgattatttgccggaacggaatgccagaatcaggatggccggtcttaaggggtccgatttaaaaggggcgttgtttgtaagcgccaggggccgctcgctttccgttcccggcgtgcgctggattatcagccaatatgcggcggtttccgggctggggaagaatatacacccccacagttttcggcacagcttcgcgacccacctggtgaacgccggatgcgatgtccgtattgtgcaggaactgctcggccatgcccgcctgtccaccacccagcgctacacccacgtgacgctcgatcgcctgatgcaggtctatgatcgcgcccatccccgttcgcaaaccgccaggcgcgatgaggaagacgattga

SEQ ID NO: 30478 - protein, 318 aa, Unknown
  Obtained from environmental sample
  DOMAIN (8)...(91): Phage integrase, N-terminal SAM-like domain
  misc_feature (1)..(318): Xaa is any amino acid
MSEGVTVIADYISYLGAVRGLSARTLEAYGDDLGKFANYCDNHGIEPEKAGPHEVRGFIADLSFEHASAASVNRRLSSVRGFYRWLNKFRGRHDNPCDGGPGGILRNVKVPQKLPSLLWEDEMADFADLPDEKKMLWPARDKALILAMYSAGMRISELVSLTRKAMTANMESAKITGKGGKERVVFFSEEAKAAIRDYLPERNARIRMAGLKGSDLKGALFVSARGRSLSVPGVRWIISQYAAVSGLGKNIHPHSFRHSFATHLVNAGCDVRIVQELLGHARLSTTQRYTHVTLDRLMQVYDRAHPRSQTARRDEEDD

SEQ ID NO: 30479 - DNA, 855 bp, Unknown
  Obtained from environmental sample
  misc_feature (1)..(855): n is a, c, g, or t
atgtccggcctattcccctcccccctgcgtttcgagcccatcttcaaagaaaaaatatggggaggctccgctttgcgcgagaagttgaacaaggccgcgccggccggacggcccatcggggagtcttgggaggtcagcggctggggcgacagccagacggtggtctccgccggggagtacatgggcctgacgctgggcgagctcttcgcgctcagcccgagcgacctggtgggcaagagggccggcgcggcggaaagcaagggcagttttccgctcctattcaagttcatagacgccaacgaaaacctctcgatacaagtgcacccgaacagagaacaggcgcgttcgcggggttggggcaagcggggcaagaccgaagcctggtacgtggtagacgccgccccgaccgccaagatagccatagggttcaaccgcaacgacgtaacacgggaggaggtcgcggaggccgccgacgccggccgcttagagtcgctcctgaacttcgttcccgcccggcgcggcgacaccttcttcatccccgccggaaccgtgcacgccatcttggacggcatcttaatctacgaggtgcaagaggagtccaacacaacgctgcgcctatacgactggaaccgcaaatgccccgccggaaacctgagagaactgcacataaccgacgcgctggacataatcaactacaacgaggacagaccccttaaaccggagccggtggcggtttacaaaaccgagaccttcatatacgaaacgctctgcgacaacaacaaattcctcctgagccgctgcggcttcctgaaatccggcgaggcccccctaagaacaatcacggcttcagggtga

SEQ ID NO: 30480 - protein, 284 aa, Unknown
  Obtained from environmental sample
  DOMAIN (9)...(284): Phosphomannose isomerase type I
  misc_feature (1)..(284): Xaa is any amino acid
MSGLFPSPLRFEPIFKEKIWGGSALREKLNKAAPAGRPIGESWEVSGWGDSQTVVSAGEYMGLTLGELFALSPSDLVGKRAGAAESKGSFPLLFKFIDANENLSIQVHPNREQARSRGWGKRGKTEAWYVVDAAPTAKIAIGFNRNDVTREEVAEAADAGRLESLLNFVPARRGDTFFIPAGTVHAILDGILIYEVQEESNTTLRLYDWNRKCPAGNLRELHITDALDIINYNEDRPLKPEPVAVYKTETFIYETLCDNNKFLLSRCGFLKSGEAPLRTITASG

SEQ ID NO: 30481 - DNA, 660 bp, Unknown
  Obtained from environmental sample
  misc_feature (1)..(660): n is a, c, g, or t
atggggaggctccgctttgcgcgagaagttgaacaaggccgcgccggccggacggcccatcggggagtcttgggaggtcagcggctggggcgacagccagacggtggtctccgccggggagtacatgggcctgacgctgggcgagctcttcgcgctcagcccgagcgacctggtgggcaagagggccggcgcggcggaaagcaagggcagttttccgctcctattcaagttcatagacgccaacgaaaacctctcgatacaagtgcacccgaacagagaacaggcgcgttcgcggggttggggcaagcggggcaagaccgaagcctggtacgtggtagacgccgccccgaccgccaagatagccatagggttcaaccgcaacgacgtaacacgggaggaggtcgcggaggccgccgacgccggccgcttagagtcgctcctgaacttcgttcccgcccggcgcggcgacaccttcttcatccccgccggaaccgtgcacgccatcttggacggcatcttaatctacgaggtgcaagaggagtccaacacaacgctgcgcctatacgactggaaccgcaaatgccccgccggaaacctgagagaactgcacataaccgacgcgctggacataatcaactacaacgaggacagaccccttaa

SEQ ID NO: 30482 - protein, 219 aa, Unknown
  Obtained from environmental sample
  misc_feature (1)..(219): Xaa is any amino acid
MGRLRFAREVEQGRAGRTAHRGVLGGQRLGRQPDGGLRRGVHGPDAGRALRAQPERPGGQEGRRGGKQGQFSAPIQVHRRQRKPLDTSAPEQRTGAFAGLGQAGQDRSLVRGRRRPDRQDSHRVQPQRRNTGGGRGGRRRRPLRVAPELRSRPARRHLLHPRRNRARHLGRHLNLRGARGVQHNAAPIRLEPQMPRRKPERTAHNRRAGHNQLQRGQTP

SEQ ID NO: 30483 - DNA, 333 bp, Unknown
  Obtained from environmental sample
  misc_feature (1)..(333): n is a, c, g, or t
atgggcacggcgcgcattgagcaatgggacgacatccgcgaattggccctcatgagcatcgggaccgacaagggcacatggtgggccgatccgaatttcggcagcgagctgtggctgcttcggaaaaacggcaaagtggacggccagaccgcggggacccttaggaggatggtgctcgaaagcctccaatggattgtccaaggctcccttgcaaagaaaatcgactgcgcggccgagcgcactggcaaaaacgagatacgctatagcgtcgctattttccgcccggatgggaacagcgtccccctcataacggaggtatggcgtgccgtttaa

SEQ ID NO: 30484 - protein, 110 aa, Unknown
  Obtained from environmental sample
  DOMAIN (10)...(107): Phage protein GP46
  misc_feature (1)..(110): Xaa is any amino acid
MGTARIEQWDDIRELALMSIGTDKGTWWADPNFGSELWLLRKNGKVDGQTAGTLRRMVLESLQWIVQGSLAKKIDCAAERTGKNEIRYSVAIFRPDGNSVPLITEVWRAV

SEQ ID NO: 30485 - DNA, 849 bp, Unknown
  Obtained from environmental sample
  misc_feature (1)..(849): n is a, c, g, or t
atggcgagtacatttccccttagcttccttgacgaacttggcaaagaggacgacgttgtacttgaactttccagttggcagttgggagacctaaaggggcgcggcttattgaagccgagggcggcagtaatcacaaacataatgaaggatcaccaggataaatacggcggtatggaagcttatgtggacgacaaacgtgtcatttaccgcggccaggacgaaaacgacgtaaccgtcgccgccgatgacgcctggggaaggagcttcctcagcgaaagccgcgggaggtctgtcccctattccgccaagcccctggtcggcggcactcccggcggctggatcgccgatccgcaaggccccggccttgccaggctttgggaaatccccggcaagggtaaaatggcagaaaaaggccgcgttgtggaagtcgtccccgccaggccgcttatccctggttttcaccagaagcaaaacctccttatagccgctctgtccctcctggatttgggtctgaacgcggactttatccgcgaaagccttgggcgtttccccggcattgagcacaggcttgagtattttcacgaatccggcggggtgaggttttacaacgacagcgctgccacaattcctgaggccgccgccgccgctttaagcgccttcgagaagcctcccgttttggtaaccggaggcaccgacaaggagctggactttacgcccttggccctggcggtggtaaaagccagagcattggttctccttgccggaacaggcagcgaaaaactaaaaacccttctggattcaggcggcgtaagtacaggggccccttcgattcccttgaggcggcaataa

SEQ ID NO: 30486 - protein, 282 aa, Unknown
  Obtained from environmental sample
  DOMAIN (1)...(166): Mur ligase middle domain
  misc_feature (1)..(282): Xaa is any amino acid
MASTFPLSFLDELGKEDDVVLELSSWQLGDLKGRGLLKPRAAVITNIMKDHQDKYGGMEAYVDDKRVIYRGQDENDVTVAADDAWGRSFLSESRGRSVPYSAKPLVGGTPGGWIADPQGPGLARLWEIPGKGKMAEKGRVVEVVPARPLIPGFHQKQNLLIAALSLLDLGLNADFIRESLGRFPGIEHRLEYFHESGGVRFYNDSAATIPEAAAAALSAFEKPPVLVTGGTDKELDFTPLALAVVKARALVLLAGTGSEKLKTLLDSGGVSTGAPSIPLRRQ

SEQ ID NO: 30487 - DNA, 744 bp, Unknown
  Obtained from environmental sample
  misc_feature (1)..(744): n is a, c, g, or t
atggacattgagttactgcgtgagcgctcaaggatcataaagcaggtacattccttttttgacagccgcgattacctgaaaacggataccccactgctttctccggatttgattcccgaatcgtgccttgaagttttccagaccctccgactctctccaaagggaagcctaacgccagacaagccatgctggctcgtgccctcccctgaaatttggatgaaacgcctcatcgcccagcaccgggtaaacctttaccagatctgcaagtgcttcagaaacggggaatcctctggccgctggcacagcccagaatttacaatgctggagtattacaccatgcaggcggactacatggactcgctaaaactaaccgaggagctttttgcttttctccttggcgatgggaggagaaacaaaaacgagtgggcggagctttcctctccctttattaaaatgacaatggaagaagcctttagccgctgggctggctttgatctttacaaggctgcagaatcacagcccgttatggaagaagaagcgcgaaagctgggcctctgcccgccgaccgggctttccgttcctgaactctacgaccttatctttatccacactgtggaaccaaacctgaaacttgagcgtcccgtagccatcattgattacccgactttcgtcccctgnctggcaaaaaaaggaagtggcggaaaaactgttgaacgctgggagctttatgtccaaggaaattga

SEQ ID NO: 30488 - protein, 247 aa, Unknown
  Obtained from environmental sample
  DOMAIN (1)...(247): tRNA synthetases class II (D, K and N)
  misc_feature (1)..(247): Xaa is any amino acid
MDIELLRERSRIIKQVHSFFDSRDYLKTDTPLLSPDLIPESCLEVFQTLRLSPKGSLTPDKPCWLVPSPEIWMKRLIAQHRVNLYQICKCFRNGESSGRWHSPEFTMLEYYTMQADYMDSLKLTEELFAFLLGDGRRNKNEWAELSSPFIKMTMEEAFSRWAGFDLYKAAESQPVMEEEARKLGLCPPTGLSVPELYDLIFIHTVEPNLKLERPVAIIDYPTFVPXLAKKGSGGKTVERWELYVQGN

SEQ ID NO: 30489 - DNA, 594 bp, Unknown
  Obtained from environmental sample
  misc_feature (1)..(594): n is a, c, g, or t
atgactaaagaacaaatgctgcaaatcagcggaatgcatcttgcgccgtatattcaagttgctaccatgcttataggcaaatcacgccgggcaggcggcaatatgttccgtcaccagattgacactttgggaatacttattgattacggctatattgacgaagtattgctgaaagcgtctatcgtacatgacatactggaagatgttcccgattttaatcataacattctgttatcggttgatgccgacagccgtgatgtttacgaacttgttaaagaagtttcccgccgtgccgaagaaacaaaacctgaatttctgattcgtatccgtgaatcaggttcacataacgcgaaaatccttaaagtggcggatcgaatatcgaacatgatatcgcttgggtttgtcaacaaccttgattttgttgaacggtatatcagtgaaacggaacagtatgttttgcctatcgcaaatctagtcagtcagtacatggtaacggaacttatagaccttataaaatcaagaagagattatcttgaaggtttctataaataccttgaaagtacgcaggaaaccgatgcttccggttctgtttaa

SEQ ID NO: 30490 - protein, 197 aa, Unknown
  Obtained from environmental sample
  DOMAIN (35)...(129): HD domain
  misc_feature (1)..(197): Xaa is any amino acid
MTKEQMLQISGMHLAPYIQVATMLIGKSRRAGGNMFRHQIDTLGILIDYGYIDEVLLKASIVHDILEDVPDFNHNILLSVDADSRDVYELVKEVSRRAEETKPEFLIRIRESGSHNAKILKVADRISNMISLGFVNNLDFVERYISETEQYVLPIANLVSQYMVTELIDLIKSRRDYLEGFYKYLESTQETDASGSV

SEQ ID NO: 30491 - DNA, 663 bp, Unknown
  Obtained from environmental sample
  misc_feature (1)..(663): n is a, c, g, or t
atggatttatttccgctttttaattctcttagaataagcgcaatagcgacatcagccgcttttgttcttggaatacttgcggcttactatattatgaaactgccgagagtgttaaaaggtatatgcgataccgtattgactataccgcttgttctgccgcctacggttgtaggttactttatactggtgtggctgtctccgagaagcccgttaggtgcaaaattatttgaatggtttgcgataactattacaatgaggtggtacgcttccattatcgccgttacaattatcgcctttccttttatttacagaaccgcccgaggagcgtttgaggcttttgatcaaaatttgctggacgcagggcgcacgcttggactttctgaaaaatatattttcgcccgtatacttcttccgaactgcaaacatggaataatggcgggaacggctctcgcctttgccagaggattgggcgaatacggagcgaccagcatggtgtcgggttatatagcgggcaagacggctaccgtttccacttccgtggcttatttttggcagataaatcaggaacaagcggcaggttactgggttttaataaacattttggtatcctttgtattcatggcgttgatcaacatgtttgtaaaattggaagtcagagggtag

SEQ ID NO: 30492 - protein, 220 aa, Unknown
  Obtained from environmental sample
  SIGNAL (1)...(27)
  DOMAIN (6)...(216): Binding-protein-dependent transport system inner membrane component
  misc_feature (1)..(220): Xaa is any amino acid
MDLFPLFNSLRISAIATSAAFVLGILAAYYIMKLPRVLKGICDTVLTIPLVLPPTVVGYFILVWLSPRSPLGAKLFEWFAITITMRWYASIIAVTIIAFPFIYRTARGAFEAFDQNLLDAGRTLGLSEKYIFARILLPNCKHGIMAGTALAFARGLGEYGATSMVSGYIAGKTATVSTSVAYFWQINQEQAAGYWVLINILVSFVFMALINMFVKLEVRG

SEQ ID NO: 30493 - DNA, 438 bp, Unknown
  Obtained from environmental sample
  misc_feature (1)..(438): n is a, c, g, or t
gtggtgtttccccgtaattccaaaaaaggcattacgtcttttagcgacattgccaccgacaaagtttcacttttcgctctcggcaatgccactacacccgcaggacaatacgccgaggagatttntaattcgctcggtatatggaacgctattcagccgaaaatatccttcggcagtaatgtgaaagaagttctttcgcaggtagaaaccgcaagcgttgacgcaggtatggtgtactccaccgacgtagtcacagcgaaaggcgacgtaaaaattgccgccgacgctcctgagggcagtcatgcgcccatcgtctatcccgccgccgtactaaaaggcgcaagggacgctaaagcggcaaaggcgtttttggattatttgagtaagcctgaagccgttgcggtatttgaaaaaatcggttttgttatggtaaaatag

SEQ ID NO: 30494 - protein, 145 aa, Unknown
  Obtained from environmental sample
  misc_feature (1)..(145): Xaa is any amino acid
MVFPRNSKKGITSFSDIATDKVSLFALGNATTPAGQYAEEIXNSLGIWNAIQPKISFGSNVKEVLSQVETASVDAGMVYSTDVVTAKGDVKIAADAPEGSHAPIVYPAAVLKGARDAKAAKAFLDYLSKPEAVAVFEKIGFVMVK

SEQ ID NO: 30495 - DNA, 1551 bp, Unknown
  Obtained from environmental sample
  misc_feature (1)..(1551): n is a, c, g, or t
gtgttgatgccccatttccgcgatatgccaagttacgaagagaaagtacatgcgaatttctgtcccattactcaggcccttccttattatatggaaaaggcattccctgatatcgataaaaagaaatggctgccgcttgtcgtaagtttcaagtttggcgaaggaaaggcgcttgaattgttctgtgagatgacaaaattgttgggtattggcgaggcggagacaaaggcggcatttgatacggctttggcaaaacagaaaagttattttgaagcggttgaaaaaatgggtcatcaggcgcttgaagacgcgcgtaagtcggacaggcccgttatcgccgtgttgggcagaccgtacaacgccttcacgccggaagcgaatatgggtatcccgcgcaagtttaccacgcgcggctattcaatcattccatttgacatcttgccgttccgcgatgaaattatctttccgaatatgtattggttcttcggccagcaggatttaaaagcgtcaaaactcctcaaaaaagaagacaatatttatcttacgtttgtttccaacttttcatgcgctcccgattctttcattctccattatgtgaaatggatgatggggcaaaaaccgttcctcgtgcttgagttggattcccactccgccgacgcgggcgttgatactcgcgtagaggcgttcctggacataattgacggttaccgcgcaaagagaaatcagtttgaagacgagcgctatgacaacggaatgaggtttgtctgcgaaaaaatggcgtccggcgaatttgatttgcgcatagacaatgttaaaacagggcagaaggttccgattatcgggaataagaaagtgaaggtgctgctttcaaatatgggagcgatttccaccgagtacatgggagcggctgtgcgcagtcttggtataaacgcagaagcgcttccagtcgcgacagctaaaactgttcaaatagcgcgcgctcacgcttcgggtaaggaatgcgttcccagccaccttgttttgggaagcgcattgcaatttttcttcagcgacaaataccgcaaggatgaactgtacctgctctttgtgccgattacgacggggccgtgcagaactgggcagtactatgtgttttacgaaaaccttttccgtgatatgcgtcttgaaaatgtcgtagtatttattctttcggctgacaattcctacacggaacttggaccgagtttcgctaaggaaatgtggaaagggcttgtgttatctgattatcttaaagacgttcaatgttccctgaaagcgacagccgttgatcccgtaaaagcgtctgcggattttgagcaatcgtggcgaagggttatgagcgctgttgaacacaacccgaaaaaattgtggaaagaactaaggcatgtcgctcgtgaagtaaaaaaaataccgttaaagcgaaaacttactgactgtccgcgcgtactgatagtaggtgaaatctatgtgcgccgcgatgactttgccgtaggcgaactaattgatttaatgagcgagcggggcgtgtcgtaa

SEQ ID NO: 30496 - protein, 516 aa, Unknown
  Obtained from environmental sample
  misc_feature (1)..(516): Xaa is any amino acid
MLMPHFRDMPSYEEKVHANFCPITQALPYYMEKAFPDIDKKKWLPLVVSFKFGEGKALELFCEMTKLLGIGEAETKAAFDTALAKQKSYFEAVEKMGHQALEDARKSDRPVIAVLGRPYNAFTPEANMGIPRKFTTRGYSIIPFDILPFRDEIIFPNMYWFFGQQDLKASKLLKKEDNIYLTFVSNFSCAPDSFILHYVKWMMGQKPFLVLELDSHSADAGVDTRVEAFLDIIDGYRAKRNQFEDERYDNGMRFVCEKMASGEFDLRIDNVKTGQKVPIIGNKKVKVLLSNMGAISTEYMGAAVRSLGINAEALPVATAKTVQIARAHASGKECVPSHLVLGSALQFFFSDKYRKDELYLLFVPITTGPCRTGQYYVFYENLFRDMRLENVVVFILSADNSYTELGPSFAKEMWKGLVLSDYLKDVQCSLKATAVDPVKASADFEQSWRRVMSAVEHNPKKLWKELRHVAREVKKIPLKRKLTDCPRVLIVGEIYVRRDDFAVGELIDLMSERGVS

SEQ ID NO: 30497 - DNA, 924 bp, Unknown
  Obtained from environmental sample
  misc_feature (1)..(924): n is a, c, g, or t
ttgttttcggaacggagctttgaacaggaacgttttcttatgtcggtccaaaaagacctgggtgcttatgaaggatccctcgtggaatttctttccaccagatcctccaacgcgctggcgcagaattttattgacatccaggccctgcggcggaaacttcccgtgtccaggcagattcgcgggaatccggcagagctgaaggaacgggagctgtacgccctgattttacattacctaaatctgggcgaggaagccattgaagaaaagcggggccggaatatctcttcctatactgcgatttacgaagagatgtctacgcttaaggaatacatttaccgtgaaatagatacgattagtaccggacgtttacggtcgcagcttggaacctatgaactttttttggcggaatcgggaaccatccagctttggaattttatctttgttatttccatgtccgccttttccatgctggtcctcttttattcgttgaatcgctttacagatccactgacgaggctttccgccatgaccagggagctttccagggggaactttgcggcccccgacatggaaacaggccgcggatcggttgatgaacttgatcaggtcatcgaagcctttaaccacatgaaaaccgaaatcagcaagtatatcgaagagatccgctggcaggaaaaccttaaacaggagtacatgcaggaaaagatcaggaacatgaaaatggaaggtctggtacggcacatggaaatttacgcgcttcaggcccagatgaatccgcactttctttttaacacaattaatacgggaatgcagcttgcaattgtggaaggggcggacagaacaggggaatacatggactacatggcgcagcttttcaggcatattatcagaaacaaggaaatcatcgttcccttgcgcccatga

SEQ ID NO: 30498 - protein, 307 aa, Unknown
  Obtained from environmental sample
  DOMAIN (249)...(306): Histidine kinase
  misc_feature (1)..(307): Xaa is any amino acid
MFSERSFEQERFLMSVQKDLGAYEGSLVEFLSTRSSNALAQNFIDIQALRRKLPVSRQIRGNPAELKERELYALILHYLNLGEEAIEEKRGRNISSYTAIYEEMSTLKEYIYREIDTISTGRLRSQLGTYELFLAESGTIQLWNFIFVISMSAFSMLVLFYSLNRFTDPLTRLSAMTRELSRGNFAAPDMETGRGSVDELDQVIEAFNHMKTEISKYIEEIRWQENLKQEYMQEKIRNMKMEGLVRHMEIYALQAQMNPHFLFNTINTGMQLAIVEGADRTGEYMDYMAQLFRHIIRNKEIIVPLRP

SEQ ID NO: 30499 - DNA, 549 bp, Unknown
  Obtained from environmental sample
  misc_feature (1)..(549): n is a, c, g, or t
atgaaagacattgactattcgcacacaggaagtgtttttatctgcgggttggaagttgaagaatccacaggaaatgaaattattgattttgtctatgaacaccccgagcttgaacttttctttgctccggggccgaggattagactcattccaaaaaaaaaaatggaacgccttttaaaccggcgggacagcagtaacaacggcccggttgttcatctaaaccaaacggaggcttttcgttttacaggcaaacgtacattggaagaagccgcgaattttattacgggaaaaaccggaaacagcctggtaataactcttggagaacacggctgctactgccttgataagaactggcaggaagggcgctatgttcaggctttccaggccaaagtgatcgacaccgtaggcgcaggcgacgctcactgcggcgctatcattgcctgcttaaaagagggaatgagccttgaagaagcctgccttaaagcaaacaagatcagcgccgccgtagtagaaattaaaggcgctgtgctgcccgccctcattcagtaa

SEQ ID NO: 30500 - protein, 182 aa, Unknown
  Obtained from environmental sample
  misc_feature (1)..(182): Xaa is any amino acid
MKDIDYSHTGSVFICGLEVEESTGNEIIDFVYEHPELELFFAPGPRIRLIPKKKMERLLNRRDSSNNGPVVHLNQTEAFRFTGKRTLEEAANFITGKTGNSLVITLGEHGCYCLDKNWQEGRYVQAFQAKVIDTVGAGDAHCGAIIACLKEGMSLEEACLKANKISAAVVEIKGAVLPALIQ

SEQ ID NO: 30501 - DNA, 543 bp, Unknown
  Obtained from environmental sample
  misc_feature (1)..(543): n is a, c, g, or t
atgagacgagttcttttatgccttcttattgtgtgggcattggcggcggtttgctgcgctgttgatacagatacaagcagcagtgagcagttagcagggagcagtgaaagaggcgaaacgccggaggcagtaccgccagcggttgtaccgcctgtggtagtcccgcctgcggtaattcagccagaaacagaaacaccggaaacagaaacgccggaggcagtaccgccggaaacaggtagcggtgagcagttagaaggtagcagtgaaaaaggcgaaacgccggaggaagtcccgccggaggttgagacacctcttgagggcggaaacgaggaagccgaaacgccggaagtaacaccgccggaagtgataccgccagaggacggaacgcaagaagccgaaacgccggtaatagtacagcctgcgattggcaaactggaattaaccgaactgcgtacagaattttcactcggtacaaaacgcgcggaatatatcaagttaaaggcaacggcggcggggaatttgaagggtttaagcctcacataa

SEQ ID NO: 30502 - protein, 180 aa, Unknown
  Obtained from environmental sample
  SIGNAL (1)...(20)
  misc_feature (1)..(180): Xaa is any amino acid
MRRVLLCLLIVWALAAVCCAVDTDTSSSEQLAGSSERGETPEAVPPAVVPPVVVPPAVIQPETETPETETPEAVPPETGSGEQLEGSSEKGETPEEVPPEVETPLEGGNEEAETPEVTPPEVIPPEDGTQEAETPVIVQPAIGKLELTELRTEFSLGTKRAEYIKLKATAAGNLKGLSLT

SEQ ID NO: 30503 - DNA, 312 bp, Unknown
  Obtained from environmental sample
  misc_feature (1)..(312): n is a, c, g, or t
atgattatggaatatggcctgtccgaaaaaaccatcagtgcgctcgaatcaattttcaaaaaatatcccgggatcaggcaagccgttctctatggcagccgcgcaaaaggaaattgccgcaatggctctgatatcgatatatctctcaagactgacggcacttttacgcatacagatctgctgcgcacagccggggatcttgacgattcggatctgccgtattttgtcgatatctcaatctacgatcaaatatccaaccccgatctgaaaacacacatagatcagattggcaaggttttgtactcagcctga

SEQ ID NO: 30504 - protein, 103 aa, Unknown
  Obtained from environmental sample
  DOMAIN (8)...(101): Nucleotidyltransferase domain
  misc_feature (1)..(103): Xaa is any amino acid
MIMEYGLSEKTISALESIFKKYPGIRQAVLYGSRAKGNCRNGSDIDISLKTDGTFTHTDLLRTAGDLDDSDLPYFVDISIYDQISNPDLKTHIDQIGKVLYSA

SEQ ID NO: 30505 - DNA, 1002 bp, Unknown
  Obtained from environmental sample
  misc_feature (1)..(1002): n is a, c, g, or t
atgccctcgtcaaagtctgccgccaccgcaggcggcgtcgccaccttcggtggcgtttatattttccttggccccgaaatcggaaaaaaacaggacgagatagagcaaataaaaaaaaagctctccgcaagcggagtttacgaggaaactgttttctatgccggcgaaacgccaataataaatatagttaacacaattcagaaccacagcctgtttgcccaatcgcgcctgtttataattaaaaacgcggaacagataaaaaagaaagacgagacagacgccgtcgcttcatgcatgaaagaattggaagagggcgctacgctgatacttgtttccgatgaatttaaaatttcttcgggcctggaaaacgcctgtcccaaagaaaaccgcaggattttttacgagatgtttgaaagggaaaaaagcgcgtgggtgcgctctttttttcagcgggcgggccttggcattgatccttcgggcattgacgcaatcctggaactggttgaaaacaataccgacgctatgcagcgcgaatgctcaaggcttttgttttttttgccgaaagaccgcccggcaggtgcgcaagacgtagagcgatggctttcccacagccgggaagagtcggcttttaccctgttttcccggattgccgccggtgacggctcaaaggcaatagaatcgcttcacaccctgctcgctgcaaaggaaagcccaatcggcattctcgccggccttgcatggtctttcagaaaactccgtgactacctggtcctgtctgaaaacggcgagccggataattttgaattgaagaaaatcggtctttccgcaataacaaagaacaattatgccgccgcttcacgccgctacaacataagggatgtagaaaactgcctcgctaccaccgccgaatatgacatacttacccgcgcgtccggcccggccctggaaggaacattgatggatgtttatcttttaaagatcatgaatccgggtagaaattaa

SEQ ID NO: 30506 - protein, 333 aa, Unknown
  Obtained from environmental sample
  DOMAIN (20)...(320): DNA polymerase III, delta subunit
  misc_feature (1)..(333): Xaa is any amino acid
MPSSKSAATAGGVATFGGVYIFLGPEIGKKQDEIEQIKKKLSASGVYEETVFYAGETPIINIVNTIQNHSLFAQSRLFIIKNAEQIKKKDETDAVASCMKELEEGATLILVSDEFKISSGLENACPKENRRIFYEMFEREKSAWVRSFFQRAGLGIDPSGIDAILELVENNTDAMQRECSRLLFFLPKDRPAGAQDVERWLSHSREESAFTLFSRIAAGDGSKAIESLHTLLAAKESPIGILAGLAWSFRKLRDYLVLSENGEPDNFELKKIGLSAITKNNYAAASRRYNIRDVENCLATTAEYDILTRASGPALEGTLMDVYLLKIMNPGRN

SEQ ID NO: 30507 - DNA, 510 bp, Unknown
  Obtained from environmental sample
  misc_feature (1)..(510): n is a, c, g, or t
atggaaaaaaacaaggacaaggtacagcagtacctcgaacgctttgtcgacattcagcttgatatgcaccgccatagcgcgacaaggcttccgctgcttaccgaaaaaatggagcggaaaattaaagcttccggccttgatgctaccgcccgctatgagcttttgggaaggctggcgggaatgcccaaacataccaaactttgccacggcgactttaaccccagcaacgtcatcatcaacgatagggacgaggcgtacatcatcgactggtcacacgccgcccagggcaacgcctcggcggacgcggcgcaaacctacctgctgttctggcttacgggcaacatcaccctggcggataagtaccttacgctgttctgcgaaaaaagcgacacggcgaaacagtatgtggaaaagtggctttccattgtggcggcttcacggcttcccaaggcaaagccggaagaaaaagaatttctgctgcattgggccaatgtagtggaatacgaatag

SEQ ID NO: 30508 - protein, 169 aa, Unknown
  Obtained from environmental sample
  misc_feature (1)..(169): Xaa is any amino acid
MEKNKDKVQQYLERFVDIQLDMHRHSATRLPLLTEKMERKIKASGLDATARYELLGRLAGMPKHTKLCHGDFNPSNVIINDRDEAYIIDWSHAAQGNASADAAQTYLLFWLTGNITLADKYLTLFCEKSDTAKQYVEKWLSIVAASRLPKAKPEEKEFLLHWANVVEYE

SEQ ID NO: 30509 - DNA, 594 bp, Unknown
  Obtained from environmental sample
  misc_feature (1)..(594): n is a, c, g, or t
atgttaaggacggcggccttgccggttgagctggaagtgatcaaccaacagtcaatcggggcgtcaatgggagaagataccatccgccagggtttctttgcacttttggggggcgttatcgcggttttggtatttatggttttttattacaaagcatcgggaatcaacgcggttatagcccagatactcaatttttacattatgttcagcgtcctttcggcgtttaattttaccctgaccttgcccagcattgccggcttcatactcaccatcggtatggccgttgacgccagcgtgatcatcttcgagcgcatgaaggaagaattgcgcgacggcaaaggccgcagggctgcgattgacgccggctttgacaaggctttctgggccattatggattccaatatcacaaccttcattgcggctttgttcctttcgcagttaggttcgggcccgataaaaggtttcgcggttgcgctggccattgggattttctcatccgtgtttaccgccctttttgtgtcccggttgattttcgatttcggtaccgatgtttttggcagcaagaagctctccgttagctggagaataaagtag

SEQ ID NO: 30510 - protein, 197 aa, Unknown
  Obtained from environmental sample
  DOMAIN (1)...(183): Protein export membrane protein
  misc_feature (1)..(197): Xaa is any amino acid
MLRTAALPVELEVINQQSIGASMGEDTIRQGFFALLGGVIAVLVFMVFYYKASGINAVIAQILNFYIMFSVLSAFNFTLTLPSIAGFILTIGMAVDASVIIFERMKEELRDGKGRRAAIDAGFDKAFWAIMDSNITTFIAALFLSQLGSGPIKGFAVALAIGIFSSVFTALFVSRLIFDFGTDVFGSKKLSVSWRIK

SEQ ID NO: 30511 - DNA, 636 bp, Unknown
  Obtained from environmental sample
  misc_feature (1)..(636): n is a, c, g, or t
atggagaggggaaaattaggcacgctcgtggactgcctgagcgctgcagcggacaaacttcctgcgcgaccggattattcggccagtaagtatacaaatcgagatgccgtgaacagcgcgtttgcggcattcttctttcagtttccgtcattgctgaggtatatgcatgagatgcaagagcgggagaaacgggataatgtacagagcctgtttgatgttcaagggataccgagcgacaaccagatacggaacatcgtggacgggatagagtcagaggcgatagagccggtatttaacgagacgctgaaagcagcgcaagggaccgggatactagacgaataccgagtgttggacggaggggtcctgctggcgatagacggggtgtggtatttcagttccgggaatatccattgcccgcattgtttgacgaaaaaaacaacggacaaggacggggaggagcagacaacgtattatcacgcggcggtggcagctgcggtggtaaaaccggggtgtaccaaagtattgcctgtggccgcggagataatcaggaacagcgcggggaaaagaaacaggattgcgagcttgcggccgggaaacggtggctggaagcccatgcgacagagtacgcatggctga

SEQ ID NO: 30512 - protein, 211 aa, Unknown
  Obtained from environmental sample
  misc_feature (1)..(211): Xaa is any amino acid
MERGKLGTLVDCLSAAADKLPARPDYSASKYTNRDAVNSAFAAFFFQFPSLLRYMHEMQEREKRDNVQSLFDVQGIPSDNQIRNIVDGIESEAIEPVFNETLKAAQGTGILDEYRVLDGGVLLAIDGVWYFSSGNIHCPHCLTKKTTDKDGEEQTTYYHAAVAAAVVKPGCTKVLPVAAEIIRNSAGKRNRIASLRPGNGGWKPMRQSTHG

SEQ ID NO: 30513 - DNA, 444 bp, Unknown
  Obtained from environmental sample
  misc_feature (1)..(444): n is a, c, g, or t
gtggtatttcagttccgggaatatccattgcccgcattgtttgacgaaaaaaacaacggacaaggacggggaggagcagacaacgtattatcacgcggcggtggcagctgcggtggtaaaaccggggtgtaccaaagtattgcctgtggccgcggagataatcaggaacagcgcggggaaaagaaacaggattgcgagcttgcggccgggaaacggtggctggaagcccatgcgacagagtacgcatggctgaaaccgacggttttaggggatgatttgtattcgaaccggccattttgcgagaaaatagtgcggcaggggtggagttttatctttacctgcaaggatgaatcgcacaaatggcttacggagacggtggcaaactcctgtttgcgcgaggtgaaggaaagaaaaatgggatccccggaaagaagaaacgggtga

SEQ ID NO: 30514 - protein, 147 aa, Unknown
  Obtained from environmental sample
  misc_feature (1)..(147): Xaa is any amino acid
MVFQFREYPLPALFDEKNNGQGRGGADNVLSRGGGSCGGKTGVYQSIACGRGDNQEQRGEKKQDCELAAGKRWLEAHATEYAWLKPTVLGDDLYSNRPFCEKIVRQGWSFIFTCKDESHKWLTETVANSCLREVKERKMGSPERRNG

SEQ ID NO: 30515 - DNA, 1599 bp, Unknown
  Obtained from environmental sample
  misc_feature (1)..(1599): n is a, c, g, or t
atggacaatgaacggaaaaagattatagcggtagatgataacgtggaaaacctgaccgccctcaagaatacccttaaaaacatatacgaggtatatccctgcccctctgcggcgaagatgtttgatctgctgaaacacgttcatccggaattaatcctgctggatgtggagatgccggaaatgaacgggtatgaagccattataaaactgaaaggcgacgacgtgttcaaggacatacccgttatgttccttacttccatgagcgacgcgcaaagcgagatggaaggattacgttacggcgcggttgattatatacgcaaaccctttgtcgccccgctgctgctccagcggataaaaacgtatctggccatcatggaacagcaggcggaaatcaagcatctgcttgatttaaaaacggaagaagtcaaactgcgagaagcggcggaactggcggcggaaaacgcgtcccaggccaagagcgacttcctttcccacatgagccacgagatacgatccccgctaaacgccgtcataggcatgataaacgtcgcgaacgaggaaaaggatattgagggcgtaagagtttatcttgaaaaagccggcaacgcggcaaagcaggtgctgggcgtttatcacgatattcttgacatgtccaaaattgaggctaacaagcttgagctttccgacagtgaatttgatttcccgaagatgatgacgaacattgtggacgtaacaggcataaaggcgcaggaaaaacacatacagattgtaaccgacatcagcaaggatattccgtccgtcgtaatatgcgacgaactgcggctggcgcaggttattacaaaccttatgacaaacgcgattaaatttacccccgataacggcaaggttcagcttaacgcgcaaaagctggaagaaaaagatgatgacgttacggtaagaattgaagttgcggactcggggatcggtatttcgcctgaacagcagacgaaacttttctcggcttacaatcaggccgaccgcaccatttcgaaacaattcggcggcacaggattggggcttgccatttccaaacggattatcgagcttatgcagggaaagatttggattgaatcggaactgggcaagggcgcgaaattcatttttaccttaaaaatgaagaagggaaaacccgtcgcggcctcggccgatgccgcgtcttccgcttccgccgaagcccccaaacccgtagtcccaagcataaaggcgacagatctgcatctacagggttataccatattggcggcggaagacatggactttaacagggaagtcctttccaagtatatggaaaaaaccggcgttacaattgattacgccgaaaacggcaaagaggccgttgagaagttcaaagtgaatcacgcaaaatattgcatgatccttatggacattaacatgcccgaaatggacggggacgaagcgacaaaggtaataaggtcgcttgacatcccaaaagcaaaggagatacctattgtcgcaatgaccgcggatgtattcaaggaagacgttgaaaaatgcctttccgtgggcatgaacgaccaatctaaaactcggccgatctga

SEQ ID NO: 30516 - protein, 532 aa, Unknown
  Obtained from environmental sample
  DOMAIN (158)...(223): His Kinase A (phosphoacceptor) domain
  misc_feature (1)..(532): Xaa is any amino acid
MDNERKKIIAVDDNVENLTALKNTLKNIYEVYPCPSAAKMFDLLKHVHPELILLDVEMPEMNGYEAIIKLKGDDVFKDIPVMFLTSMSDAQSEMEGLRYGAVDYIRKPFVAPLLLQRIKTYLAIMEQQAEIKHLLDLKTEEVKLREAAELAAENASQAKSDFLSHMSHEIRSPLNAVIGMINVANEEKDIEGVRVYLEKAGNAAKQVLGVYHDILDMSKIEANKLELSDSEFDFPKMMTNIVDVTGIKAQEKHIQIVTDISKDIPSVVICDELRLAQVITNLMTNAIKFTPDNGKVQLNAQKLEEKDDDVTVRIEVADSGIGISPEQQTKLFSAYNQADRTISKQFGGTGLGLAISKRIIELMQGKIWIESELGKGAKFIFTLKMKKGKPVAASADAASSASAEAPKPVVPSIKATDLHLQGYTILAAEDMDFNREVLSKYMEKTGVTIDYAENGKEAVEKFKVNHAKYCMILMDINMPEMDGDEATKVIRSLDIPKAKEIPIVAMTADVFKEDVEKCLSVGMNDQSKTRPI

SEQ ID NO: 30517 - DNA, 1662 bp, Unknown
  Obtained from environmental sample
  misc_feature (1)..(1662): n is a, c, g, or t
atgacggggcaatactccatgctgatccgcacgacggacggatacaaggtgcagtcttttacaaacgccattatcaatatagacaataccccgcccatgattgacctgggaaggcccaagaacgacgcccctattggccggacgcttgatatcagcggccagatatatgacaacctcaaagtcaaatttatttcaatcctggtcgcggatacaaataacccggactcttttatggtcgtcgagccgcctgtcgagcccgtggtcatgcaaacgctggacgtccggtcttacagggacggggattacaccctgacaattaccgcggaggatatgtcgggcaaccagacggttgttgtccgcaatgtcaggtttataaaggcaaaggctgcttccgagattgcccttatcaatcccctgtccggcataacccaccgcggctccaccgttatttcgggaaggattaccggcgcggtaattcccgaaagcgtcgaattgatgctggacagggtaaagattgccgatgtcgaggtgaacaaatacgggattttccgccacgaactgcccgatacttttatccatgaagacgggagcatcgggatttccgcggcgtttcaggccccctcgggcgaatgggtcgcctcccatgaaaacctggtaaaggttgaaaggtacgggccggtgctggaaattacaagccacaaagacggggacgtgataaccggccgtccctggattgcgggaaacgcctatatgttccggccccccggcgaaatggtcaacaggcagataagggcattatacggggtcgccaaagtcgagcttagttttgacaacggacgcacttttgtgccggcaaaaggcaccggcgactggaaattgcgcctggaaaccagcgagatggaggtaggcatactgcccatcattgtcagggcgacttttaacaatgatgaatttgccgtgcgccgcatattgcttatagtggatccggtgctgcccctggtaaacgttatagggcctgtcgagaacagcgggtaccgggataaggtaaacgtgtttggttccaccatggatgactatgacatggacagcgtggaagtgagcctgcgtccgggaaacaagtttggatattcggtgcccggctttatccagggcctgtactttgacaccagcttcctgggcggcgcgaacttttgcgccgggctggggctgaccttcttaagcgacaacgtcaaagtgcagggtaacacctcccagacgccttcggggcgttattcaggctgggcttttggcttcaaggtgattggtaatgtttgggctgaaaacctcggcaagtggtttggccccgactgggcgttctggaggaccagtgtcggagtgggtgcgcatttctcgtactaccttatggaagaaggcgagaatcccctgtggatgggacagatcatcgcccagtgggagattataaaggcggacatgagtttctttttcccgaaatggaagtactttaaatcattgtcactttactttgagccgggcctttggtttgccccctcggacgtgaacagtgactgggaatacgatcctgacacccataaacccctaaaaaacaaagcctgggccatcaggcccactatagctattggtatacgggtgaatttattctag

SEQ ID NO: 30518 - protein, 553 aa, Unknown
  Obtained from environmental sample
  misc_feature (1)..(553): Xaa is any amino acid
MTGQYSMLIRTTDGYKVQSFTNAIINIDNTPPMIDLGRPKNDAPIGRTLDISGQIYDNLKVKFISILVADTNNPDSFMVVEPPVEPVVMQTLDVRSYRDGDYTLTITAEDMSGNQTVVVRNVRFIKAKAASEIALINPLSGITHRGSTVISGRITGAVIPESVELMLDRVKIADVEVNKYGIFRHELPDTFIHEDGSIGISAAFQAPSGEWVASHENLVKVERYGPVLEITSHKDGDVITGRPWIAGNAYMFRPPGEMVNRQIRALYGVAKVELSFDNGRTFVPAKGTGDWKLRLETSEMEVGILPIIVRATFNNDEFAVRRILLIVDPVLPLVNVIGPVENSGYRDKVNVFGSTMDDYDMDSVEVSLRPGNKFGYSVPGFIQGLYFDTSFLGGANFCAGLGLTFLSDNVKVQGNTSQTPSGRYSGWAFGFKVIGNVWAENLGKWFGPDWAFWRTSVGVGAHFSYYLMEEGENPLWMGQIIAQWEIIKADMSFFFPKWKYFKSLSLYFEPGLWFAPSDVNSDWEYDPDTHKPLKNKAWAIRPTIAIGIRVNLF

SEQ ID NO: 30519 - DNA, 993 bp, Unknown
  Obtained from environmental sample
  misc_feature (1)..(993): n is a, c, g, or t
atggacaaatgcgtcaaatgcggccgctgcgtggaggcctgccagacaattcagacagtccgcgcgataaacagttcccacaggagcgtcaattacaggatatcaacggcgttcaaccagccttatggggacagcccctgcgtcttctgcggatattgcgaaacggtctgccccgtgggggcgatctgcgaaaacgatcaaagcgccgaagcctgggccgcgattaacaacaaagatcgcaaaacggccgttcaatttgacaagacactgtgtacgaaattggacacagtgtcaggcctccccgagggaacagcctgcgccggtaaaatcgtcaccgcgctcaaacggatcggtttcgacaaggtttatgacgcccaattcgcggcggatattgcggcatcggaactcaacattgaactgcagcaccgcgttaataacagcggcagcccgccccaaggcagacaagatttgccgcttatcagcgcctgttcacaaagcgcggttaaatttatcgaaaatttctaccctgacctcactccccttctttcaccgtgcagaagcccgcgggaagtattcgcttcaacggtaaaagaagaaaaaacaacggttatctccattgagtcctgcgtaagcaacaaaagcaagtctaaacagccgtccgccaatgagtttgtccctccctgtcctgacataacgcttaccgtaaaagagcttgcgcggatgttaaaactcgccggcatagaattttcttccctgcccgaaagccattttgatacgtttaagactgcggagaaaccggatgttaacttattgagaatcaaattccttgccaacggcctgggcaaagcccggactattctggattcgattagaaaaggcgaatgtggcgccaactttgttgaaatcagaagctgccctctggttgaagactgcgcgaatctcccctgcgcgcgctgcgagacagcaggttccacagctattcaaatttattga

SEQ ID NO: 30520 - protein, 330 aa, Unknown
  Obtained from environmental sample
  DOMAIN (40)...(63): 4Fe-4S binding domain
  misc_feature (1)..(330): Xaa is any amino acid
MDKCVKCGRCVEACQTIQTVRAINSSHRSVNYRISTAFNQPYGDSPCVFCGYCETVCPVGAICENDQSAEAWAAINNKDRKTAVQFDKTLCTKLDTVSGLPEGTACAGKIVTALKRIGFDKVYDAQFAADIAASELNIELQHRVNNSGSPPQGRQDLPLISACSQSAVKFIENFYPDLTPLLSPCRSPREVFASTVKEEKTTVISIESCVSNKSKSKQPSANEFVPPCPDITLTVKELARMLKLAGIEFSSLPESHFDTFKTAEKPDVNLLRIKFLANGLGKARTILDSIRKGECGANFVEIRSCPLVEDCANLPCARCETAGSTAIQIY

SEQ ID NO: 30521 - DNA, 1140 bp, Unknown
  Obtained from environmental sample
  misc_feature (1)..(1140): n is a, c, g, or t
gtggatattacacatggtacaaactacgccgcagtaacggggctaaagataggcgaatatagtattgccaaaggttaccaatccacgcttgcggttacatctgtcacaggtaaaaaatacggcgacgcggcgttccagttagcaaccaccggcggcaacggtagcggcgcagtaaactatacgcttgtttcggggacggcggcaactgttacaagcggtggtttagttaccattaccggcgcagggaatattgtcgtcactgcaaccaaagcaagcgatgcgaattataacgcggtaacatcggcgcaattgactatcagcattactaaaaaaacacctgttgtcggcgatttgaactattccattccaaccactcacatatataacggcaatgctcaaggtattggcagcgtaacggcaaagagcgggattattggacttggcgcaataacggttaaatatgatggaaatacaaccgtaccgactaacgcaggtgcttacgccgtaacagttgatattgcagagagtacaaactatgctgcagcaacaggtttgtcgctcggcaactacaccatcgacatgactgttatcaccatcacctctcagccgaaagagataccctttgttcctgaaggtagcatatcgggcaacctcagtgtttcggcaagcgttactgaaggcgcaatgctcagttatcagtggtacagcaatacaacagcgagcaataccggcggtactgctatttcgggcgcaacctccgctaactatacaataccaacctcgctcgcagatggaacgtattactatttctgcgaagtacgcgctgcaaatgcgacttcgattcgttcaaatgtggcaacggtaacggtatcttttatttcagtggcacacatcgcaggagtctccccgacagccatagcgggaacgcctttaacgctatcaggcattgttttaccttccaatgcaacaaaacaaaaccaaaccatcacatggagcgtttattctgcgggaaccaccggcgcaaccattaacggcaatatccttaacactactgccactggaatggtaatggtcggggctactatagcagatggcttggacgttggaaaagatttcacgcagagatttcttattacgtaa

SEQ ID NO: 30522 - protein, 379 aa, Unknown
  Obtained from environmental sample
  misc_feature (1)..(379): Xaa is any amino acid
MDITHGTNYAAVTGLKIGEYSIAKGYQSTLAVTSVTGKKYGDAAFQLATTGGNGSGAVNYTLVSGTAATVTSGGLVTITGAGNIVVTATKASDANYNAVTSAQLTISITKKTPVVGDLNYSIPTTHIYNGNAQGIGSVTAKSGIIGLGAITVKYDGNTTVPTNAGAYAVTVDIAESTNYAAATGLSLGNYTIDMTVITITSQPKEIPFVPEGSISGNLSVSASVTEGAMLSYQWYSNTTASNTGGTAISGATSANYTIPTSLADGTYYYFCEVRAANATSIRSNVATVTVSFISVAHIAGVSPTAIAGTPLTLSGIVLPSNATKQNQTITWSVYSAGTTGATINGNILNTTATGMVMVGATIADGLDVGKDFTQRFLIT

SEQ ID NO: 30523 - DNA, 891 bp, Unknown
  Obtained from environmental sample
  misc_feature (1)..(891): n is a, c, g, or t
gtgttatcgcgaaaatatgtgagcacaatggaacatgttgattcggattcgtcaaatccttggggtatacagtttatgcgtatgtttgatatgtctaacgattccgacttattcgaaaatgaaccaactaccaacggactcccactgtatgaagcgaaaatgatgcaccagtttgatcaccgctgggctacctacaccgattccggcgacaccgtagatgtaaccgcaaatcaaaaacaagatgtaaattttaccgttaagcctcgttattggattgataaaaacgaagtattggaaagaattgagggagatgaatataacaaaagaccaattccgaaatggctgatgggttggcgagatattaccaatgcgacaaatgaaaggacagtaattgtaagtatacttccaataactgctgtgaatcataaattaccgctttttgttttcaatgataaaaacacaactgttttttcatgttgtttttatggaaacctaaattcattaactctcgactatatagcaagacaaaaagtcggcggtacagatttaacataccattatttgaaacaattccccgtccttcccccaaacgcctattctcaggacgacattgatttcatcgttcctcgtgtgcttgagcttacctataccgccgtagaccttatcccctttgcggaagacctctgggattgtgcagactcaaaaatgaggcgctattttctggaacagctccacgggacacaagccgcaaaatttgaagagtttaccaagtacgacaccgcccatctgccggagaagacggaaggtcaaggcaagcagacaggattggcagactttctcccgccctttgtttttacccccaaagacgggcattgctccgtgccgacttag

SEQ ID NO: 30524 - protein, 296 aa, Unknown
  Obtained from environmental sample
  misc_feature (1)..(296): Xaa is any amino acid
MLSRKYVSTMEHVDSDSSNPWGIQFMRMFDMSNDSDLFENEPTTNGLPLYEAKMMHQFDHRWATYTDSGDTVDVTANQKQDVNFTVKPRYWIDKNEVLERIEGDEYNKRPIPKWLMGWRDITNATNERTVIVSILPITAVNHKLPLFVFNDKNTTVFSCCFYGNLNSLTLDYIARQKVGGTDLTYHYLKQFPVLPPNAYSQDDIDFIVPRVLELTYTAVDLIPFAEDLWDCADSKMRRYFLEQLHGTQAAKFEEFTKYDTAHLPEKTEGQGKQTGLADFLPPFVFTPKDGHCSVPT

SEQ ID NO: 30525 - DNA, 1143 bp, Unknown
  Obtained from environmental sample
  misc_feature (1)..(1143): n is a, c, g, or t
atgcgtttccggtactctgccgaaaagaacggtaagttagtcaaaaaagcgatagtctatactcatgatgagcatggaatcaactttgaagatgtggacagcgaagcgataggcatagtacggcggctgaaagacgcaggctacgaaagttacattgtcggcggagcggtgcgggacttaatcctcaagaaaaaacccaaggattttgatattgtcagcgaagcaaacccttcccggattaaaaaaatttttcgcaattcacgtatcatcggcaggcgtttcaaattggttcatgtgtattttggcccccgtattttcgaggttgctacattccgctcgcttaagaacggtcttaccagcaatacctttggaaccatcagcgatgacgtactccgccgtgattttaccatgaacgcgttgttctacgatcccgaacagcaaattgtcgtggactatgtcggcggcatgaaggatataaaaaacaaacaggtaaaaaacataatcaatctttccgacatttttacggacgatcctgtaagaatgatccgagcggtaaaatacgccgcaacgaccggtttttcccttccgttgaatttgaaaatgaaaataacaagccagtcgaatttgcttagaaccatttctccctcgcggcttacggaggaaattttcaaaattattaattcggataaagcgggaattattgttgatatgctggataaaataggactctattcttacctgcagcctcaagcggcggaacttatgcgcaagaacgcaaatttcaaaaagagttacttgcagacaatgacggacttaaaaggaagagagaaccagagaggacaggctatttcttctcttttccgcgactatcttgagggcgcatacgaatggaaaccgggtccgattgaaaactacaaagatatttgtaaaagcgtacgtaattttgttctgcccatgaatccgcctcgttttgaacttgaatccgcccttaaaaaatttctttccgcaaagggaataacaattaaaagaactccttttaaatcggcggaaggggaaacgtcgtccgcaaaaagaagacgccgcagaagaaaaccaaaatcggcgtccgccgacaatgccaatgccagtacggaaaaaaattag

SEQ ID NO: 30526 - protein, 380 aa, Unknown
  Obtained from environmental sample
  DOMAIN (108)...(257): Poly A polymerase family
  misc_feature (1)..(380): Xaa is any amino acid
MRFRYSAEKNGKLVKKAIVYTHDEHGINFEDVDSEAIGIVRRLKDAGYESYIVGGAVRDLILKKKPKDFDIVSEANPSRIKKIFRNSRIIGRRFKLVHVYFGPRIFEVATFRSLKNGLTSNTFGTISDDVLRRDFTMNALFYDPEQQIVVDYVGGMKDIKNKQVKNIINLSDIFTDDPVRMIRAVKYAATTGFSLPLNLKMKITSQSNLLRTISPSRLTEEIFKIINSDKAGIIVDMLDKIGLYSYLQPQAAELMRKNANFKKSYLQTMTDLKGRENQRGQAISSLFRDYLEGAYEWKPGPIENYKDICKSVRNFVLPMNPPRFELESALKKFLSAKGITIKRTPFKSAEGETSSAKRRRRRRKPKSASADNANASTEKN

SEQ ID NO: 30527 - DNA, 612 bp, Unknown
  Obtained from environmental sample
  misc_feature (1)..(612): n is a, c, g, or t
gtgtccacgataaacagagacgtcgcggaaaccgcctcggcctatccagggataatccaattcggagcgatgcacccagaaatggaagatttcgagccggagatagacttcatggccgcgcaccagataaaaggcatcaaactgcacccggagtaccaatacagccacgtagacgaccccaaggccttccccatctacgaaaaactggcctccgccggcctgatagtagtattccactccggcaaagaccccggccccttcaccaacgaccacgccctcccccccgcgctgaaaaaaatccgcgaaaacttccccaccctgaaaatggtagccgcccaccttggcggctggatggtctggaaagaggtagaagaaaccctagccggcctaaacctatttttcgacacctcagccatctataaactgctccctccggaaattttcgtccgtatatgcagaaaacacggcatcgataaaatcctattcggcagcgattcaccctggtatgatcaaggggcaagcgtagagtggataaaaaaaagcggcctaaacgataccgagatagaagccgtcttcggtgaaaatgccaagagattactaggattgtgttga

SEQ ID NO: 30528 - protein, 203 aa, Unknown
  Obtained from environmental sample
  DOMAIN (1)...(202): Amidohydrolase
  misc_feature (1)..(203): Xaa is any amino acid
MSTINRDVAETASAYPGIIQFGAMHPEMEDFEPEIDFMAAHQIKGIKLHPEYQYSHVDDPKAFPIYEKLASAGLIVVFHSGKDPGPFTNDHALPPALKKIRENFPTLKMVAAHLGGWMVWKEVEETLAGLNLFFDTSAIYKLLPPEIFVRICRKHGIDKILFGSDSPWYDQGASVEWIKKSGLNDTEIEAVFGENAKRLLGLC

SEQ ID NO: 30529 - DNA, 576 bp, Unknown
  Obtained from environmental sample
  misc_feature (1)..(576): n is a, c, g, or t
atgattgaacttgtggcgtttctggggaatcccgggaaggaatattctcataaccggcataacgcaggtttcttgcttgccgaaaagccaataattaattctgacctcatgtggcaaaagaaattcaagggattctacaccgtttttggcgggcgcgttcattttatcaagcccctgactttcatgaatctttcaggcgagtcggtatcccaggcagcttcgtttttcaaaataaaaccagaggccgtcattgtggttcatgacgagctggaactgccccttggagttgtttcgcttaaatctggcggaggtctaggcgggcataacgggcttcgttcaatgaaagcgtcgctgggcagcgcggacttctggcgcatcagactcggcatcggaaggccggtttcggacgataagcgcgttattgactgggtgctttcagacttcgactcaggcgaaagagaaattctggacaaggttcttgatgccgccgctgagcttctcctgaatgttcttgccggcaatcctgaggattttcttcctgaatgggcaaaaaagaaggtgctgcaagatgtctga

SEQ ID NO: 30530 - protein, 191 aa, Unknown
  Obtained from environmental sample
  DOMAIN (4)...(184): Peptidyl-tRNA hydrolase
  misc_feature (1)..(191): Xaa is any amino acid
MIELVAFLGNPGKEYSHNRHNAGFLLAEKPIINSDLMWQKKFKGFYTVFGGRVHFIKPLTFMNLSGESVSQAASFFKIKPEAVIVVHDELELPLGVVSLKSGGGLGGHNGLRSMKASLGSADFWRIRLGIGRPVSDDKRVIDWVLSDFDSGEREILDKVLDAAAELLLNVLAGNPEDFLPEWAKKKVLQDV

SEQ ID NO: 30531 - DNA, 720 bp, Unknown
  Obtained from environmental sample
  misc_feature (1)..(720): n is a, c, g, or t
atgttcttgccggcaatcctgaggattttcttcctgaatgggcaaaaaagaaggtgctgcaagatgtctgaagccctgcttaaagaggggcttggcaaattaggccttcaaggcagcgaaggccggattctcccgctgcttgaacgttacgtcgaagaaatagaactttttaatccggcttacggtcttgtaaaggtaaaagatcgtgaagaattgatagtaaagcatattcttgattcccttgctccgataaacgttatactaaatatttttcagggttgcgcgagtttaaatattgcggacatcggttcaggcgccggtctgccgggcatacccctggcaatttgcctgccccacgcggcttttaccctgattgagcgaatgggaaggcgcgccggctttctaagggacgccgtcgccgtacttggcttgccgaatgtcactgttgaggaagcggatatcgatgagcttacccttgccgccgatgaccgctatgacttagttgttttcagggctttcaggcctttggatagcgctatcctaaaagggttctttgccttgcttaagccgacaggattgcttgcggcatacaagggccgcaggcaggcaatcgaagaagagatgagcggcttgcgaaatgtatcctgggaagcgattccattggaagtgcctttcttggaagaagagcgtcatctggtgatgattaaagcttgtctctaa

SEQ ID NO: 30532 - protein, 239 aa, Unknown
  Obtained from environmental sample
  DOMAIN (43)...(233): Glucose inhibited division protein
  misc_feature (1)..(239): Xaa is any amino acid
MFLPAILRIFFLNGQKRRCCKMSEALLKEGLGKLGLQGSEGRILPLLERYVEEIELFNPAYGLVKVKDREELIVKHILDSLAPINVILNIFQGCASLNIADIGSGAGLPGIPLAICLPHAAFTLIERMGRRAGFLRDAVAVLGLPNVTVEEADIDELTLAADDRYDLVVFRAFRPLDSAILKGFFALLKPTGLLAAYKGRRQAIEEEMSGLRNVSWEAIPLEVPFLEEERHLVMIKACL

SEQ ID NO: 30533 - DNA, 312 bp, Unknown
  Obtained from environmental sample
  misc_feature (1)..(312): n is a, c, g, or t
atgccaaatgtgcgaaacagctacagcggcaatatgnntggtagtgagccctcagcccgatatgccggaagctttttcccgcaagactgcggcgcggcgacacagaacatacttctggaagccgtctctatgggtcttggtacttgctggtgcggcgtatatcccaaggaaaaactggtagccgcaatccgtaacatctttaatatccccgaaccaaaaatccccttcaatgtgattgcgattggaattcctgatgaatcccctgccaaaaggggtctttttgaggaaaagaaagttacgtacattgattag

SEQ ID NO: 30534 - protein, 103 aa, Unknown
  Obtained from environmental sample
  misc_feature (1)..(103): Xaa is any amino acid
MPNVRNSYSGNMXGSEPSARYAGSFFPQDCGAATQNILLEAVSMGLGTCWCGVYPKEKLVAAIRNIFNIPEPKIPFNVIAIGIPDESPAKRGLFEEKKVTYID

SEQ ID NO: 30535 - DNA, 591 bp, Unknown
  Obtained from environmental sample
  misc_feature (1)..(591): n is a, c, g, or t
atggcagccgccagcatcgaggaatgtgtggagcaggcggtttgcggcggctgtacggtggtgcaactgagggaaaaaaccgcgtcttcgcgcgagttttatgaaacggcggcgcgggtgcgcaaaattacggctgatttgggcgtaccgctgattatcaatgaccgcgccgatattgcgtcagcggtaaacgcggacggcgtgcatatcgggcaggatgatttgccgcttgacgcggtgcgccgcataatgggaaaagacgcaattatcggcgcttcggtaaacaatgtgaatgaagccctggccgccgccgctctgggcgctgattatctgggtgtgggcgcgatgttcgcgaccggaaccaaaacagacgcggatattaccagcatggaggaattgcggcgcatacgcactgaaattaaaattcccattgtggcgattggcggtattaacaaaaataatgtgccgctttttgcgggaacgggaattgacgggatagccgttgtttccgccatcgttgctcaaaaagacgcaagaagtgcggcgcgtgaactgaaagcattgttttatagtacaatgggaaaaaaatga

SEQ ID NO: 30536 - protein, 196 aa, Unknown
  Obtained from environmental sample
  DOMAIN (6)...(172): Thiamine monophosphate synthase/TENI
  misc_feature (1)..(196): Xaa is any amino acid
MAAASIEECVEQAVCGGCTVVQLREKTASSREFYETAARVRKITADLGVPLIINDRADIASAVNADGVHIGQDDLPLDAVRRIMGKDAIIGASVNNVNEALAAAALGADYLGVGAMFATGTKTDADITSMEELRRIRTEIKIPIVAIGGINKNNVPLFAGTGIDGIAVVSAIVAQKDARSAARELKALFYSTMGKK

SEQ ID NO: 30537 - DNA, 771 bp, Unknown
  Obtained from environmental sample
  misc_feature (1)..(771): n is a, c, g, or t
gtgcatcacattaccaactatgtaacggtgaatgactgcgccaacattacccttgctatcggggcgtcgccggtaatggcggacgctatcggcgaggcggcggacattgccgcaatcgcgggggcggtggttctgaacatggggacgctcaacgagcgtaccatcccgtcaatgattgccgccgggaaggcggctaacgcgaagggtatccccgtcgtgtttgacccggtaggcgcgggagcgtcaaagctgcgaaacgataccgccgcgtccataacaagcgaagtaaagttgagtgtaatccggggcaatatctccgagattaagtttgtcgcgggccttggctcgaagacaaagggagtggacgcttcggacagcgaccttgccggagcgggcggcgcgggaggggccgcgaaagacctggcgcaaaagcttggctgcgttacggtgataagcggcgctgtcgatgccgtatcggacggcaggaagatcgtctttgtggaaaacggccatcccatgctgggcagcctgaccggcacgggctgtatgtgctcgtcgctcatcggctccttttgcggagccgcgccggaggaacccctcgcggcggctgccgccgccatgatgtgcatgggcgtcgccggcgaactggcctacaaaagcgcgggccagcgcggcaacggcagcttccgcgccgcgctccatgacgcggtaagccgcatggacgccgcgacgctgggaaagctggcaaggtaccatgaagagcagcattga

SEQ ID NO: 30538 - protein, 256 aa, Unknown
  Obtained from environmental sample
  DOMAIN (2)...(243): Hydroxyethylthiazole kinase family
  misc_feature (1)..(256): Xaa is any amino acid
MHHITNYVTVNDCANITLAIGASPVMADAIGEAADIAAIAGAVVLNMGTLNERTIPSMIAAGKAANAKGIPVVFDPVGAGASKLRNDTAASITSEVKLSVIRGNISEIKFVAGLGSKTKGVDASDSDLAGAGGAGGAAKDLAQKLGCVTVISGAVDAVSDGRKIVFVENGHPMLGSLTGTGCMCSSLIGSFCGAAPEEPLAAAAAAMMCMGVAGELAYKSAGQRGNGSFRAALHDAVSRMDAATLGKLARYHEEQH

SEQ ID NO: 30539 - DNA, 612 bp, Unknown
  Obtained from environmental sample
  misc_feature (1)..(612): n is a, c, g, or t
atgcacatcatggcggcggcagccgccgcgaggggttcctccggcgcggctccgcaaaaggagccgatgagcgacgagcacatacagcccgtgccggtcaggctgcccagcatgggatggccgttttccacaaagacgatcttcctgccgtccgatacggcatcgacagcgccgcttatcaccgtaacgcagccaagcttttgcgccaggtctttcgcggcccctcccgcgccgcccgctccggcaaggtcgctgtccgaagcgtccactccctttgtcttcgagccaaggcccgcgacaaacttaatctcggagatattgccccggattacactcaactttacttcgcttgttatggacgcggcggtatcgtttcgcagctttgacgctcccgcgcctaccgggtcaaacacgacggggatacccttcgcgttagccgccttcccggcggcaatcattgacgggatggtacgctcgttgagcgtccccatgttcagaaccaccgcccccgcgattgcggcaatgtccgccgcctcgccgatagcgtccgccattaccggcgacgccccgatagcaagggtaatgttggcgcagtcattcaccgttacatag

SEQ ID NO: 30540 - protein, 203 aa, Unknown
  Obtained from environmental sample
  SIGNAL (1)...(16)
  misc_feature (1)..(203): Xaa is any amino acid
MHIMAAAAAARGSSGAAPQKEPMSDEHIQPVPVRLPSMGWPFSTKTIFLPSDTASTAPLITVTQPSFCARSFAAPPAPPAPARSLSEASTPFVFEPRPATNLISEILPRITLNFTSLVMDAAVSFRSFDAPAPTGSNTTGIPFALAAFPAAIIDGMVRSLSVPMFRTTAPAIAAMSAASPIASAITGDAPIARVMLAQSFTVT

SEQ ID NO: 30541 - DNA, 819 bp, Unknown
  Obtained from environmental sample
  misc_feature (1)..(819): n is a, c, g, or t
atgaaaacagcgttgagtatcgcggggtctgattgctcaggcggcgcgggcatacaggccgatttgaaaacattttcggcgcatggtgtttttggcatgacggcggttacttcggttgtcgcggaaaatacgtttcgtgtcatcgaatatcaggatattcgcccggacattatcgaacagcagattgacgcggtgtttgaagatattccgcccgacgcggtaaaagtcggaatgctttcatgcagtcagaccatgctggctgtcgcgggaaaactgcgggaatggcagccgcgcaatgtggttattgatccggtgatgtacgcgaagaacggcgctcctctgatggagatggacgctatcagtacgctgattaaggaagtagtgccgttggcggatttgataacgccgaatgttcccgaagccgaaaaaatgtcgggaatggagattgaaacgcatgacgatatgcgggaagcggcgcggcgtattcacgcgatgggctgccgcgctattgttgttaaaggcggacacatcgaaggcgacgcgaccgatattttgtttgacgganaagaatttcatgaatacccgtcgccgcggatagacaccaaacatacccacggaaccggctgtacgttttcttcggcgattgcttctaatcttgccctggggctttcgcttaataaagcggtcgaaaacgcaaaggcgtatataaatacggcaattacacacgcgccgggacttggaaaagggcatgggcctacgcatcatttttacgcgctgtatgaaacctgcgaaaaacaggcgagaaatcatgaagcgtaa

SEQ ID NO: 30542 - protein, 272 aa, Unknown
  Obtained from environmental sample
  DOMAIN (11)...(254): Phosphomethylpyrimidine kinase
  misc_feature (1)..(272): Xaa is any amino acid
MKTALSIAGSDCSGGAGIQADLKTFSAHGVFGMTAVTSVVAENTFRVIEYQDIRPDIIEQQIDAVFEDIPPDAVKVGMLSCSQTMLAVAGKLREWQPRNVVIDPVMYAKNGAPLMEMDAISTLIKEVVPLADLITPNVPEAEKMSGMEIETHDDMREAARRIHAMGCRAIVVKGGHIEGDATDILFDGXEFHEYPSPRIDTKHTHGTGCTFSSAIASNLALGLSLNKAVENAKAYINTAITHAPGLGKGHGPTHHFYALYETCEKQARNHEA

SEQ ID NO: 30543 - DNA, 723 bp, Unknown
  Obtained from environmental sample
  misc_feature (1)..(723): n is a, c, g, or t
ttggaaaagggcatgggcctacgcatcatttttacgcgctgtatgaaacctgcgaaaaacaggcgagaaatcatgaagcgtaaaattgactatagcctttatttggtaacagatcaggaccttatggtcgcctccaatattgaagaatgtgtagagaaggctgtttcaggcggctgtacggtggtgcagctccgggaaaaaaccgcgtcctcgcgcgaattttacgaaaccgccctgagggtgcgtaaaattacggcggacatgggcgtaccgctgattatcaatgaccgcgccgatattgcgttagctgtaaacgccgatggcgtgcatgtcgggcaggatgatttgcctcttgacgcggcgcgccgcgtaatgggaaaagaaactattataggcgtttcggtaaacaatctgaccgaggctttggcagccgccgctatgggcgcggattatcttggcgtgggcgcgatgttcgcgaccggtaccaaaaaagacgcggacatcgccagtatggatgaactgcggtgcatacgcgctgaaattaagattcccattgtggtaatcggcggcattaacaaagacactgtgccgctttttgcgggaacgggaattgacgggatagccgttgtttccgcaatcgtttcgncaaaagatccatgcaccgcggcgcgtgaactgaaaacattgttctataatacaatgggcataaatgaagacctataa

SEQ ID NO: 30544 - protein, 240 aa, Unknown
  Obtained from environmental sample
  DOMAIN (33)...(213): Thiamine monophosphate synthase/TENI
  misc_feature (1)..(240): Xaa is any amino acid
MEKGMGLRIIFTRCMKPAKNRREIMKRKIDYSLYLVTDQDLMVASNIEECVEKAVSGGCTVVQLREKTASSREFYETALRVRKITADMGVPLIINDRADIALAVNADGVHVGQDDLPLDAARRVMGKETIIGVSVNNLTEALAAAAMGADYLGVGAMFATGTKKDADIASMDELRCIRAEIKIPIVVIGGINKDTVPLFAGTGIDGIAVVSAIVSXKDPCTAARELKTLFYNTMGINEDL

SEQ ID NO: 30545 - DNA, 780 bp, Unknown
  Obtained from environmental sample
  misc_feature (1)..(780): n is a, c, g, or t
ttgctctttacctgcgtagaacgcgaaggcaccatgaccggcatcgatcttgctcccgcgcgaagattgcgcgaagcggttaactgtcaaataaccgtcgccggcggtgtttcaactttgggcgaaattgaggaaatagccgcctttggctgtgatgtacagcttggcatggccctgtacactggaaaaataagtctcgccgatgcctttgttacatcgctaaactggaaaaagggagagtccctactcccaataatagttcaatcccctgacggtcagatactaatgaccggctttaccgacaaagaagcgttagctgaaacatttaaacgcggtaatgtttgcttccacagcagaacaagaaacaagctctggatgaagggcgaaacatcgggcaacacactaaaattactgcgtttacgcgccgactgtgacagggatgccattcttgcagtagcggaaccggcgggtccagtctgccacactggcgcatggtcgtgttttgcgactaacagagactatacattgcaatttttacaggatattataaaggagcgttttcgcaatcccgcgcccggttcgtatacagccacccttgacgatgagcttgtccgtgaaaaaataatggaagaggccaaggaactctgcgaggcgaagacccatgatgaaattgtatgggaagctgcggacttgatctactttacggcagtgttaatgacaaaaaccggagtcaccattaaggaaattcttgacgagcttgacaggaggcacaaaaaatga

SEQ ID NO: 30546 - protein, 259 aa, Unknown
  Obtained from environmental sample
  DOMAIN (176)...(258): Phosphoribosyl-ATP pyrophosphohydrolase
  misc_feature (1)..(259): Xaa is any amino acid
MLFTCVEREGTMTGIDLAPARRLREAVNCQITVAGGVSTLGEIEEIAAFGCDVQLGMALYTGKISLADAFVTSLNWKKGESLLPIIVQSPDGQILMTGFTDKEALAETFKRGNVCFHSRTRNKLWMKGETSGNTLKLLRLRADCDRDAILAVAEPAGPVCHTGAWSCFATNRDYTLQFLQDIIKERFRNPAPGSYTATLDDELVREKIMEEAKELCEAKTHDEIVWEAADLIYFTAVLMTKTGVTIKEILDELDRRHKK

SEQ ID NO: 30547 - DNA, 390 bp, Unknown
  Obtained from environmental sample
  misc_feature (1)..(390): n is a, c, g, or t
atggattacgccgaaacggcaaaagccatgttcacgattctgaaagtcgggggctttacaaccggcggccttaatttcgacgccaagatccgccgcaattcggtagacctcgaagacctcttcatcgcccacatcggcggcatggacgcctttgccgtaggcctaatcgttgcccagaagatcatcgacggcggcataattcctgacttcatcaagaatcgctacgcctcgttcgatgccggggacggcgcaaaattcgacaaaggcgatatgacctttgaagatcttgccaagataggcacagctgctggctatggcaggaccggcatcacaagcggcaagcaagaatacctggaaagcgtcctgaatcagtatttgctggggctataa

SEQ ID NO: 30548 - protein, 129 aa, Unknown
  Obtained from environmental sample
  misc_feature (1)..(129): Xaa is any amino acid
MDYAETAKAMFTILKVGGFTTGGLNFDAKIRRNSVDLEDLFIAHIGGMDAFAVGLIVAQKIIDGGIIPDFIKNRYASFDAGDGAKFDKGDMTFEDLAKIGTAAGYGRTGITSGKQEYLESVLNQYLLGL

SEQ ID NO: 30549 - DNA, 363 bp, Unknown
  Obtained from environmental sample
  misc_feature (1)..(363): n is a, c, g, or t
atgaacgttgtgtctatgttcctttcccttggtgtcggtagccagatgacccccgaaaagttcctgaacccttcttccctcattatcgttgtaatggggcttattgcctttgccatcgccactgccggcgggctactggtagccaagttcatgaacctcttccttaaagaaaagatcaacccgctcatcggttccgcaggcgtttccgccgtaccaatggccgctcgcgtttccaacagggtaggccttgaagaagacccgggcaacttcatcctgatgcacgcaatgggacccaacgtagccggcgtcatcggaaccgccattgccgcaggtgttatgatcgctgtttacggcgcacattaa

SEQ ID NO: 30550 - protein, 120 aa, Unknown
  Obtained from environmental sample
  DOMAIN (1)...(118): Na+-transporting methylmalonyl-CoA/oxaloacetate decarboxylase, beta subunit
  misc_feature (1)..(120): Xaa is any amino acid
MNVVSMFLSLGVGSQMTPEKFLNPSSLIIVVMGLIAFAIATAGGLLVAKFMNLFLKEKINPLIGSAGVSAVPMAARVSNRVGLEEDPGNFILMHAMGPNVAGVIGTAIAAGVMIAVYGAH

SEQ ID NO: 30551 - DNA, 855 bp, Unknown
  Obtained from environmental sample
  misc_feature (1)..(855): n is a, c, g, or t
ttgatcagatcggcacgaggaaactccagcaggccagaaaaaaccgtgttcggctggcatgaactcataatggttttggtcgggtttttggttatttatttgggggcggcaaaggattttgaacctttactgttggtgccaatcggtttcggtattgtttttgccaatatccccttcgcgaacatgggcagccctggaatctggaacgaagaactccaccttttcgagcatcagggtttcttgagcgttatttacaacagcggggtagggaacgagtttttcccattgataatcttcatcggcataggggccatgaccgatttcggcccgcttatcgcgaaccccaaaaccgcccttttgggcgcggcggcccagttcggcgtttttgcgtccatgttttttatcagcgttgccaacttcctgccgggagtggcctttaacctgaaagaggcctgcgctgtggctatcatcggcggcgcggacggccccaccacgatttacatcgcggcaaagctcgccccccatcttctggcaactgtggcggtcgcggcctattcgtacatggccctggtaccgctgattcagccgccaattatgagggcgcttacaaccaaacaagaacggctaatcagaatgaggcagttaaggccggtttcaaaagcggaaaaagtcgccttcccaatgctggtatttattctcgcgatatttctcattccgcccgctgccccgcttatcggctgtctaatgttcggcagtttttatccgggaaatcggcgtcgtagacaggctctccaataccgcccagaacgatctaatgaacgttgtgtctatgttcctttcccttggtgtcggtag

SEQ ID NO: 30552 - protein, 284 aa, Unknown
  Obtained from environmental sample
  DOMAIN (18)...(255): Na+-transporting methylmalonyl-CoA/oxaloacetate decarboxylase, beta subunit
  misc_feature (1)..(284): Xaa is any amino acid
MIRSARGNSSRPEKTVFGWHELIMVLVGFLVIYLGAAKDFEPLLLVPIGFGIVFANIPFANMGSPGIWNEELHLFEHQGFLSVIYNSGVGNEFFPLIIFIGIGAMTDFGPLIANPKTALLGAAAQFGVFASMFFISVANFLPGVAFNLKEACAVAIIGGADGPTTIYIAAKLAPHLLATVAVAAYSYMALVPLIQPPIMRALTTKQERLIRMRQLRPVSKAEKVAFPMLVFILAIFLIPPAAPLIGCLMFGSFYPGNRRRRQALQYRPERSNERCVYVPFPWCR

SEQ ID NO: 30553 - DNA, 690 bp, Unknown
  Obtained from environmental sample
  misc_feature (1)..(690): n is a, c, g, or t
atggacagacgtaacgggcaggtttttttccgcgaagttatgcttgaaagcgacgaatcgttttcttttgaagtcaatctttgcgattatatcagttttgggcaaaccggctctttcagggtcaaggcaagaatatatcctgaactgttcaaatctgggggagccacggctttcgaatcaaattacctcagcctgaccctgcgcccagccgtaattaaaggcccggacggcatccccgttgaaatggacgtagccacgggcgcggtccttgtaaaacagagaatcccacccgatgaagttgtcgcctatatgattacggcccgccagacctcacaatgggaaaaattctttttatacctcgaccttgaagccatgcttaaaagagaccccgttcaaagcagaaaatttaacgctgaaaacgaggaaggcaggcgcaaaatggtcaacgcttacaggcaaaaccttcaaaatgccgtgattgacggggatattgcggttattcccactacttttgacatattaaagacccaatataacaacgatgagggatatgtcgtagttcttcaacggtacaggttcccaaatttcacggaattaagggaatatacgtactatcttgaaaaagaagacaatctgtggagtattgtaaattacacggttcaaaaaatgggaaccacaagtaatgattga

SEQ ID NO: 30554 - protein, 229 aa, Unknown
  Obtained from environmental sample
  misc_feature (1)..(229): Xaa is any amino acid
MDRRNGQVFFREVMLESDESFSFEVNLCDYISFGQTGSFRVKARIYPELFKSGGATAFESNYLSLTLRPAVIKGPDGIPVEMDVATGAVLVKQRIPPDEVVAYMITARQTSQWEKFFLYLDLEAMLKRDPVQSRKFNAENEEGRRKMVNAYRQNLQNAVIDGDIAVIPTTFDILKTQYNNDEGYVVVLQRYRFPNFTELREYTYYLEKEDNLWSIVNYTVQKMGTTSND

SEQ ID NO: 30555 - DNA, 552 bp, Unknown
  Obtained from environmental sample
  misc_feature (1)..(552): n is a, c, g, or t
atggataaaaggtttgttaaaataatggctttaattcttgacgattacataagaaaagtccccgatttcccaaaaaaagggattctcttttacgacataacaagcattcttgcctctcccgaagcgtttaaattttgcatagacaggatggcggaaatctacgaaagcaaaaacattgacgccgtagccgcaatagaagccaggggctttttatttgccgccgcttacgcgtataaaacaaatgttcccgtaattccaatccgtaaaaaaggcaaacttccaggcgttacactttccaaaaaatatgatcttgaatacgcccaggccgagattgaagttcatatagccgacattccaaagggaaagcgcatacttcttacagacgatcttatagcgacaggcggcactttgaacgccgcccgctctctgttgattgaaggcggcgcgcaagtaccggaaatcttcggcatagtgggactgcccttccttaattatcatacatttcttgatcctacgcctgttaccaccttgatagaatatcacggcgaatag

SEQ ID NO: 30556 - protein, 183 aa, Unknown
  Obtained from environmental sample
  DOMAIN (32)...(168): Phosphoribosyl transferase domain
  misc_feature (1)..(183): Xaa is any amino acid
MDKRFVKIMALILDDYIRKVPDFPKKGILFYDITSILASPEAFKFCIDRMAEIYESKNIDAVAAIEARGFLFAAAYAYKTNVPVIPIRKKGKLPGVTLSKKYDLEYAQAEIEVHIADIPKGKRILLTDDLIATGGTLNAARSLLIEGGAQVPEIFGIVGLPFLNYHTFLDPTPVTTLIEYHGE

SEQ ID NO: 30557 - DNA, 342 bp, Unknown
  Obtained from environmental sample
  misc_feature (1)..(342): n is a, c, g, or t
ttgcagccagataaaagccagcttgactaccaaagcgggatggaaaacgcccgtcgcgaaggccgcgccgaaggcaaggttgaaggccgtgccgaaggcgaagccaaaggccgtgccgaaggcgaagccaaaggccgtgccgaaggcgaagccaaaggccgcgccgaaggcaaggttgaaggccgtgccgagggcgaagccaaaggccgcgccgaaggcaaggttgaaggccgtgccgaaggtatactcgaaattgcccaaaagatgaaaataatgggctttttggccgaacagatacaagccgctaccggcctctctacagaaaccattgaacaaatgtaa

SEQ ID NO: 30558 - protein, 113 aa, Unknown
  Obtained from environmental sample
  misc_feature (1)..(113): Xaa is any amino acid
MQPDKSQLDYQSGMENARREGRAEGKVEGRAEGEAKGRAEGEAKGRAEGEAKGRAEGKVEGRAEGEAKGRAEGKVEGRAEGILEIAQKMKIMGFLAEQIQAATGLSTETIEQM

SEQ ID NO: 30559 - DNA, 324 bp, Unknown
  Obtained from environmental sample
  misc_feature (1)..(324): n is a, c, g, or t
ttgaatagttacatttgttcaatggtttctgtagagaggccggtagcggcttgtatctgttcggccaaaaagcccattattttcatcttttgggcaatttcgagtataccttcggcacggccttcaaccttgccttcggcgcggcctttggcttcgccctcggcacggccttcaaccttgccttcggcgcggcctttggcttcgccttcggcacggcctttggcttcgccttcggcacggcctttggcttcgccttcggcacggccttcaaccttgccttcggcgcggccttcgcgacgggcgttttccatcccgctttggtag

SEQ ID NO: 30560 - protein, 107 aa, Unknown
  Obtained from environmental sample
  misc_feature (1)..(107): Xaa is any amino acid
MNSYICSMVSVERPVAACICSAKKPIIFIFWAISSIPSARPSTLPSARPLASPSARPSTLPSARPLASPSARPLASPSARPLASPSARPSTLPSARPSRRAFSIPLW

SEQ ID NO: 30561 - DNA, 864 bp, Unknown
  Obtained from environmental sample
  misc_feature (1)..(864): n is a, c, g, or t
atgttgggatatattaaccgccattgcgagcgtagcgaagcggcttgtttatctcgccgtaaggcaatccggaaattgatttcaaggatactgactttcatgcaaagaaaagaactgatcacagccgtcaaagccgctcaagaggcaggaaagattcaacttgacggcctgaagaaattggcgtccataaacgtagaaaagaaatccgaccgctcgccggtaaccgaggtggataaagcctgcgaagcccgcatacgcgaaatactgctgggcgaattcccgaacgacggtttcctcggcgaggagacgggcgaaaacgccggaactacggcgcgccgctggatagtcgacccgcttgacggcacccgccccttcatccgcggtatcccgacgcacagcgcgcttatagctctggaggaagaggggcttcccacggtaggcgtgatacacctgccggcgatggggatcacctgctacgcctcggcgggcgaaggcgctttcatagacggcgaacggatccgcgtctcgtcagcggacagcctctccgaggcgatgggtagcgtcctgggaataacggagtacgccggcgcaaaaatagggaacgacctcataacgctgaccaaagcgtgggactacacctacggcttcatggacgcctactcctacgtgctgctggccggaggccacctggacgcctgcgtaaacctgctggacaaaccctgggactgcgccgccgccgcctgcatagtaaccgaagccggcggacggttctcatccataagcggagaaaaaacggtccacggcgggtcaatagtcttgacgaacggcattttgcacgaggcggtgcttgggttcttcgggtga

SEQ ID NO: 30562 - protein, 287 aa, Unknown
  Obtained from environmental sample
  DOMAIN (34)...(283): Inositol monophosphatase family
  misc_feature (1)..(287): Xaa is any amino acid
MLGYINRHCERSEAACLSRRKAIRKLISRILTFMQRKELITAVKAAQEAGKIQLDGLKKLASINVEKKSDRSPVTEVDKACEARIREILLGEFPNDGFLGEETGENAGTTARRWIVDPLDGTRPFIRGIPTHSALIALEEEGLPTVGVIHLPAMGITCYASAGEGAFIDGERIRVSSADSLSEAMGSVLGITEYAGAKIGNDLITLTKAWDYTYGFMDAYSYVLLAGGHLDACVNLLDKPWDCAAAACIVTEAGGRFSSISGEKTVHGGSIVLTNGILHEAVLGFFG

SEQ ID NO: 30563 - DNA, 942 bp, Unknown
  Obtained from environmental sample
  misc_feature (1)..(942): n is a, c, g, or t
ttgcagggcgagaccggcgttaagcttctttggggaacggcgaatgttttcggcaacccgcgctttatgaacggggcggctaccaatccggaattcggcgttgtcgcccttgccgcgacgcaggtaaaggccgcgattgacgcgacaatcgaacttggcggatcgggctacactttctggggcggacgcgaaggttacatgagccttcttaacacagaccttaaaagagaaaaagaaaatttagcgcgcttccttacaatggcaagagattatgcccgtaaacagggctttaagggcgttttctacattgaaccgaaaccgatggaaccgacaaaacatcaatacgattttgacactgaaaccgttatcggcttcctgcgtcagtggggtcttgataaagatttccgcatgaacattgaagccaaccacgcggagcttgcagggcacgaattcgcgcacgagctggaaacagccgcggtcgcgggtttcttcggctcggtagacgccaaccgcggcgacgtacaaaacggctgggacacagaccagttcccgatgagctactatgaaaccgcgatggcgatgtacacaatccttaaaatcggcggttttacaacaggcggccttaactttgactccaaaatacgcagaaactccgtagatccggctgacctctttatagcccacatcggcggcatggacgctttcgcggcagggctggagattgcccaaagaatcattgacgacggaattattccgaactttgtgagggagcgttatgcgtcattcactaccggagacggccagaaattcagcgaaggagagcttacgctggatcagcttgccgaaatcgggacagacgccggttacggcaagacgggcattacgagcggaaagcaggagtggctggagaacgttttgaacgggtatttgctgggattgtaa

SEQ ID NO: 30564 - protein, 313 aa, Unknown
  Obtained from environmental sample
  DOMAIN (7)...(174): Xylose isomerase-like TIM barrel
  misc_feature (1)..(313): Xaa is any amino acid
MQGETGVKLLWGTANVFGNPRFMNGAATNPEFGVVALAATQVKAAIDATIELGGSGYTFWGGREGYMSLLNTDLKREKENLARFLTMARDYARKQGFKGVFYIEPKPMEPTKHQYDFDTETVIGFLRQWGLDKDFRMNIEANHAELAGHEFAHELETAAVAGFFGSVDANRGDVQNGWDTDQFPMSYYETAMAMYTILKIGGFTTGGLNFDSKIRRNSVDPADLFIAHIGGMDAFAAGLEIAQRIIDDGIIPNFVRERYASFTTGDGQKFSEGELTLDQLAEIGTDAGYGKTGITSGKQEWLENVLNGYLLGL

SEQ ID NO: 30565 - DNA, 1215 bp, Unknown
  Obtained from environmental sample
  misc_feature (1)..(1215): n is a, c, g, or t
ttgtgttccaggcaccccggcacaggaaaaacaaccgttgctcgcataatggcagatgtgttcaaagctgttggtatgctacccaccaataatctaattgaagttgataggagcaaactggttgcctcttatctagggcaaaccgccaagctggtaaacgagcaatgcgacaacgcaatgggcggcatactctttgttgacgaggcttacgctttaaaacagggaccaggcgattcctttgggcaagaagcagttgacacgctcctcaaacgcatggaagacgacaggggaaaatatgtggttatagctgctggctattcaaaagagatggaagaatttttgcagacaaatagcggcttcaaatctcggttttcggattatataaactttgacgattacaacgcaaacgaaatgcgcgaaatattcttaaatatgtgcaaaaagagaaggcttgaatttgcagacggctttgacgatgccctgagaaaaaagctgacggaaatatacggaaacagaacagcccagtttgccaatgcccgtaccgtacgccagctctacgataaaacctacgaaaatctttcatcaagggtaatggctatgaaagattcaggtgcaaccgaagatgatatgaagcgtgaaatattaatcatgcgaccggaagatttgnaggaaaatagtatgcaatgccttttatgcaaagaaacaatagacgacgattcccgttactgcgatcaatgcggtgagcaaataatggtttgctcggtatgcgggcgtcccggaaagggaaagcgctgcatatttgacgggaaggaattggttccggcaacaggcgtgacttcggctgttcagccgtcaccgcaaagccaaggcgcaaatagcgacgcaagcagcggcgacaaagtaaaacttacttcgcaattgcacggcataacaatcgaagcgcaggacggcgatataatcgggcgcaagaacggggcctttgccggcgtattcgggcgtttcaactacgtatcgggtacgcattgcaaaatcgtcaaaaccgccgctgggtggcatattcaggacatggattccacgaaccacacattttacaacgggacgcagcttgttcccaatacgctctatccgctttcaagtggtgcaacggtaagaatcgcggatgtcgaattgacggtaacgtatgatacagccggaggcgggacaacacgaatatga

SEQ ID NO: 30566 - protein, 404 aa, Unknown
  Obtained from environmental sample
  DOMAIN (329)...(386): FHA domain
  misc_feature (1)..(404): Xaa is any amino acid
MCSRHPGTGKTTVARIMADVFKAVGMLPTNNLIEVDRSKLVASYLGQTAKLVNEQCDNAMGGILFVDEAYALKQGPGDSFGQEAVDTLLKRMEDDRGKYVVIAAGYSKEMEEFLQTNSGFKSRFSDYINFDDYNANEMREIFLNMCKKRRLEFADGFDDALRKKLTEIYGNRTAQFANARTVRQLYDKTYENLSSRVMAMKDSGATEDDMKREILIMRPEDLXENSMQCLLCKETIDDDSRYCDQCGEQIMVCSVCGRPGKGKRCIFDGKELVPATGVTSAVQPSPQSQGANSDASSGDKVKLTSQLHGITIEAQDGDIIGRKNGAFAGVFGRFNYVSGTHCKIVKTAAGWHIQDMDSTNHTFYNGTQLVPNTLYPLSSGATVRIADVELTVTYDTAGGGTTRI

SEQ ID NO: 30567 - DNA, 417 bp, Unknown
  Obtained from environmental sample
  misc_feature (1)..(417): n is a, c, g, or t
atgcaggccggcaaactggaaatacacgccgtcgtcggccccgccatgggcggaattattgtcgcctacgaattaggcaggcagctggggcttcccgcgttttttaccgagcgcgacgacaccggaaaaatggcgctgcgccgcggctttgaaatcaagccggggcagaaaattctgattaccgaagacgtggtaactaccggcaaatcttccggcgaatgtgccgccgtccttgaggaacacggggcaaaaattgccgcccttgcctgcctggtggacagacgcggcgccggcattgatatcccgtggccgctttatccctgttgcaaggttgatgccggaaactgggaagccacggcctgcgaactgtgcaagaaaggaatacccgcggtcaaacccggctcacgaaaaacgtga

SEQ ID NO: 30568 - protein, 138 aa, Unknown
  Obtained from environmental sample
  DOMAIN (2)...(102): Phosphoribosyl transferase domain
  misc_feature (1)..(138): Xaa is any amino acid
MQAGKLEIHAVVGPAMGGIIVAYELGRQLGLPAFFTERDDTGKMALRRGFEIKPGQKILITEDVVTTGKSSGECAAVLEEHGAKIAALACLVDRRGAGIDIPWPLYPCCKVDAGNWEATACELCKKGIPAVKPGSRKT

SEQ ID NO: 30569 - DNA, 783 bp, Unknown
  Obtained from environmental sample
  misc_feature (1)..(783): n is a, c, g, or t
gtgcaagaaaggaatacccgcggtcaaacccggctcacgaaaaacgtgaaaacaccgccgttttttaccatcattcacgaagacgttaatatcatagcggtcagcaaatccgccggaatttcggtgggtggtgaccgatgggatgaatccaaagacagactagacagactagtcgcggaaattattaagcccccggcgaaaatttttaccgtccaccgtatagactgcgatacttccgggctggtggtattcgcgaaaaacgaggaaacacaccgccgtctttcaatcgcctttgaagggcgggatgtcaccaaacggtacgttgccgttgtccacggccgcccctcctggcaggaaacagcctgcgatcttcctctgattcccaatggcaataaacaacatcagaccattattgacaaatatcaagggaaaaaatccctgacccgcttcaaacttttgggcagcgtgggcaatttgagcgttcttgaagcctttcccgaaaccggcagaacccatcagatacgggttcacgcggcggcgttaggtttttctgttgtatgcgattcactgtatggtaaagataaaccaatattgctttccgctatcaaaaaaaattggcgcggcgatcttttggaagaaaagcccctattggcgcggcttggcctccatgccgcggaactttcattgccctcactctcacaaaccctgtgcgccccgctgccgcgggacatgactgccctgatcaagcagatgaaactttttcatctaacaatacatgactaa

SEQ ID NO: 30570 - protein, 260 aa, Unknown
  Obtained from environmental sample
  DOMAIN (30)...(180): RNA pseudouridylate synthase
  misc_feature (1)..(260): Xaa is any amino acid
MQERNTRGQTRLTKNVKTPPFFTIIHEDVNIIAVSKSAGISVGGDRWDESKDRLDRLVAEIIKPPAKIFTVHRIDCDTSGLVVFAKNEETHRRLSIAFEGRDVTKRYVAVVHGRPSWQETACDLPLIPNGNKQHQTIIDKYQGKKSLTRFKLLGSVGNLSVLEAFPETGRTHQIRVHAAALGFSVVCDSLYGKDKPILLSAIKKNWRGDLLEEKPLLARLGLHAAELSLPSLSQTLCAPLPRDMTALIKQMKLFHLTIHD

SEQ ID NO: 30571 - DNA, 480 bp, Unknown
  Obtained from environmental sample
  misc_feature (1)..(480): n is a, c, g, or t
atggaaaatattatagaattaaatgatagtaaaattattacgaatatattaaataaggcatttataacagttgcccaacagtataattttacgcaagaaaatgctccgacatttcctgcgtttataaattatgatagaattgaaaattccttaaataatgggttaaaaatttatggatataaaaataatgatcaaataataggctgtgttggatattcattttataaagaacaaatatattttatagaacgattggcaacactacctgaatttaggcatttaggaattggtaaaaaattaatgcaatttgttgaaaatataattaaggaaattggtggaaaaattgctgaaattcatgttgttgataaaaatattgttttaagagagtggtataagaaattaaattattttgaaataagaattgatgaaataaaatcattaccatttaattcatgtgtaatgaataaagatttaacatag

SEQ ID NO: 30572 - protein, 159 aa, Unknown
  Obtained from environmental sample
  DOMAIN (58)...(137): Acetyltransferase (GNAT) family
  misc_feature (1)..(159): Xaa is any amino acid
MENIIELNDSKIITNILNKAFITVAQQYNFTQENAPTFPAFINYDRIENSLNNGLKIYGYKNNDQIIGCVGYSFYKEQIYFIERLATLPEFRHLGIGKKLMQFVENIIKEIGGKIAEIHVVDKNIVLREWYKKLNYFEIRIDEIKSLPFNSCVMNKDLT

SEQ ID NO: 30573 - DNA, 528 bp, Unknown
  Obtained from environmental sample
  misc_feature (1)..(528): n is a, c, g, or t
atgggagcaaagaaacgatttatagatcccctgacagatttgggtgaattactgctttcggtagaaaaacccgggcgctatacgggcggagagtatggccgccttttaaataaagattcgctggagtttacagaatcggcgttgagcgctgttatcgcttttcccgacctttatgaaatcggaatgtctaatcaggcgcttaagatcctttacaattcgctcaaccggataaaaggcgttttttgcgaccgctcttttgcccctgcccccgattttgaagggcttttaagaagccgcaatttacccctctatggccttgataccggggtaagccttggggatgttgacctcttgatgttcacccttggttacgagcttttaataaccggccttttaaccatgcttgacgtctccggcattcccattcgctgccgcgatcgctgcgaggatgatcccatagtcattatgggggggccttgcgtttcaacccgctgccctacgcggattttatcgatgctttctggatag

SEQ ID NO: 30574 - protein, 175 aa, Unknown
  Obtained from environmental sample
  misc_feature (1)..(175): Xaa is any amino acid
MGAKKRFIDPLTDLGELLLSVEKPGRYTGGEYGRLLNKDSLEFTESALSAVIAFPDLYEIGMSNQALKILYNSLNRIKGVFCDRSFAPAPDFEGLLRSRNLPLYGLDTGVSLGDVDLLMFTLGYELLITGLLTMLDVSGIPIRCRDRCEDDPIVIMGGPCVSTRCPTRILSMLSG

SEQ ID NO: 30575 - DNA, 693 bp, Unknown
  Obtained from environmental sample
  misc_feature (1)..(693): n is a, c, g, or t
atggcaggggaacaaacgttcaacatggaagaagaatttgcggggctggatttcaattcaagccgacttgaaaaacggtttataaagacaatggaaacattgtccaaacagccggataaatcaatatggtcatgcagcgaaaacagggcggaagctaaagccatataccggctgttaggcaacgagaacctggatcgtgaagaaatactgagggcgcatcgtgaagcgactgtcagaaggatgatacagcggggagggactgtattggcgatacaggataccacaagcctgaattacaacacccatgagaagaccgaagggataggctatatcagcgaaaaaacgttaggagtaaatattcacagttgtcttgcggtaagcgccgaagggctggcgttagggatattggggcaaatgtcctacaaccgcgaacaggcgaaggacgacagccgcagccgcgacagtaaaaagagacgggcattggaagaaaaagagagttaccggtgggtgaagacgttgcaaacaagcactgcggatctgcctaaaggagtcaaagtaatcaacgtctgcgatcgggaagggatatgtacgagttactggacgtcgcgaaactgccgggcagttgtttctcatccgggcggcccacaacaggatgacgcggataacccggcggattttagacgctatccgtaa

SEQ ID NO: 30576 - protein, 230 aa, Unknown
  Obtained from environmental sample
  misc_feature (1)..(230): Xaa is any amino acid
MAGEQTFNMEEEFAGLDFNSSRLEKRFIKTMETLSKQPDKSIWSCSENRAEAKAIYRLLGNENLDREEILRAHREATVRRMIQRGGTVLAIQDTTSLNYNTHEKTEGIGYISEKTLGVNIHSCLAVSAEGLALGILGQMSYNREQAKDDSRSRDSKKRRALEEKESYRWVKTLQTSTADLPKGVKVINVCDREGICTSYWTSRNCRAVVSHPGGPQQDDADNPADFRRYP

SEQ ID NO: 30577 - DNA, 1395 bp, Unknown
  Obtained from environmental sample
  misc_feature (1)..(1395): n is a, c, g, or t
ttgttaagcatggcgcatgttttgattatgccccggcaggggaatacggttgaatcctgtatcattacagattggaaagtgaaggaaggagatacggtaggcgctgaaacggtggtctgcgaagtggaaaccgataaggcgtcattcgaggttcctgccggagcggccggtacggtgttgaagatactctacggttcgggagatgatgtgccggttctggcacccatggcggtcatcggcgcggtaggcgaagactgggaaaaggggatcagggagttgggaatagggaatagggaatcaaattcaactacccctatacctgatattaataaatccccactccccaccccccaaggcggcaatgccgtccccccactccccatctccccccgcgcgcgcaatctcgccgaaagggaagcgctgccgcttagcaccgcattgccggtgccaggcaccggtccgggagggaggatcattgagcgtgatgtcaaagccgccctggaaacacggcccgctttaacggcggcggcaaaagccgcaggggctggaccgcttcctgatgttggatcgggcataggcgggcggatcacgacggctgaccgcttggaagatcgcgcatccttaagacagccatccccactcccccctgaaggagaaatcaccgaaacacccattaaaggcatccgcaaagttatctctgaccggatgtttaagtctctggctgaaagcgcccagtttacccttaacgcttcggcgcaagttactaaacttcaggaaatacgttccagaatgaaagcctcagatggcttttgcggggaaatcggcctggataaaataaccgtgaatgatcttgtccttttcgcggtgtcacgggtacttccgcgtttcccctttatgaacgcccataaaaccggcgataccattaaaacttttgaacgagttcatctgggacacgcggtggatactccgaagggccttatggttcccgttattcgcaacgccaatctgctttcgcttgcgcagatttccgccgaggcaaagcggctggcttccggctgtcaaaacggttcgataaaaccggatgaattatcgggttcctctttcacggttaccaatctgggcagcctgggcattaccggttttacgccggtgctcaacacgcctgaagtcgctattctcggagtatgtaatatcgaaatgaaacctgccgccattcccaagggagaggcgaataattgcgaatgcgcctgtaattgcggcttccgtcttgaaccgcatatcggtttcagcctgaccattaatcaccaggcggtagacggcgctcccgcggcgcgtttcctcaaggccctatgcgaggcggttgcggatatagacctgcttttggcggcgggttaa

SEQ ID NO: 30578 - protein, 464 aa, Unknown
  Obtained from environmental sample
  DOMAIN (128)...(167): e3 binding domain
  misc_feature (1)..(464): Xaa is any amino acid
MLSMAHVLIMPRQGNTVESCIITDWKVKEGDTVGAETVVCEVETDKASFEVPAGAAGTVLKILYGSGDDVPVLAPMAVIGAVGEDWEKGIRELGIGNRESNSTTPIPDINKSPLPTPQGGNAVPPLPISPRARNLAEREALPLSTALPVPGTGPGGRIIERDVKAALETRPALTAAAKAAGAGPLPDVGSGIGGRITTADRLEDRASLRQPSPLPPEGEITETPIKGIRKVISDRMFKSLAESAQFTLNASAQVTKLQEIRSRMKASDGFCGEIGLDKITVNDLVLFAVSRVLPRFPFMNAHKTGDTIKTFERVHLGHAVDTPKGLMVPVIRNANLLSLAQISAEAKRLASGCQNGSIKPDELSGSSFTVTNLGSLGITGFTPVLNTPEVAILGVCNIEMKPAAIPKGEANNCECACNCGFRLEPHIGFSLTINHQAVDGAPAARFLKALCEAVADIDLLLAAG

SEQ ID NO: 30579 - DNA, 939 bp, Unknown
  Obtained from environmental sample
  misc_feature (1)..(939): n is a, c, g, or t
atgaccgtacgctcaatgattttgcagggggcaagcgcggacagggttttggaatacatgaaggacgtattcaacgggctgcagaagaaacaaagcggctttaaatccgacagcgtttacggttattttgacgtatttgacggcgcgttccttcactcaaaagactggtccggcggggcaggttatgatcccacggaacggccctggtataagctcgcggttgaggtcggcgacagcctggccgttacgccgatatactggaatttacagttaaacggttattgcattacctatgcgcacaggctgtttaacgatacagggaagccattgggcgttgtgtgccttaatgtgccgctcagcaatataataaatcatgtagccgaaatgaagctgacaccgggcagctacgggattttgtacgatgaaaacaacctgaaaatttattatcatcccgaaccggagattattggaaaagactggcgtgaactgtccggcggcatagcggcgcttgccgctgaggtcagggagaagggcgatttttcggagcgtgaaaccaccaatatgaaaggcgaatggacagttgccttttcatcgcgtctcaagaagaacggatgggttttatattttgtaacgccaaaagccgagtattataaaaacgtgcgggatatggagctgatcctcagcattcttggcctgttccttgcgacggtgctgattatcatccttatacgcgttgacatggcaaggcgaaagtctgaggggcaaaaccgccagaagagcgttttgcttgcggacatggaaaaaatgcgggaagcggatgagcgcacgcggctcatgttaaacgcaacgcctttatgctgcatgttatgggataacagcgataataataataactatcatcttatagaatgtaatcagggaaacgctgttcctgtttga

SEQ ID NO: 30580 - protein, 312 aa, Unknown
  Obtained from environmental sample
  misc_feature (1)..(312): Xaa is any amino acid
MTVRSMILQGASADRVLEYMKDVFNGLQKKQSGFKSDSVYGYFDVFDGAFLHSKDWSGGAGYDPTERPWYKLAVEVGDSLAVTPIYWNLQLNGYCITYAHRLFNDTGKPLGVVCLNVPLSNIINHVAEMKLTPGSYGILYDENNLKIYYHPEPEIIGKDWRELSGGIAALAAEVREKGDFSERETTNMKGEWTVAFSSRLKKNGWVLYFVTPKAEYYKNVRDMELILSILGLFLATVLIIILIRVDMARRKSEGQNRQKSVLLADMEKMREADERTRLMLNATPLCCMLWDNSDNNNNYHLIECNQGNAVPV

SEQ ID NO: 30581 - DNA, 762 bp, Unknown
  Obtained from environmental sample
  misc_feature (1)..(762): n is a, c, g, or t
gtggagtatgacttgaacgcagattgccctgtatggaaaaagtttgtaatggaaataatgaattacaatgcagagttaatacacttcatccaaaatgcggcggggtgggcgataacaggagatacgtctgaacaatcaatgttcatcctgtttggaacgggggcaaacggaaaaagcacgtttctcaataccataatgaacctattgggagattacgccatcgccacgcctactgaaacctttatgaaaaaatcgggagaccagataactaatgacatagcaaggctaaggggaacacgctttgttactacaacggaagcggaatatgggaaacgtctgtctgagcctttgataaagcagataacaggcaatgaccaaatgacggcaaggtttttgtatggggagttttttaattttgtaccgactttcaaaatttggatggctacaaaccacaagcctgtgataaagggaaccgaccacggtatttggcggcggataaagcttatacctttcctaacccgcattgaggaagaaaatcaggacaaacaccttgaacagaagttgatgaaagaagggcctgggattttgaactggcttttcgaaggggcaaggcggtggcgaaatgagggactaaaaacgccgtcaattattgtcagcgcaacggatgaataccgggcggagatggacgttatcgggaacttcctaaaggagcgttgtacccagggagagggaggttgtatcaaggcaagggaacttttttag

SEQ ID NO: 30582 - protein, 253 aa, Unknown
  Obtained from environmental sample
  DOMAIN (1)...(253): Poxvirus D5 protein-like
  misc_feature (1)..(253): Xaa is any amino acid
MEYDLNADCPVWKKFVMEIMNYNAELIHFIQNAAGWAITGDTSEQSMFILFGTGANGKSTFLNTIMNLLGDYAIATPTETFMKKSGDQITNDIARLRGTRFVTTTEAEYGKRLSEPLIKQITGNDQMTARFLYGEFFNFVPTFKIWMATNHKPVIKGTDHGIWRRIKLIPFLTRIEEENQDKHLEQKLMKEGPGILNWLFEGARRWRNEGLKTPSIIVSATDEYRAEMDVIGNFLKERCTQGEGGCIKARELF

SEQ ID NO: 30583 - DNA, 432 bp, Unknown
  Obtained from environmental sample
  misc_feature (1)..(432): n is a, c, g, or t
atgcttgcaataaagtccgtattatccggctgcggcacttccaccggaagcaccgcctccacaggaggcggcgtttcctacggaaccggcgcttccaacggaagcgaaagcgctgaaactttgatttttgatgaaatcgacgccggcattggcggggaagtcgcccttgcggtaggggaataccttgaaaaaatgggggaaagccggcagatattctgcgttacccaccttgcgagcatcgcggtgcgcgccggcaatcatttcaaggtggagaaaaggacggaagacggcaggacttttacgggagtcggtccgttgagcgcggatggcagaagaaaagagattgccaggatgttgtcgggggatgggagtaaggcggctcttgcccatgccgatgatctaattgctaaatacggcaagaggggagggtaa

SEQ ID NO: 30584 - protein, 143 aa, Unknown
  Obtained from environmental sample
  SIGNAL (1)...(19)
  misc_feature (1)..(143): Xaa is any amino acid
MLAIKSVLSGCGTSTGSTASTGGGVSYGTGASNGSESAETLIFDEIDAGIGGEVALAVGEYLEKMGESRQIFCVTHLASIAVRAGNHFKVEKRTEDGRTFTGVGPLSADGRRKEIARMLSGDGSKAALAHADDLIAKYGKRGG

SEQ ID NO: 30585 - DNA, 921 bp, Unknown
  Obtained from environmental sample
  misc_feature (1)..(921): n is a, c, g, or t
gtggatgaaattaccgccgctgcccttcgcggcggggaactgcgcgatcttgaaaatgaggcgcagatactttcaagttttgaaaaactggccgctcatgtaaacaacgcctcgaattccttttttgacggagaaggctcattggtaagccttgcgcgccgctgcagaagcgccctggacagcgcggccgcaatcgattcgacattgtccgtattacaaaaacggattgaagatttatattatgaggcggaggacatcgcgggcgaactgcgttcataccgcgacggattaagttatgatccccggcgccagcaggcggttgacgaaaggcttgccctgctgtacaagctcaaacgcaaatactgcgaggccgcgcacagcgcggccaccccgcctgataacgccgtttccgttgaggacgccatgctcgcttaccgcgccgcggcggaagccgagatagaggcattatccaacattgaggagaaccgcgagaatctcaaggccgcaatagacacgctggaaaaagacatcgcttgcagagccgcgtctctgcgtcaaaaacggacggccgccgccggagtattgggccagcggatcaccggaattctcaagcggcttggaatgcccaatgccaggttttccccctcaataaccgcaagaacccagcaggggaaggacggccgtccaatcgttgtctgcggcccctggggcgcggaagaagtcgagttttttatctccgcgaatacgggcgaaccgctcaaagagctttccaggatagcgtcgggaggggaactttccccgcgtcatgcttgcaataaagtccgtattatccggctgcggcacttccaccggaagcaccgcctccacaggaggcggcgtttcctacggaaccggcgcttccaacggaagcgaaagcgctga

SEQ ID NO: 30586 - protein, 306 aa, Unknown
  Obtained from environmental sample
  misc_feature (1)..(306): Xaa is any amino acid
MDEITAAALRGGELRDLENEAQILSSFEKLAAHVNNASNSFFDGEGSLVSLARRCRSALDSAAAIDSTLSVLQKRIEDLYYEAEDIAGELRSYRDGLSYDPRRQQAVDERLALLYKLKRKYCEAAHSAATPPDNAVSVEDAMLAYRAAAEAEIEALSNIEENRENLKAAIDTLEKDIACRAASLRQKRTAAAGVLGQRITGILKRLGMPNARFSPSITARTQQGKDGRPIVVCGPWGAEEVEFFISANTGEPLKELSRIASGGELSPRHACNKVRIIRLRHFHRKHRLHRRRRFLRNRRFQRKRKR

SEQ ID NO: 30587 - DNA, 462 bp, Unknown
  Obtained from environmental sample
  misc_feature (1)..(462): n is a, c, g, or t
ttgcttttgccagttttaagcgatataaaattcagtgcaatgcacggaaaaattccgcaaagtatttttgaatttatagacgagtgcaaaataaacaaaccaaaaataacaatacaagccactttagacaaaaacgataaactagacgaaattccaaaaggcgtggatagaataaaaataaacgaaccgtggatattgaataaaccactagccactattcctaccgatgattgccctttcttaaccaaagaagcctgggtttgggttgacggcacatttcaagtttgccctaatccagatgctcgctttggaatgcaaacaaaatttccctttggcgattttggaaatttcttagcccaagaccccttatcaatttggaatggagaggcttatagaagtttttgcaaaaattacaaggaaaatgctatttgcaagaactgcaaaatgcgatgtctttcttaa

SEQ ID NO: 30588 - protein, 153 aa, Unknown
  Obtained from environmental sample
  misc_feature (1)..(153): Xaa is any amino acid
MLLPVLSDIKFSAMHGKIPQSIFEFIDECKINKPKITIQATLDKNDKLDEIPKGVDRIKINEPWILNKPLATIPTDDCPFLTKEAWVWVDGTFQVCPNPDARFGMQTKFPFGDFGNFLAQDPLSIWNGEAYRSFCKNYKENAICKNCKMRCLS

SEQ ID NO: 30589 - DNA, 867 bp, Unknown
  Obtained from environmental sample
  misc_feature (1)..(867): n is a, c, g, or t
ttgacggcaattgttttgggtaattttgatggttgccatttgggacacagagccttatttgaagcattgaaaatgcgggcacaaaaaaataacacgcagcccttggcaatttcctttgaaccgcacacaaggcatataattcaagaacccgggcatccagaacttttaactccaaatgatgaaaaaaaagaattgattgaaagttttggcgttccgcttgttttgcagaaatttgacaaagatttattcgcagtgcctttccgctcatttgtgaacgattttgccatacaaaaatatggaaccaaaatttgggtactcggtttagatcaaaggtttgggcgaggcggcaaaggtagcgcagaaacactaagggcatttttcccagatttgctaattcacgaaataaatccagttttatttgataacgaagcaattagctcttcgcgcataagagaagcgttaaaaaaaggaaacatagatttggcaaacgcaatgcttgggcgcaattatcccattagcggaattgttgtgcacggctgggggcaaggaaaatcactcggatcccccaccgctaatttgcagttgccagactacaaacttttgccaaaaaacggagtgtattttggaacggcctcttttgaaaatcaaaaacacaaagcagttataaacataggcaacagaccttccctcggaaaccgccctgttggcttggaagcccatctgctaaattttgacggagatttatacgataaaaaattatccgttgaactagccggacgaattagagacgaaataaaatttgatagccttgatgctttaaaagagcagattaagaaagacatcgcattttgcagttcttgcaaatag

SEQ ID NO: 30590 - protein, 288 aa, Unknown
  Obtained from environmental sample
  DOMAIN (2)...(149): FAD synthetase
  misc_feature (1)..(288): Xaa is any amino acid
MTAIVLGNFDGCHLGHRALFEALKMRAQKNNTQPLAISFEPHTRHIIQEPGHPELLTPNDEKKELIESFGVPLVLQKFDKDLFAVPFRSFVNDFAIQKYGTKIWVLGLDQRFGRGGKGSAETLRAFFPDLLIHEINPVLFDNEAISSSRIREALKKGNIDLANAMLGRNYPISGIVVHGWGQGKSLGSPTANLQLPDYKLLPKNGVYFGTASFENQKHKAVINIGNRPSLGNRPVGLEAHLLNFDGDLYDKKLSVELAGRIRDEIKFDSLDALKEQIKKDIAFCSSCK

SEQ ID NO: 30591 - DNA, 327 bp, Unknown
  Obtained from environmental sample
  misc_feature (1)..(327): n is a, c, g, or t
gtgtataaagccgaaggctttaaaatgtttcaagaatgtttggaaaccattgccgcaaacacagtctctagaattttgaatatacagtacttttcgcatggtcaacgtattccgattgactccataccagttccgcaaaaaccaaccatgacttttgaaaacagaggcgcagccccaccgagtaccggagcacagcaaggtgcaagaccaccgcaaaaacccgcagcaaaacccgcccctgttgtaaatcaagtggcaaaagtaggcagaaacaacccctgcccttgcggtagcggaaagaagtataagcaatgtcacggggggtaa

SEQ ID NO: 30592 - protein, 108 aa, Unknown
  Obtained from environmental sample
  DOMAIN (90)...(108): SEC-C motif
  misc_feature (1)..(108): Xaa is any amino acid
MYKAEGFKMFQECLETIAANTVSRILNIQYFSHGQRIPIDSIPVPQKPTMTFENRGAAPPSTGAQQGARPPQKPAAKPAPVVNQVAKVGRNNPCPCGSGKKYKQCHGG

SEQ ID NO: 30593 - DNA, 654 bp, Unknown
  Obtained from environmental sample
  misc_feature (1)..(654): n is a, c, g, or t
atggttaaactaagccaggttataaatttgggcaaaatagttccggaagtccttacctgctgccttgaaaatatagcaagcccgcaattgcgaagccaggctacaatcggcggtaatatatgcaacccttctgtcaaattggacaccgccgctccaatgatcgctttggacgcacaatacgagttgcgcagttcccagtcgacccgatgggtttcagcctccaggttttcttcccaaacagggccacccgccctagccaggcaggaatgcctttcccgcatccgcgtgcctttggatccatggacttttacctggtaccgtaaattcaatttctcgctcgcaagcaagcctggaggatgtatcctgttaattttaagaaaccagaaagatattcttacagatattcgggttttatactccagtcaggccatatatagggaaaaaaacgccgaatctatgcttataggcaagcatttgcctctggatcgcagggatgcttcagcgtttgtagagagatggaaagcatatttatcctctatccacgaagagaacaaccagttattttccggtgaatacggcaatttaaactctggactgacaaaaacccagattttacgttttattgaatctacattattgcatatttctgactga

SEQ ID NO: 30594 - protein, 217 aa, Unknown
  Obtained from environmental sample
  DOMAIN (1)...(99): FAD binding domain in molybdopterin dehydrogenase
  misc_feature (1)..(217): Xaa is any amino acid
MVKLSQVINLGKIVPEVLTCCLENIASPQLRSQATIGGNICNPSVKLDTAAPMIALDAQYELRSSQSTRWVSASRFSSQTGPPALARQECLSRIRVPLDPWTFTWYRKFNFSLASKPGGCILLILRNQKDILTDIRVLYSSQAIYREKNAESMLIGKHLPLDRRDASAFVERWKAYLSSIHEENNQLFSGEYGNLNSGLTKTQILRFIESTLLHISD

SEQ ID NO: 30595 - DNA, 1251 bp, Unknown
  Obtained from environmental sample
  misc_feature (1)..(1251): n is a, c, g, or t
atgaacataaatatgcaagcagatgaggttcgcaaggtaaaaaggtgggagacctgcgttgtgctagaccccataaccctaaacgcagacgaacctgtttccaaagcctttgaaattgcctctaggcaaaagataagcggtttcccggtgctatcgggtggcaaactcgtgggcataataacgggcagggacttgcgcacaataacagaccgcagcgtaaaggtaaaagaggtgatgacaaaagaattaatcacagcatcgccaaaggtttcgctatcaaaggcaaaggcaattttaaatacaaaccgcatagaaaaactgttgctagtggacaacaaaaaccatttaaaaggcttgataaccctaaccgatattttgaaaagggaatctaacccagaagcatgcctggattcaaacgggcagctatgcgttggagcagcggttggcacagccgcagatactttggaacgagcggcagctttggtggaagccggcgttgatatgctggttgtggacaccgcgcacgggcatcacataaatgttcgcaacatggttaaaacgctcaagaaaaaatatccgcagctgactcttgtaggcggtaatgtagccacagcagaaggcgttagggacttggcaaaaagcggtgccgatgttgtaaaaattggcattgggccaggctcaatctgcaccacaagggttgttgcaggtattggcgttccgcaattcaccgcaattttggaatgtgcggcagaagcccaaaaacacggcgtaaacataataggcgatggcggcataaaatattccggcgatattgtaaaagcattggcagcaggcgcacacgccgttatgctgggcggtctttttgccggtacggaagaaagccccggagaaaccattttggcagatggccgcacatttaagagctaccgtggaatgggctcaataggagccatgaaagaaggttcaaaagaccgctactttcaatccgagataaaagatggagatgattccaaatttgtcccagagggcattgagggcagggttccttataaaggcccgctccgagagttggtttaccaattgacaggcggaattcgccaagcccttggatatgcaggtgctgagaatttggcggagctaagggcaaaggctcgctttatgcagattacaagcgcgggcttgatagaaagccatccngcacatataacaataaccaaagaacctccgattatagggcgggagggaatgtaa

SEQ ID NO: 30596 - protein, 416 aa, Unknown
  Obtained from environmental sample
  DOMAIN (18)...(130): CBS domain pair
  misc_feature (1)..(416): Xaa is any amino acid
MNINMQADEVRKVKRWETCVVLDPITLNADEPVSKAFEIASRQKISGFPVLSGGKLVGIITGRDLRTITDRSVKVKEVMTKELITASPKVSLSKAKAILNTNRIEKLLLVDNKNHLKGLITLTDILKRESNPEACLDSNGQLCVGAAVGTAADTLERAAALVEAGVDMLVVDTAHGHHINVRNMVKTLKKKYPQLTLVGGNVATAEGVRDLAKSGADVVKIGIGPGSICTTRVVAGIGVPQFTAILECAAEAQKHGVNIIGDGGIKYSGDIVKALAAGAHAVMLGGLFAGTEESPGETILADGRTFKSYRGMGSIGAMKEGSKDRYFQSEIKDGDDSKFVPEGIEGRVPYKGPLRELVYQLTGGIRQALGYAGAENLAELRAKARFMQITSAGLIESHPAHITITKEPPIIGREGM

SEQ ID NO: 30597 - DNA, 384 bp, Unknown
  Obtained from environmental sample
  misc_feature (1)..(384): n is a, c, g, or t
gtgcggccatctgccaaaatggtttctccggggctttcttccgtaccggcaaaaagaccgcccagcataacggcgtgtgcgcctgctgccaatgcttttacaatatcgccggaatattttatgccgccatcgcctattatgtttacgccgtgtttttgggcttctgccgcacattccaaaattgcggtgaattgcggaacgccaatacctgcaacaacccttgtggtgcagattgagcctggcccaatgccaatttttacaacatcggcaccgctttttgccaagtccctaacgccttctgctgtggctacattaccgcctacaagagtcagctgcggatattttttcttgagcgttttaaccatgttgcgaacatttatgtga

SEQ ID NO: 30598 - protein, 127 aa, Unknown
  Obtained from environmental sample
  misc_feature (1)..(127): Xaa is any amino acid
MRPSAKMVSPGLSSVPAKRPPSITACAPAANAFTISPEYFMPPSPIMFTPCFWASAAHSKIAVNCGTPIPATTLVVQIEPGPMPIFTTSAPLFAKSLTPSAVATLPPTRVSCGYFFLSVLTMLRTFM

SEQ ID NO: 30599 - DNA, 309 bp, Unknown
  Obtained from environmental sample
  misc_feature (1)..(309): n is a, c, g, or t
atgcaacatggcggctctgtgcgaagtatcatatccgaaagcgggcgtagtgccggaactgtccttggaagccatttctttcaggatatcgtggaatccgatattttctacgccgcgatctttgacggcgaacccggcatcatcttctgtcccgatcagattttatcgcgggagaacctgtttaaggaattttaccctgaagaacaaaaatgggagtcggttatacacgtagccaaaacgcctgatttgatattacaatcggatgttacaaaccaaaaactcattatttattgggagaaggagcaataa

SEQ ID NO: 30600 - protein, 102 aa, Unknown
  Obtained from environmental sample
  misc_feature (1)..(102): Xaa is any amino acid
MQHGGSVRSIISESGRSAGTVLGSHFFQDIVESDIFYAAIFDGEPGIIFCPDQILSRENLFKEFYPEEQKWESVIHVAKTPDLILQSDVTNQKLIIYWEKEQ

SEQ ID NO: 30601 - DNA, 996 bp, Unknown
  Obtained from environmental sample
  misc_feature (1)..(996): n is a, c, g, or t
atgctcaggcttgtattcggtcttggaacgcgcgctgtggatcgcgtctccggcgattacgcgaaaattgttccgctggactgcccgaacaagggaccgcccgtaagctacggcgatgaaaaaaagttttcccagcataaagccgacgtgcttgatttatccaataacaaattaacggacgcgcctcttgaaaaacttgccgacggagatttaaaaaccgacaaagaaatatttttcacgacagataccgaggcgataaaccgaatgcgcgagctaagaataaattccgcaacaactcctcgaatccctgattttagaaaactgttaaacgaaacaggttttcccgaatttgtccgatccgcgcttttaacattacgtacggcatacaattaccctgtcgatattgaatttaccgccaactttacgccggacggagaattcagattcaatcttttgcagtgccgcccgttacagacaaagggaattggaagagtcatggaagctccgcagccgcggcatgagcatattttcttctcgtctacgggcgactttatgggcggcaatgtaaggctgtattttgattacgttgtttttgtaaaagccacagaataccttgatttacccgatcaggacaaatatcaggcggcgaggacagtcggttttatcaatcaaaaactaaaagacaaaactgtattattgatgggacccggccgctggggaacaacaacaccgtcgctcggcgtaccggttcactttagtgagttatgcaacatggcggctctgtgcgaagtatcatatccgaaagcgggcgtagtgccggaactgtccttggaagccatttctttcaggatatcgtggaatccgatattttctacgccgcgatctttgacggcgaacccggcatcatcttctgtcccgatcagattttatcgcgggagaacctgtttaaggaattttaccctgaagaacaaaaatgggagtcggttatacacgtag

SEQ ID NO: 30602 - protein, 331 aa, Unknown
  Obtained from environmental sample
  misc_feature (1)..(331): Xaa is any amino acid
MLRLVFGLGTRAVDRVSGDYAKIVPLDCPNKGPPVSYGDEKKFSQHKADVLDLSNNKLTDAPLEKLADGDLKTDKEIFFTTDTEAINRMRELRINSATTPRIPDFRKLLNETGFPEFVRSALLTLRTAYNYPVDIEFTANFTPDGEFRFNLLQCRPLQTKGIGRVMEAPQPRHEHIFFSSTGDFMGGNVRLYFDYVVFVKATEYLDLPDQDKYQAARTVGFINQKLKDKTVLLMGPGRWGTTTPSLGVPVHFSELCNMAALCEVSYPKAGVVPELSLEAISFRISWNPIFSTPRSLTANPASSSVPIRFYRGRTCLRNFTLKNKNGSRLYT

SEQ ID NO: 30603 - DNA, 876 bp, Unknown
  Obtained from environmental sample
  misc_feature (1)..(876): n is a, c, g, or t
atgaaagacctgggccttctcaatgacgcgtaccgcgtgatggtaaccggcacggttcaggaggaagactgcgacggcctgtgctgggagtacattataaaagaagaaaatatcaagcctgaatttgtggtgatcaccgagccgaccgacggcaacatctaccgggggcagaggggccgcatggagatccgcgttgaggtgaagggcgtttcatgccacggttccgcgcccgaacgcggcgacaacgcgatttacaagatgggggaaataatcgccgaggttaaggcgctgaataaaaaactgaaaaaagacaagttcctgggcaaggggacactggcggtttcgcaaatctatttcagctcgccttcccgctgcgccgtcgccgacatgtgcgccatttccattgaccgccgcctgaccttgggagaaacctacaagagcgccctcgcggaaatagccgccctgcccaaggtcaaagagtacaaggccaaagtcaccatgtacaggtacgatctgcccagttacaccggcgtggtatatcccattgattgctattttcctacctgggttataccggaagacgccaaacccgcgagggcgatggtaaaagcctataagggaatgttcggcaagccaaaggtggacaaatggactttttcaactaacggtgtctcgatcatggngcggaacanaatcccctgcataggctttggcccgggcaaggaagagcaggcccacgcccccaacgagaagacctggaaagccgacctcgtccgctgcgccgcggtgtacgcagcgttgccgagtatctatactggcgaagagttggaagaaaaaaagggtaaagataagaaagctaaaagcaagaagaaatga

SEQ ID NO: 30604 - protein, 291 aa, Unknown
  Obtained from environmental sample
  DOMAIN (55)...(164): Peptidase dimerisation domain
  misc_feature (1)..(291): Xaa is any amino acid
MKDLGLLNDAYRVMVTGTVQEEDCDGLCWEYIIKEENIKPEFVVITEPTDGNIYRGQRGRMEIRVEVKGVSCHGSAPERGDNAIYKMGEIIAEVKALNKKLKKDKFLGKGTLAVSQIYFSSPSRCAVADMCAISIDRRLTLGETYKSALAEIAALPKVKEYKAKVTMYRYDLPSYTGVVYPIDCYFPTWVIPEDAKPARAMVKAYKGMFGKPKVDKWTFSTNGVSIMXRNXIPCIGFGPGKEEQAHAPNEKTWKADLVRCAAVYAALPSIYTGEELEEKKGKDKKAKSKKK

SEQ ID NO: 30605 - DNA, 933 bp, Unknown
  Obtained from environmental sample
  misc_feature (1)..(933): n is a, c, g, or t
gtgtcgctgtacccaaccggaacaatctacgccactagtacgcgcgtgacggctaaacctatcccgaacgaagactacatatttacaaggtggagcggagcgtcaaattccaccgacacagtgataacgataacaatggaccggagtaagacgcttaccgccaactttgaacaaaacaccgtaacgtcgcctacgagatacgcgctgacagtttcaagcacgggcacgggcgcgacaggcagcggccgttacacagcgggaacaacggtaaacataacggcgggaaccgcgccgataggctatcagtttaaagaatggacatcctcggtttccggcgtaacatttaccccaagcgccgacagccagaatgcagcgtttaatatgccggagagcgatgtgacggtaacggcgcagtggacatccgccaccccgtccgcaacgtataccataacgctcagcgccaacggcggaacgctcaccggcggatcgaccgtaactaccggtacaaacgggaaactatcgagtttgccgtcaaatcccacaagaagcggttatacgttcaacggatggtacacatccgctacaggcggcacgaggataacgacggattatacgttcgcatcaaatagcactatatacgcgcagtggacatccgccatcacatataccataacgttcaatgccaacggcggcagcggagcccccgcaaacgctactacaggcacagacggcaaactcgcgaacttaccgacccgcacgcccacaagaggcggttatacgttcaacgggatggtacacatccgctacaggcggttcgatgataaacacagactaccgattcacgggaaataccacggtatacgctcagtggtcgcaaatatcgtaacgttcacgctaatggcgggaacgtcagtcccgcaagcgctccggtag

SEQ ID NO: 30606 - protein, 310 aa, Unknown
  Obtained from environmental sample
  misc_feature (1)..(310): Xaa is any amino acid
MSLYPTGTIYATSTRVTAKPIPNEDYIFTRWSGASNSTDTVITITMDRSKTLTANFEQNTVTSPTRYALTVSSTGTGATGSGRYTAGTTVNITAGTAPIGYQFKEWTSSVSGVTFTPSADSQNAAFNMPESDVTVTAQWTSATPSATYTITLSANGGTLTGGSTVTTGTNGKLSSLPSNPTRSGYTFNGWYTSATGGTRITTDYTFASNSTIYAQWTSAITYTITFNANGGSGAPANATTGTDGKLANLPTRTPTRGGYTFNGMVHIRYRRFDDKHRLPIHGKYHGIRSVVANIVTFTLMAGTSVPQALR

SEQ ID NO: 30607 - DNA, 915 bp, Unknown
  Obtained from environmental sample
  misc_feature (1)..(915): n is a, c, g, or t
ttgcgagtggctgccatgatccgtgtaatcgacagaacactatctgcgcttgatgattttcctcttgatgtttctgcgcttactcagtttctgaaactattaattcaaactgagcctgacgctattgaactttcgcagaagttgtttcatttgctttcccctctgcctgattattcaaactacattgtaaggataaacaagattgaagaggcggcgaagtatcctaacactgcggggtttgtttgctccgacgcttcggcggattgcggcaagaatgtaacctttgaagttttgttaaacaatacacaagagattgatactgccgcgcgcttcaaagagttcgggaaggttcgtgttcagggattgggtaatatcattacggaagattatttgagcgtctttgcgcagttgcgggaaaaattttcaggcgggattgaattttgtcccgtcaatagttgtaatttcgcaacagcgttggcggcggagtggctgacaagcggaggaaacagcgttgtaacaagtttcggcggcataggcggttttgctcctacagaagaagttattattattttgaaattggcggggcttcgcaaaaaagaaaagatttataattttttccccgaaatggcaagtcttcttaacaaaattaccgccgaacctttgcgccgcaacaagccgatactcggcaggcgtatctttcatgtggaatcgggcattcatgtagacggtattttgaaaaaccccgagagttacgagccttttccgcctgaaacagtcgggcttaaaagaaaaattgttataggcaggcagagcggcacggcttcaataaaaaccaaacttgaggagttgggtatttcctgcgctgatgaaaaaatcgccgctttcggagagcgtagaaagactcggccgatctga

SEQ ID NO: 30608 - protein, 304 aa, Unknown
  Obtained from environmental sample
  misc_feature (1)..(304): Xaa is any amino acid
MRVAAMIRVIDRTLSALDDFPLDVSALTQFLKLLIQTEPDAIELSQKLFHLLSPLPDYSNYIVRINKIEEAAKYPNTAGFVCSDASADCGKNVTFEVLLNNTQEIDTAARFKEFGKVRVQGLGNIITEDYLSVFAQLREKFSGGIEFCPVNSCNFATALAAEWLTSGGNSVVTSFGGIGGFAPTEEVIIILKLAGLRKKEKIYNFFPEMASLLNKITAEPLRRNKPILGRRIFHVESGIHVDGILKNPESYEPFPPETVGLKRKIVIGRQSGTASIKTKLEELGISCADEKIAAFGERRKTRPI

SEQ ID NO: 30609 - DNA, 363 bp, Unknown
  Obtained from environmental sample
  misc_feature (1)..(363): n is a, c, g, or t
atgaacgggttgaaactgccgtcttattggcggcaaaagaaaggagtgaagtatatggtacagcctaagcaccacatttttgtgtgtacaagctgccgcattaacggtcagcaaaagggattctgtttccagaagggaagcgtggatctggtacagaagtttatggaagaaattgaggataaggatctttcctcagactgccttgtaacaaacacaggctgtttcggcatctgcgacaaaggtccgattgccgtcgtataccccgaaggggtctggtacggcaacttggatgccgacgcagtggaagaaatctgcgaaaaacatctggagggcggaacacccgtagacaagtttaggatctag

SEQ ID NO: 30610 - protein, 120 aa, Unknown
  Obtained from environmental sample
  misc_feature (1)..(120): Xaa is any amino acid
MNGLKLPSYWRQKKGVKYMVQPKHHIFVCTSCRINGQQKGFCFQKGSVDLVQKFMEEIEDKDLSSDCLVTNTGCFGICDKGPIAVVYPEGVWYGNLDADAVEEICEKHLEGGTPVDKFRI

SEQ ID NO: 30611 - DNA, 315 bp, Unknown
  Obtained from environmental sample
  misc_feature (1)..(315): n is a, c, g, or t
gtggatttacacttcggtcacgcgcaagagttttacatttacgagagcgacggcgaacaggtaaagtttatagaaaagcgcggcgtgctcaagtattgtaacgggcccggccgcgaagatgacaaagatgacagatgggaatctgttataaacgcactgcgcgattgtgcggcggtgcttgcgcttagaacaggctatgcgcctgaacaaagattgaaagaaaacggaattgacgtaataacaacctatgaacgggttgaaactgccgtcttattggcggcaaaagaaaggagtgaagtatatggtacagcctaa

SEQ ID NO: 30612 - protein, 104 aa, Unknown
  Obtained from environmental sample
  DOMAIN (2)...(95): Dinitrogenase iron-molybdenum cofactor
  misc_feature (1)..(104): Xaa is any amino acid
MDLHFGHAQEFYIYESDGEQVKFIEKRGVLKYCNGPGREDDKDDRWESVINALRDCAAVLALRTGYAPEQRLKENGIDVITTYERVETAVLLAAKERSEVYGTA

SEQ ID NO: 30613 - DNA, 762 bp, Unknown
  Obtained from environmental sample
  misc_feature (1)..(762): n is a, c, g, or t
atgaacaattccgacaataacacaatccgcataaaccgctacctagcccaatgcggcctcggcgcccggcgtaagtgcgacgaattggtggagggcgggcatatctacctgaacgggcggaaagtgaccgaactcggcgccaaagtcaaccccgccgttgacaaggtggagtataagggcaagcagctccggcccatccgaaaattggagtactacgcctactgcaagccgcgcgaggtgatggtgaccaacagcgacccggagggacggttgacgatctacgaggcgctacggcgcgacgggcttgacgccgctcttctaaaatacgtggggcggctcgactatctctcggagggactgttgctattgaccaacgacggcgacctgatccacgccttaacgcaccctcgctttcggataaagaagatttacatggtgagaaccgggcgtccgcttgacaaagtggatatctcaaaactcttagacggcgtggagtcggagggtcaaatcctgcacgccgcttccgtagacgcggtggacgtcaagccggatcaatattggtacgagatagcgctgtttgagggtaagaaccgtcaaatacgccgaatgcttgaagggataggccacgaggtaaggcgcttacgccgtaccgccttagggtcggtgaggcttggcggcatgacggcgggggagtatagggagttgactccgcgggaaatttctgggttgaagaacgcggggttcaaaaacagtctgaattag

SEQ ID NO: 30614 - protein, 253 aa, Unknown
  Obtained from environmental sample
  DOMAIN (9)...(55): S4 domain
  misc_feature (1)..(253): Xaa is any amino acid
MNNSDNNTIRINRYLAQCGLGARRKCDELVEGGHIYLNGRKVTELGAKVNPAVDKVEYKGKQLRPIRKLEYYAYCKPREVMVTNSDPEGRLTIYEALRRDGLDAALLKYVGRLDYLSEGLLLLTNDGDLIHALTHPRFRIKKIYMVRTGRPLDKVDISKLLDGVESEGQILHAASVDAVDVKPDQYWYEIALFEGKNRQIRRMLEGIGHEVRRLRRTALGSVRLGGMTAGEYRELTPREISGLKNAGFKNSLN

SEQ ID NO: 30615 - DNA, 714 bp, Unknown
  Obtained from environmental sample
  misc_feature (1)..(714): n is a, c, g, or t
atgaatatgatccgaaaatgcgttttttccgtatttctgctttttttcgcttgtttttccctctttgcccaggggcaggagacggggaatatgccctttgttatccgcggcgaggtttttgtcgatttagagcctatttacgcggggcacgtcgattccgagtatcccttgagtattcccacagccggacagcgcgcccttgaggaagcggccatgtttttttcggcgatgatatacggctggtcttttgattatgacgtaggggaaagggcaagacggatagaggaaaatctggaattaacgccgagaggcgaaataaataaaggcgacccgcgccttagcgttaccgatgttgaagtcagcggcagcaggctgaaaatatgggcggattatcatttgaccgatttacagcagagccgcgtgcaggcatggcgcagcacgatgatcaggaacgcgcaaggcgtgggatatggtcccgcgagtgttgacgaatatcccggatggcttcagttaaaaaaaaccgcgcttgaaaacgcggcaaaggccgcccttcgcgcaatgcttcgcggcagcgagcgtaaccgacccaaagaagttaccggttttatcagcctcgcctccttcccgaggtattatatcgacagcggcagatggacggcttcagcaaggtttagagttcaaataacggaaattatccccttcgcggtttattag

SEQ ID NO: 30616 - protein, 237 aa, Unknown
  Obtained from environmental sample
  SIGNAL (1)...(25)
  misc_feature (1)..(237): Xaa is any amino acid
MNMIRKCVFSVFLLFFACFSLFAQGQETGNMPFVIRGEVFVDLEPIYAGHVDSEYPLSIPTAGQRALEEAAMFFSAMIYGWSFDYDVGERARRIEENLELTPRGEINKGDPRLSVTDVEVSGSRLKIWADYHLTDLQQSRVQAWRSTMIRNAQGVGYGPASVDEYPGWLQLKKTALENAAKAALRAMLRGSERNRPKEVTGFISLASFPRYYIDSGRWTASARFRVQITEIIPFAVY

SEQ ID NO: 30617 - DNA, 711 bp, Unknown
  Obtained from environmental sample
  misc_feature (1)..(711): n is a, c, g, or t
atgagcttgtctgaagatgtttcacaggaagactttgattcacaaaataacattgatcccttaagcggtattgaaaacgggcaatcggaaaacggcttgttttccggtgacgcgggggaactgcccctggacacgcgccgtgcgctggtgcaattattgtccggcccgtctattgacggacgcagacattcaaaactctggcctgtgctgttgcgcgacgagggcgttattcgcaagcgccttgccgatttatttctggaattagttatcgaccgagaccttctggtagctttcacccgtcagtttgacacaggcgatgtggaagacgcgaaattacttcgccgcgcccagttgacctttattgattcggttttgcttctttacctgcggcgtcaactgacacaggctgaatcgcacgccgagcgggccgtcgtatccaaagacgagatcgtcgatcatctcagtctgtatgagaaatcgggaagcaccgacaaggcaggatttgccaaacgtatttacgcctcaattgaaaagatcaagaaacacaacattctgcaaaaaattcatgccagcgatgatcgctttgaggtatcgcctaccctgaaattgctgttttcggcggaggaaattcaggcgctaacaaaacaatatcaacgcatggccgctgacgaacaacaggccgacgggcccctggaagaggaagaagaatga

SEQ ID NO: 30618 - protein, 236 aa, Unknown
  Obtained from environmental sample
  misc_feature (1)..(236): Xaa is any amino acid
MSLSEDVSQEDFDSQNNIDPLSGIENGQSENGLFSGDAGELPLDTRRALVQLLSGPSIDGRRHSKLWPVLLRDEGVIRKRLADLFLELVIDRDLLVAFTRQFDTGDVEDAKLLRRAQLTFIDSVLLLYLRRQLTQAESHAERAVVSKDEIVDHLSLYEKSGSTDKAGFAKRIYASIEKIKKHNILQKIHASDDRFEVSPTLKLLFSAEEIQALTKQYQRMAADEQQADGPLEEEEE

SEQ ID NO: 30619 - DNA, 1041 bp, Unknown
  Obtained from environmental sample
  misc_feature (1)..(1041): n is a, c, g, or t
gtgggcgaggcgtatctgccctgtgcgcgcggatgctccttgcgcctcatgccctcggtcatgctgtggagcgcgccggggctgggcaaatcccagggcgtgcgccagcttgccgactatgtgggcagccgggcgaagaaaaaaaccgtggtgcgggatgtgcgcctcntgctcttcaacccggtggacctgcgcggcattccggtggcggacaaggacagggtgctggccgtgtggctgaagcccaagatttttgacctggatgccgatgacggcgtcctgaattttctctttctggatgaaatttcgtctgcgtcgccctcggtgcaggccgccgcctaccagatcaccctggatcgcaccgtaggcgaacacactctgccggacaactgcattgtcattgcggcaggcaaccgcgtaacggatcgctccgtagcatggcagatgcccctggccttggccaaccgcctctgtcacatcgaactggagtgcgatatccgctcgtggcggcgctgggccgtatcgaacggcatccatcccgaaatcctgggctggctggcccgtcggccggatcaactcatgggcttcaacccggccggcgatgccttggcctttcccacgccgcgcacctgggaaatggccagccatctcctgcacaatgtttccgccgacccggaggatatccgcccactgctggccggctgcctgggcgcggcggctgcggccgaattctgcgccttctgtcgaagctacggcagtctgccgtccatggaggatgtctttgccggacgctgccgcaccgtgccgaaaacccccgatgccctgtatgccctgacctcgtccatgctggcctttgcccggaagcgcaaggacgatttggcttccatgggccattccatccgctatgccctgaacctgccgcctgacttcagcttcatgctgttacgcgactatatggctttggaagaaggatacaggagcaccttgctggctattcccgattttgcggagtggctgcgccgcaatgagaggctgctgtga

SEQ ID NO: 30620 - protein, 346 aa, Unknown
  Obtained from environmental sample
  DOMAIN (19)...(159): ATPase family associated with various cellular activities (AAA)
  misc_feature (1)..(346): Xaa is any amino acid
MGEAYLPCARGCSLRLMPSVMLWSAPGLGKSQGVRQLADYVGSRAKKKTVVRDVRLXLFNPVDLRGIPVADKDRVLAVWLKPKIFDLDADDGVLNFLFLDEISSASPSVQAAAYQITLDRTVGEHTLPDNCIVIAAGNRVTDRSVAWQMPLALANRLCHIELECDIRSWRRWAVSNGIHPEILGWLARRPDQLMGFNPAGDALAFPTPRTWEMASHLLHNVSADPEDIRPLLAGCLGAAAAAEFCAFCRSYGSLPSMEDVFAGRCRTVPKTPDALYALTSSMLAFARKRKDDLASMGHSIRYALNLPPDFSFMLLRDYMALEEGYRSTLLAIPDFAEWLRRNERLL

SEQ ID NO: 30621 - DNA, 615 bp, Unknown
  Obtained from environmental sample
  misc_feature (1)..(615): n is a, c, g, or t
atgcggcttggggttccggtttttagcctgcgtgtttttatgcccaatttgccaagcgattctggaaataaatctgaactaggttcattcactctgcctccggtgctaactttgtctaagcctgtgaacatttttgatttgaaaaaagtaccgcttgcaattataaccgatttgcattgtatttgcacatcgctccgcaacccaactttccaacccttttcatttttttcaagcaaaaccgcttcaccttctattatttccaagccttctaaaccttccaaagtttttcgtgcaatttcgctatacaaattcatatcgcactgggcacggtttccccaaactgcgggacctttgctggaattcaaggttctgaacattattcccgccttgtctgccaaaacccccatcaagccacccatagcatcaatatcgcgcaccatttgccccttgccaaccccacctatcgccggattgcaactcatgcgccctatgctttttttgtcaaaaacgagcaacgcggtttttacgccaattttccaagctgcattcgccgcttcaatgccggcgtgtccgccgcctattacaactacatcaaagttcacagaggaaaggtag

SEQ ID NO: 30622 - protein, 204 aa, Unknown
  Obtained from environmental sample
  misc_feature (1)..(204): Xaa is any amino acid
MRLGVPVFSLRVFMPNLPSDSGNKSELGSFTLPPVLTLSKPVNIFDLKKVPLAIITDLHCICTSLRNPTFQPFSFFSSKTASPSIISKPSKPSKVFRAISLYKFISHWARFPQTAGPLLEFKVLNIIPALSAKTPIKPPIASISRTICPLPTPPIAGLQLMRPMLFLSKTSNAVFTPIFQAAFAASMPACPPPITTTSKFTEER

SEQ ID NO: 30623 - DNA, 1314 bp, Unknown
  Obtained from environmental sample
  misc_feature (1)..(1314): n is a, c, g, or t
gtgacagccgcccacacaggaagtcccgctctttaccggctgcttcacaaacgcagaaccatcaccgatcccacgccgggcgttacccgcgaccccgtagaagcggacgcccttattaacggcaaaccggtacggcttatcgatacggggggctttaaacttgatcgcctgacagggaacaacattgatgatctggtcgtggagagaaccctcgccacggtagaaaaagcaaatcttatagtcctgcttttggaagccggcgaaataaccagcgaagacgaagaatatataaaaatactccgcagttataaggagcggcttatcgtcgcggtgaacaagaccgagggcggcaggctggaggcggacgcgtggaatctgctgtcatacggatttgaaaaagtctttatgatctccgccgagcacggcgacaacataggagaccttacggaagaaatcgtcagcaggattgattttacagaggtcgaagaagaagaaaacgaacaccgccctattcgcataacgattttagggaaaccgaacacgggcaagtccactttgtcaaacaggcttacgtcgtctaacgcctcgatcgtaagcgatattcccggcaccacgcgggacgtgattgaggggagtttccgctggaagtcccgcgatttcatcatccttgacacggccggcatccgcagaagaaccaaggtaaacgaaaacatcgagtattactcggtgaaccgcgccattaaaaccatagacgaagctgacattgtgatactgctgatagactccgaggaagggctcagcgagcaggacaagaaaattacagccctcgcccacaacaagggcaggggcattatcatggcgcttaacaaatgggacaccgcgcccaaaataaaaaacgcatttgaggcggccagggatcgtatccattttttattcggcaaaatggaatttgcgccggtgcttcccatcagcgcgaaggacggaaccggcgttgacaaactgcttaacacggcgataaccatgtacagtcagcttaacacccaagtggaaacaagccgcctgaaccaacaacttaaacgctggcttgaggaatgtcccccgccttcagggccgcagacccgtttcagcgtaaaatacgccgtgcagagttccgcaaaccccgtcgagtttatttttttcgtttcccgccccaaagctgtcagcgaggcgtatgtctcctatctgcggaatagaatacggaaagatttgggcttttcgtttattcctgttgaggtgaagataagagcgtctagaaagcaagggagtagggagtag

SEQ ID NO: 30624 - protein, 437 aa, Unknown
  Obtained from environmental sample
  DOMAIN (168)...(344): Elongation factor Tu GTP binding domain
  misc_feature (1)..(437): Xaa is any amino acid
MTAAHTGSPALYRLLHKRRTITDPTPGVTRDPVEADALINGKPVRLIDTGGFKLDRLTGNNIDDLVVERTLATVEKANLIVLLLEAGEITSEDEEYIKILRSYKERLIVAVNKTEGGRLEADAWNLLSYGFEKVFMISAEHGDNIGDLTEEIVSRIDFTEVEEEENEHRPIRITILGKPNTGKSTLSNRLTSSNASIVSDIPGTTRDVIEGSFRWKSRDFIILDTAGIRRRTKVNENIEYYSVNRAIKTIDEADIVILLIDSEEGLSEQDKKITALAHNKGRGIIMALNKWDTAPKIKNAFEAARDRIHFLFGKMEFAPVLPISAKDGTGVDKLLNTAITMYSQLNTQVETSRLNQQLKRWLEECPPPSGPQTRFSVKYAVQSSANPVEFIFFVSRPKAVSEAYVSYLRNRIRKDLGFSFIPVEVKIRASRKQGSRE

SEQ ID NO: 30625 - DNA, 660 bp, Unknown
  Obtained from environmental sample
  misc_feature (1)..(660): n is a, c, g, or t
gtgtataattctgcatcatacgctgggctttattccggatacagacgccgtctcggagctgaaccttcgggtaattgtagactgttcccacagttatgggacagaaacggaagaaccttcccagccatgtctacgcctgtttttacgattctggggctggaagaaagagatatgcttacctcaggcggcggggcgctgctttattcgcaaaaccggcgggatgcggccctgctgcgcggtcagggcgatctgccaccggaatacgggcttcccgatatgaacgccgctttggcggtggttcagtttaaggaggccgcaaagaatttattaaaacgccgtgagatcgcggagctctatactcagtcagccgtaaggaccaggcacaaaatgtttatacggcagggaacggaatataacaattacgcctttcctttgattctggaaaccggcttgaatgacgtaaaagcctatgcacgccggaaagaaattgccgtggaaaacgcttttgaaaataccctggccggaagcggcgctgttccgcccgaaaaatgtcctcacgcatattcgctttccttaaggactgttctcttccccctttatcccagattggggatgacgagtgcggggaaagtagcgaaacttatcatgactctcccatag

SEQ ID NO: 30626 - protein, 219 aa, Unknown
  Obtained from environmental sample
  misc_feature (1)..(219): Xaa is any amino acid
MYNSASYAGLYSGYRRRLGAEPSGNCRLFPQLWDRNGRTFPAMSTPVFTILGLEERDMLTSGGGALLYSQNRRDAALLRGQGDLPPEYGLPDMNAALAVVQFKEAAKNLLKRREIAELYTQSAVRTRHKMFIRQGTEYNNYAFPLILETGLNDVKAYARRKEIAVENAFENTLAGSGAVPPEKCPHAYSLSLRTVLFPLYPRLGMTSAGKVAKLIMTLP

SEQ ID NO: 30627 - DNA, 648 bp, Unknown
  Obtained from environmental sample
  misc_feature (1)..(648): n is a, c, g, or t
atgaaaatagaagtctactctcctaccatcagacgtaaagagatggatgcggtcttgaccgctatggtggaagaccgaataggcccaggggaacaggctaaatttctggttcaaactgcccgtgaaaaaataaaatttgactattgcctttcactccgcagcccggcaattgccctttatctggctttaaaatcgctaaaccttgaaaaggggcagggggtgttaatttctgccctgtcaccgctttattatgggcgggtaattgaagatcttgccctcgttccgcaatattgcgatgtagacctttccacagcctgtgtaagccgggagaccatatctataactatggaaagtgatcagaatataaagtgtataattctgcatcatacgctgggctttattccggatacagacgccgtctcggagctgaaccttcgggtaattgtagactgttcccacagttatgggacagaaacggaagaaccttcccagccatgtctacgcctgtttttacgattctggggctggaagaaagagatatgcttacctcaggcggcggggcgctgctttattcgcaaaaccggcgggatgcggccctgctgcgcggtcagggcgatctgccaccggaatacgggcttcccgatatga

SEQ ID NO: 30628 - protein, 215 aa, Unknown
  Obtained from environmental sample
  misc_feature (1)..(215): Xaa is any amino acid
MKIEVYSPTIRRKEMDAVLTAMVEDRIGPGEQAKFLVQTAREKIKFDYCLSLRSPAIALYLALKSLNLEKGQGVLISALSPLYYGRVIEDLALVPQYCDVDLSTACVSRETISITMESDQNIKCIILHHTLGFIPDTDAVSELNLRVIVDCSHSYGTETEEPSQPCLRLFLRFWGWKKEICLPQAAGRCFIRKTGGMRPCCAVRAICHRNTGFPI

SEQ ID NO: 30629 - DNA, 864 bp, Unknown
  Obtained from environmental sample
  misc_feature (1)..(864): n is a, c, g, or t
atgcacgcttcaaacggacaggaagccgtcgcggttgggcttatgaaggctctcaaaaaagacgatatggtttctacccaccaccgcggcaatggacacttcatcgcgaagggctgtgacatgggaaaaatgatggccgagctgatgggcaaaaaggaaggactgtgcaaaggccacggcgggaaaatgcatcaggttgataaagcatacggcatgatgggtgcgagcggcattgtcggcgcatcttgcgttctcgggccgggccacgcgctgtattcgcagctttttaacccaggccaggttacgatggcgatttttggcgacggcgcggcgaatcagggcatgttccacgaaggcatcaacatagccgccctgtggaaactgcccgttgttttcgtttgtgaaaataaccagttcggtatttccctgcgggacacggattccgctgcgtccgccaccattgcccagagatccgcgtcctacgacattcccggcgtgagggtggacggcaacgatgttatcgctgtctatgaagcggcggtcgaagcggttgccagggcgcgggaaggaaaggggccgactcttattgagtgccgaacttaccgcgttcggggtcactacgaaggcgacgatatgtcttatcgtcccaaagaagagacagccgactgggtaaaaaaccatgaccctatcaaaaagctcaaggaagttctggttgctgaatttggctggacggaaacggatgacaaagatgtttgggaaaaggcggcagcggacgtaaaaaaagccgtcgagtacggcattgccggaacccttatgaagcctgaagacgctgaagagaacgtatacgcggaggatggagtatga

SEQ ID NO: 30630 - protein, 287 aa, Unknown
  Obtained from environmental sample
  DOMAIN (1)...(275): Dehydrogenase E1 component
  misc_feature (1)..(287): Xaa is any amino acid
MHASNGQEAVAVGLMKALKKDDMVSTHHRGNGHFIAKGCDMGKMMAELMGKKEGLCKGHGGKMHQVDKAYGMMGASGIVGASCVLGPGHALYSQLFNPGQVTMAIFGDGAANQGMFHEGINIAALWKLPVVFVCENNQFGISLRDTDSAASATIAQRSASYDIPGVRVDGNDVIAVYEAAVEAVARAREGKGPTLIECRTYRVRGHYEGDDMSYRPKEETADWVKNHDPIKKLKEVLVAEFGWTETDDKDVWEKAAADVKKAVEYGIAGTLMKPEDAEENVYAEDGV

SEQ ID NO: 30631 - DNA, 465 bp, Unknown
  Obtained from environmental sample
  misc_feature (1)..(465): n is a, c, g, or t
ttgccaataacggcaattggagcgcctacatccgcggaaacgccttcggccacaagaattttcaggagtacgccctccgccggagattctatctcggcggtaactttatcggtctcaatttccgcaagcggagcgccttttttgacggactctccttccttgaccagccatttccctatagtgccgctggtcatttgtatgccgcgtttgggcatctgtacaatttcagccacaatcaacctcctatatcatcgcggttacagtggatatgattttcgctggcgtaggcgcggattcgttttccgcgtcggtcgagaacggaaccggaatatcaggctgcatacccgcgcgatcggagcgtcagccagtcaaacaattttttcctggatctgggcaataatttcgccgccgaaaccaccgcgcagattcgcttcgtggacaacgacggccttgccggttttctga

SEQ ID NO: 30632 - protein, 154 aa, Unknown
  Obtained from environmental sample
  misc_feature (1)..(154): Xaa is any amino acid
MPITAIGAPTSAETPSATRIFRSTPSAGDSISAVTLSVSISASGAPFLTDSPSLTSHFPIVPLVICMPRLGICTISATINLLYHRGYSGYDFRWRRRGFVFRVGRERNRNIRLHTRAIGASASQTIFSWIWAIISPPKPPRRFASWTTTALPVF

SEQ ID NO: 30633 - DNA, 1020 bp, Unknown
  Obtained from environmental sample
  misc_feature (1)..(1020): n is a, c, g, or t
atgatggccgagaaccgtggattgtttctgcgttacaagctggatatacgcgcaatcacccttggggtgtcccttctggattgcgtttcgtcttccggcgatgaatgccgcaggaaaatccgtgataagctgatgcgaatagcgggcccgctcgttaagacaggcaaggacattgagaacgaatacggtatacccatcatcaacaaacgtatagcaattacgcctgtcgctttgattgcgtcttcctgtgatgaaaacgattttaccccttttgctcaaacgcttgacaaggccgctgtcgatcttggcgttgattttgtcggcggcttttccgccctggtgcaaaaaggcctgtccagtggcgatgaacgattgattacctcgctgccgtctgcgctgtcccaaaccgaaagggtctgcgcctcagtcaatgtcgccgctacaaaaaatggcattaacatggacgcggtaagggttatgggcggcgtgattaagaagatagcggaaaagaccgcgactcgggacggtataggctgcgcgaagctggtggtattctgtaatgcccctgaggacaaccccttcatggcgggcgcttttcacggcgtcggcgaaggagaaagctgtttaaatgtcggggtgtcaggccccggcgtggttaaggccgcgttggaaaacctcagaggagccagctttgacgaacttgccgacgcgataaaaaaaaccgcattcaaaattacccgaatgggacagcttgttggaatggaagccgcggcgcggctgggcgtaccttttggcatattggatctttcccttgcgcccacccctgaggttggggattcggtcgcgcgtatccttgaggagatgggacttgaaaccgcgggaacccacggcactacggcggcccttgccatgttaaccgacatgataaagaaaggcggcataatggcgtccactcatgtaggcggtttttccggggcctttattcccgtctccgaggatgaaggcatggtaacgcggtga

SEQ ID NO: 30634 - protein, 339 aa, Unknown
  Obtained from environmental sample
  DOMAIN (1)...(339): Uncharacterized ACR (DUF711)
  misc_feature (1)..(339): Xaa is any amino acid
MMAENRGLFLRYKLDIRAITLGVSLLDCVSSSGDECRRKIRDKLMRIAGPLVKTGKDIENEYGIPIINKRIAITPVALIASSCDENDFTPFAQTLDKAAVDLGVDFVGGFSALVQKGLSSGDERLITSLPSALSQTERVCASVNVAATKNGINMDAVRVMGGVIKKIAEKTATRDGIGCAKLVVFCNAPEDNPFMAGAFHGVGEGESCLNVGVSGPGVVKAALENLRGASFDELADAIKKTAFKITRMGQLVGMEAAARLGVPFGILDLSLAPTPEVGDSVARILEEMGLETAGTHGTTAALAMLTDMIKKGGIMASTHVGGFSGAFIPVSEDEGMVTR

SEQ ID NO: 30635 - DNA, 357 bp, Unknown
  Obtained from environmental sample
  misc_feature (1)..(357): n is a, c, g, or t
gtggacgccattatgccgcctttctttatcatgtcggttaacatggcaagggccgccgtagtgccgtgggttcccgcggtttcaagtcccatctcctcaaggatacgcgcgaccgaatccccaacctcaggggtgggcgcaagggaaagatccaatatgccaaaaggtacgcccagccgcgccgcggcttccattccaacaagctgtcccattcgggtaattttgaatgcggttttttttatcgcgtcggcaagttcgtcaaagctggctcctctgaggttttccaacgcggccttaaccacgccggggcctgacaccccgacatttaaacagctttctccttcgccgacgccgtga

SEQ ID NO: 30636 - protein, 118 aa, Unknown
  Obtained from environmental sample
  misc_feature (1)..(118): Xaa is any amino acid
MDAIMPPFFIMSVNMARAAVVPWVPAVSSPISSRIRATESPTSGVGARERSNMPKGTPSRAAASIPTSCPIRVILNAVFFIASASSSKLAPLRFSNAALTTPGPDTPTFKQLSPSPTP

SEQ ID NO: 30637 - DNA, 903 bp, Unknown
  Obtained from environmental sample
  misc_feature (1)..(903): n is a, c, g, or t
atgaatttcaggcgtttgaaggaggattacatggacacgctggataagattaagaaggcgataaaacacgccatgaacagcgagttttacaggaaatattacgcgggtattaacgtcgaggatataaaatccatgaaagatttccagaaacttccgtttacggacaaggaagatctaagggaagcgtatccgctgggccttttggcggtttccgatgaaaaaatagtccgtgttcactcgtcgtcaggcacgacgggcgctcccgtaattatcccctatacgcaaaaagacgtgcacgactgggcggttatgtttaaacgctgttatgaaaccgcgggaattaccaacaaggatcgtattcacataacgccgggatacgggctttggacggcgggtatcggctttcaggcgggcgcggaactgcttggagccatggcgattcccatggggcccggcaacacggacaaacagatcaaaatgatgattgatatgcaatcaacggttatttgcgccacgtcttcctacgcgcttttactggctgaagaaattgaaaaacgcggcgtccgtgataaaattcacctgaaaaaaggcgttattggctccgagcgctggggcgaaaaaatgcgcaagcgcatcgcgggagagcttggcgttgagttatacgacatctacggcttgacgganatctacggccctggaattggaattaactgccaaaaacaggatgccatgcacatgtggacggactttttttattacgagattatcgatccaaaaacaggcgaaattttacccgaaggcaaaacaggcgaaattgtcataacgacgctgtgcaaggaaggagcgcctctcatccgctacaggacgcatgacctcacaaaagcggttttccggcaaatgtga

SEQ ID NO: 30638 - protein, 300 aa, Unknown
  Obtained from environmental sample
  misc_feature (1)..(300): Xaa is any amino acid
MNFRRLKEDYMDTLDKIKKAIKHAMNSEFYRKYYAGINVEDIKSMKDFQKLPFTDKEDLREAYPLGLLAVSDEKIVRVHSSSGTTGAPVIIPYTQKDVHDWAVMFKRCYETAGITNKDRIHITPGYGLWTAGIGFQAGAELLGAMAIPMGPGNTDKQIKMMIDMQSTVICATSSYALLLAEEIEKRGVRDKIHLKKGVIGSERWGEKMRKRIAGELGVELYDIYGLTXIYGPGIGINCQKQDAMHMWTDFFYYEIIDPKTGEILPEGKTGEIVITTLCKEGAPLIRYRTHDLTKAVFRQM

SEQ ID NO: 30639 - DNA, 384 bp, Unknown
  Obtained from environmental sample
  misc_feature (1)..(384): n is a, c, g, or t
atgacctcacaaaagcggttttccggcaaatgtgaatgcgggcttgagtatccgagaatcggcacaatcatcgggcgaagcgacgatatggtcaaggttcgcggcgcaattatttatccaagccgtgtggacgagcttttagcaggcattgaaggcgtcagcagcgagtatcaaatcatgattgatcacatgaacggcaaagacattctgacccttttctttgaaacacagcttgcgggcactgcctcaatcaaccttgaaaaaaccgttgagcatgagtttaaggaaaggataggcattactccgaaagcaaaagccgtcggcatgggcgagcttccccgcagcgagaaaaagtcaacacgtgtttttgataacaggtattaa

SEQ ID NO: 30640 - protein, 127 aa, Unknown
  Obtained from environmental sample
  misc_feature (1)..(127): Xaa is any amino acid
MTSQKRFSGKCECGLEYPRIGTIIGRSDDMVKVRGAIIYPSRVDELLAGIEGVSSEYQIMIDHMNGKDILTLFFETQLAGTASINLEKTVEHEFKERIGITPKAKAVGMGELPRSEKKSTRVFDNRY

SEQ ID NO: 30641 - DNA, 762 bp, Unknown
  Obtained from environmental sample
  misc_feature (1)..(762): n is a, c, g, or t
atgttaaaactttataaccaggcgatagaagagtataaaaaatgcatagaggcgaataataaagatacgggcgaggcttaccacaatcttggtataatttattacacggggccgaaatcactgcgggactattcggaagcgttagataatttgttaagcgcggcggagatttacgaaaaagataaaaaaaagaatgcggagttattagctaattgttacaatcgaatcggcacgctgttgtaccgtatgggagattattacgcgtcttttgattatttacaaaaaacatccgagctttccgtccaattgtcgggagaagaagcgcaaatatactggctgggattaggcgtggaacaggatttgtctaaggccatggagatttacagaaaagcggcattaaacggacgcgacttgtgggcgaatatctatgctttggatttacagataaaggagtatcaaaaggggaatttcggcaactacggaatgtacttatatatggattatttaaactccaggactatgggcgaaccgaaagacacatggatgtcaatcttaaaacaatccgccgacttaaattggccgcccgcgcaggttgattactgggttttctgcagagacagtaatgaattcaataagggcatgccttatctgcaaaaagcgttagaagctaactttgttccggcgtattttcacatggggtggatttatcatgccggtcttaacaatacaagaattaactatagtgactcgtgccgaatttga

SEQ ID NO: 30642 - protein, 253 aa, Unknown
  Obtained from environmental sample
  misc_feature (1)..(253): Xaa is any amino acid
MLKLYNQAIEEYKKCIEANNKDTGEAYHNLGIIYYTGPKSLRDYSEALDNLLSAAEIYEKDKKKNAELLANCYNRIGTLLYRMGDYYASFDYLQKTSELSVQLSGEEAQIYWLGLGVEQDLSKAMEIYRKAALNGRDLWANIYALDLQIKEYQKGNFGNYGMYLYMDYLNSRTMGEPKDTWMSILKQSADLNWPPAQVDYWVFCRDSNEFNKGMPYLQKALEANFVPAYFHMGWIYHAGLNNTRINYSDSCRI

SEQ ID NO: 30643 - DNA, 825 bp, Unknown
  Obtained from environmental sample
  misc_feature (1)..(825): n is a, c, g, or t
ttgctggttgtgttttgcgctggttntcggtgccgccccaatatggggctcgcgtcgctttnggttcctgtgtttttatggaaatatagagcgtggaaatcggttgcgtttgccgcgctaccgtacgtaattgtcgcgattccgttatgtttgtataactatgtccgattcgaatcgatttttgagtttgggtcaagttatcagttgacagtagttgacataaaagcagttattcaccagaatgtgctcagtaagatttttaggataattttatcttcagcgaattatcttttttgcccgatacaactttcgatgaattttcctttcgtcggaatattgcaaactaatggtgtgcaaattactcaaggcgttttgtgtaattttgttaatcctataggaataatcaactttccaatagtcttttgtctatcttacctgttcaaaaataccgttaagaaagatacatcaaaaacaacttatccattattgtggtcttctttaattgtagccatcgcaataataattttaaattccctcatattgggatgtggtggaggttatatggtggactttgctatatttatcgttctaccatcgtgcttttgcgcctattattggtgccaagacaccaagagttgtgatttactgaaagcgtctcatagttcaaacacgtttgtcggcttcacggttcgcctgagcttaatctatgccctaataaccgcaagcgtttttatcgggctgtttttaacggcggcatctacaaattcatattccaatcccaccttataccgttatctcgaaacggcgctaggatgtctaaaatga

SEQ ID NO: 30644 - protein, 274 aa, Unknown
  Obtained from environmental sample
  misc_feature (1)..(274): Xaa is any amino acid
MLVVFCAGXRCRPNMGLASLXVPVFLWKYRAWKSVAFAALPYVIVAIPLCLYNYVRFESIFEFGSSYQLTVVDIKAVIHQNVLSKIFRIILSSANYLFCPIQLSMNFPFVGILQTNGVQITQGVLCNFVNPIGIINFPIVFCLSYLFKNTVKKDTSKTTYPLLWSSLIVAIAIIILNSLILGCGGGYMVDFAIFIVLPSCFCAYYWCQDTKSCDLLKASHSSNTFVGFTVRLSLIYALITASVFIGLFLTAASTNSYSNPTLYRYLETALGCLK

SEQ ID NO: 30645 - DNA, 1434 bp, Unknown
  Obtained from environmental sample
  misc_feature (1)..(1434): n is a, c, g, or t
ttgccgaaagcggtaacccttgcggcaaaactcgcgcagcgttatataacaggaagatttatgcctgataaggcgattgatattcttgatgaagccggagcgatgcgcaagcttgaaacgcgcgagcagccgcctgaaattgcaagtcttgagaccgagattggaaagttatgtgaagaaaaaaacgcgtatgtgagttctcaggattatgaacatgccgctgaattgcgcgataaagtgcgcgctttaagaataagacttgaagaagctcatgatgcatgggagcgtgcgtcaagaaatgactggcctcaggtgactgaagatgatgtacgcacagttgttaccgaagctacgggaatacctgtgattcacctcgaagaaaaggaatcaaggcgtttattgcaaattgaggaagagctgcataaaaccgtaatagggcaggatgaagccataaagcgtatagcttcggcaatccgccgttcaagagcgggcgtttcttctccgcgccgccctatgggttcgtttatttttcttggacctacaggagtagggaaaacacttcttgcaaggcagctttcaaagtatctttttgcgggcgaagacgctcttgtaagaatagatatgtcagattttatggaaaaacacaatgcttcgcgcctcataggagcgcctccgggttatattggctatgaagaaggagggatgcttactgaaaaaataaggcgcaatccctaccgtgttattctgtttgatgaaattgaaaaagcccaccgcgatgtttttaacctgttcctgcaggtaatggaagagggcgagttacgcgacaatntgggccacacggtcagtttccgcaacacggttatcataatgaccagcaacgctggcgtgcgggaaatttcccgcgactcccggctgggcttcgcctccggttccggccagatgagcatggaagaaattgaatcgcaggcaatgtcggaactcaagcggctgttcaatcccgaatttctcaaccgcgttgacgacgtggttgttttccatcccctcagcatggagcagatagaggcgatttttgacatcgaactgcgtgagctttccgcccgtcttgcggaacaaaattaccgcatacacattctgccctccgctcgccgcttcctcattgaaaagggctgggatcccaaattcggcggacggcccttgcgccgcaccattcagaaagaactggaagacccgctggcgcagatgttactggtccgcaattggcccgccggcacagtctttaacgccggcatgagccggagcagccgcggcagtcatgagggaaagatcaaactcatcggcaaagcgccgtttatcgaaagcgaaaacgatgaagccctggcctttgaagaaacagttgacgatgaggaattggtcatgcgtgataatggcgtttag

SEQ ID NO: 30646 - protein, 477 aa, Unknown
  Obtained from environmental sample
  DOMAIN (126)...(361): Torsin
  misc_feature (1)..(477): Xaa is any amino acid
MPKAVTLAAKLAQRYITGRFMPDKAIDILDEAGAMRKLETREQPPEIASLETEIGKLCEEKNAYVSSQDYEHAAELRDKVRALRIRLEEAHDAWERASRNDWPQVTEDDVRTVVTEATGIPVIHLEEKESRRLLQIEEELHKTVIGQDEAIKRIASAIRRSRAGVSSPRRPMGSFIFLGPTGVGKTLLARQLSKYLFAGEDALVRIDMSDFMEKHNASRLIGAPPGYIGYEEGGMLTEKIRRNPYRVILFDEIEKAHRDVFNLFLQVMEEGELRDNXGHTVSFRNTVIIMTSNAGVREISRDSRLGFASGSGQMSMEEIESQAMSELKRLFNPEFLNRVDDVVVFHPLSMEQIEAIFDIELRELSARLAEQNYRIHILPSARRFLIEKGWDPKFGGRPLRRTIQKELEDPLAQMLLVRNWPAGTVFNAGMSRSSRGSHEGKIKLIGKAPFIESENDEALAFEETVDDEELVMRDNGV

SEQ ID NO: 30647 - DNA, 885 bp, Unknown
  Obtained from environmental sample
  misc_feature (1)..(885): n is a, c, g, or t
ttgataactgtcgcatcccccttcatgccttttaccacggacgccatctggcaaaacctgcgcttacaaactgatcccgaatcggtacatttaacggactatccaacccccgatgaaaaacgccgcgacagcgcgcttgaattccgcatggcggcggtcatgtccgccgtttcaatcggacgctctctgcgctcccagtacaacatcaaagcgcggcaaccgcttcgcaaggcggaacttgttacgctcaatgaagacgaaaaaaaagcgctactcggcatggcggacataatccgcgaagaactgaacgtaaaagaacttatcttctcggataaagaggaagatttagtagagtacgaagtaaaagccaacttccgcgtgttgggaaaagaacttggaaaagacatgaaatccgccgccgctaaaatagagacgttaagccacgtggagattcaaaaaattgtacaaggagcgtccctttccataaatgttccctgcgaaggcggcgaaagggcgcttgtactgacggcggacaaactcgacatccgcagaatcgaaaaagcgaacctacgcgtccttaacgaaggcaccctcaccgtcggtcttgacacggaaattacccgcgaactttcaatggaaggcgacatccgcgatttaatccgaggtattcaaaacgcgcgaaaagaaatgggcctgtccgttaccgaccgtatagaactttgtttacatggcgcggactccctgaaagaagcatgggacacttatagtgaaaccgtcgcctctgaaacccttgccaccaaaacccaatggtcaaaaacggacggacaaatccccatcgaaagcggagacgagacgtggcaagtgaagatagtggttagtggttag

SEQ ID NO: 30648 - protein, 294 aa, Unknown
  Obtained from environmental sample
  DOMAIN (1)...(80): Anticodon-binding domain
  misc_feature (1)..(294): Xaa is any amino acid
MITVASPFMPFTTDAIWQNLRLQTDPESVHLTDYPTPDEKRRDSALEFRMAAVMSAVSIGRSLRSQYNIKARQPLRKAELVTLNEDEKKALLGMADIIREELNVKELIFSDKEEDLVEYEVKANFRVLGKELGKDMKSAAAKIETLSHVEIQKIVQGASLSINVPCEGGERALVLTADKLDIRRIEKANLRVLNEGTLTVGLDTEITRELSMEGDIRDLIRGIQNARKEMGLSVTDRIELCLHGADSLKEAWDTYSETVASETLATKTQWSKTDGQIPIESGDETWQVKIVVSG

SEQ ID NO: 30649 - DNA, 1275 bp, Unknown
  Obtained from environmental sample
  misc_feature (1)..(1275): n is a, c, g, or t
atgaatgtttttgcagtatgtgagaaaccacaggtaattcaatttaaaccgcaggaggcgtctgtttctctaaaggttgtttcagccaatgaaaacaaggagaaaattaatgcgcgtaacgatgttccggccattatcaaggtaatatccttgggtggcggaggcggaaacgcattaaaccgcatgattgaagctaatataccgggagtggaatttattgcggctaatacggatattcaggatctgtttaaaaagagcagggcaaaagttaaggtgcagattggtacggaattaacaggaggacgcggcgcaggaggaaatccggaaaaaggtgaaaaagcggcgatagaagatcaggttgcgatagccgaagcgttaaggggcgcggatatggtctttattaccgcgggaatgggcggtggaacggggacgggatcggctcacgttattgccagaatcgcgaagagtcagggagctcttacggtagcgattgttaccactccgtttgaatacgaaggccgctacaagaggaaacttgcgctggaaggaattgagaaactgtcccatgaagttgattcgattattgttattccaaatcagcatctttttaaagttatagataataatacttcatggaacgacgcgtatgtattagccgacaaaattctgtgtttgggagtacatggaatagcggacctgattacacagattgggtttcaaaacgttgactttgccgacgtagaaacaattatgaaaggaaaggggcaggcccttttggggataggcgttggaaaaggagaaaatcgcgcgttggaagcggtctcaaaagccatagataatcctctccttgaagataccaacatagacggagcgacaggcgttctggtaaatataaaggcttccggcgagcttaaaatggtagaaataaataatatactcaaggacattaaagacaagtgcgacccggacgccctcattatacacggccttcatattgatccctcgctggatgacagtattcagctaacggtaattgctaccggctttgataatacccgccgcaatgaagtaaaaccgccggtcggcaaaaaagcggtagacacagaattatttgatttcacaaaatatgtgcagaagcatgagcaaacaaaacgaaaagattatttgccttatttacccgcaaaggattatcacgacgatttggatgttccggctgtaataagaaatcataatttcaatataaacgaagaaaaatcagaaatgactcggccataa

SEQ ID NO: 30650 - protein, 424 aa, Unknown
  Obtained from environmental sample
  DOMAIN (241)...(366): Tubulin/FtsZ family, C-terminal domain
  misc_feature (1)..(424): Xaa is any amino acid
MNVFAVCEKPQVIQFKPQEASVSLKVVSANENKEKINARNDVPAIIKVISLGGGGGNALNRMIEANIPGVEFIAANTDIQDLFKKSRAKVKVQIGTELTGGRGAGGNPEKGEKAAIEDQVAIAEALRGADMVFITAGMGGGTGTGSAHVIARIAKSQGALTVAIVTTPFEYEGRYKRKLALEGIEKLSHEVDSIIVIPNQHLFKVIDNNTSWNDAYVLADKILCLGVHGIADLITQIGFQNVDFADVETIMKGKGQALLGIGVGKGENRALEAVSKAIDNPLLEDTNIDGATGVLVNIKASGELKMVEINNILKDIKDKCDPDALIIHGLHIDPSLDDSIQLTVIATGFDNTRRNEVKPPVGKKAVDTELFDFTKYVQKHEQTKRKDYLPYLPAKDYHDDLDVPAVIRNHNFNINEEKSEMTRP

SEQ ID NO: 30651 - DNA, 789 bp, Unknown
  Obtained from environmental sample
  misc_feature (1)..(789): n is a, c, g, or t
atgattgacagagaacggctgcttgcgattacggaattaaatcttgccggaaaaataaatcaaatgggaaacggcgagctaaatgaatatgtccggttattgatttcctttacagaaaactttccggaacaggaagaaaaaataaaggccgcgcttgaagaaaaagattatgcttctttggcaaagagccttttgacagttcgggatataatggaagaagtccacgctgacgaattgacgcaggattgcataaaacatattaacaggcttggcagcataaagcatgagaaacttgaagcttacatagcttatttattaaaaagcctgtctatattatccattgatattcagatgcacattcttcaaaaacaaaacgctgaacaggaccagccttcggagatgaaaccacttaagaatgacgaagtttcacaaaaggaaaaaaccattttggcggttgacgatacggctttctttctgacagtgctgaaaaaggcattacgggatatcaactgcagactgaactgtgaaacatccggctataacgcgctgaggtttctaacaaggcataacccggacctttttcttctggacatagatatgccggaaatggacggatacgaacttgcggccaaaatcagggaaagcgggcagaaagcgcctatagttttcctgacaggcaactcaaagagcgaatacgtgttaaaggcgatagaagccggggcggctgattttattgttaaacccattaataaaaaagatgtactttccaaaatcagcaagtacatctag

SEQ ID NO: 30652 - protein, 262 aa, Unknown
  Obtained from environmental sample
  DOMAIN (147)...(259): Response regulator receiver domain
  misc_feature (1)..(262): Xaa is any amino acid
MIDRERLLAITELNLAGKINQMGNGELNEYVRLLISFTENFPEQEEKIKAALEEKDYASLAKSLLTVRDIMEEVHADELTQDCIKHINRLGSIKHEKLEAYIAYLLKSLSILSIDIQMHILQKQNAEQDQPSEMKPLKNDEVSQKEKTILAVDDTAFFLTVLKKALRDINCRLNCETSGYNALRFLTRHNPDLFLLDIDMPEMDGYELAAKIRESGQKAPIVFLTGNSKSEYVLKAIEAGAADFIVKPINKKDVLSKISKYI

SEQ ID NO: 30653 - DNA, 870 bp, Unknown
  Obtained from environmental sample
  misc_feature (1)..(870): n is a, c, g, or t
ttgcccccgggcggacaggccctttcaatcgacatactggaaaattaccccggcaatgtggaacgaaaggatgccgaaggcaatgtgctcgccgggctgcggacaggttatgaattggcccaggacatgtacagtcaagctgaagcctttggcgcttccttccttgacgatgaggtcagcgaattaaaaaaagagggcgatttgttcattgccgttcttgcgggcggcgggacgagaaaagccccggcggtaattatcgccacaggggcaaagcatcgcctcctgggtatccccggcgaaaaggaatttacagggcggggggtttcctattgcgcgacctgcgacggggctttctttaaaggaaaaaaaattatcgccgcaggaggaggggacgccgcctgtgacggggcgcaatacctgtcacgtttaagcgggcagttgatccttgtacaccgtcgcgaccgtttccgcgcgcagcaggctcttgcggatcgggttctgcgaaacaaaaatattgaggtcagattcaacactgttattaaggagataaagggcgataaaaaagtcagttcggcgattcttgagtgtgagagcaaaacttatgaagaaacagccgatgcggtttttatttttgccggaacgagccctcagtcatggcttgtaagcggagagtccgggggcttgaaggtggaactggatggaggcggctgcattatcagcgatcaaaaaatggccgcgtccgttccgggtttgtttgtcgcaggcgatgtccgctccggatcattcaggcaggtaattgtcgcggcaggggagggcgcggtcgccgcacacaatgcagccgcatatattgatgactcgtgccgattctga

SEQ ID NO: 30654 - protein, 289 aa, Unknown
  Obtained from environmental sample
  DOMAIN (3)...(262): Pyridine nucleotide-disulphide oxidoreductase
  misc_feature (1)..(289): Xaa is any amino acid
MPPGGQALSIDILENYPGNVERKDAEGNVLAGLRTGYELAQDMYSQAEAFGASFLDDEVSELKKEGDLFIAVLAGGGTRKAPAVIIATGAKHRLLGIPGEKEFTGRGVSYCATCDGAFFKGKKIIAAGGGDAACDGAQYLSRLSGQLILVHRRDRFRAQQALADRVLRNKNIEVRFNTVIKEIKGDKKVSSAILECESKTYEETADAVFIFAGTSPQSWLVSGESGGLKVELDGGGCIISDQKMAASVPGLFVAGDVRSGSFRQVIVAAGEGAVAAHNAAAYIDDSCRF

SEQ ID NO: 30655 - DNA, 627 bp, Unknown
  Obtained from environmental sample
  misc_feature (1)..(627): n is a, c, g, or t
atgggagattttatgcggaggattaatcgggcgatattgacggctgcaacgtttattgccgtggcggtcgggtcggcggcggcgcagcggcaagggacgttcgccgacaagagagacaagaagacctacaatacggtaaagatcggcaaacagacttggatggccgaaaatctgcgttacccggctaaaggcccggggtcttggtgcatcggcgacacgcagtccgtctgcggcgagaagtacggcatgctatacaattggagtgttgcgaaaacgatctgtccctcaggatggaagttgcctgatacggcggattggaacaagttgataacggcggcgggcggacaggagaccgccggtaagaagttgaaatcaaagcgcggttggaatgactataacggcagaagcggcaacgggacggatgatttcggattttcggccttgcccggcggcaactacctcggtagccgtttctacggcgtcagcaactacggatactggtggacggctacggagagcaatagtggtaacgcctattaccggaacgtgtactgcagttacgccaacgtggacgagtacggcagcagcaagagtagcgggttttctgttcgttgtgttcaggaatag

SEQ ID NO: 30656 - protein, 208 aa, Unknown
  Obtained from environmental sample
  SIGNAL (1)...(28)
  misc_feature (1)..(208): Xaa is any amino acid
MGDFMRRINRAILTAATFIAVAVGSAAAQRQGTFADKRDKKTYNTVKIGKQTWMAENLRYPAKGPGSWCIGDTQSVCGEKYGMLYNWSVAKTICPSGWKLPDTADWNKLITAAGGQETAGKKLKSKRGWNDYNGRSGNGTDDFGFSALPGGNYLGSRFYGVSNYGYWWTATESNSGNAYYRNVYCSYANVDEYGSSKSSGFSVRCVQE

SEQ ID NO: 30657 - DNA, 825 bp, Unknown
  Obtained from environmental sample
  misc_feature (1)..(825): n is a, c, g, or t
atggatgccatagaaccgttttattattggggcctgaaagacttccacccgtcgttccttgccggctatactgctgaaaaatatgatgtagatgtcgaaaactgtatggggcgggcggaaacgagaatcaaaaaaacaattgaggatgagtttaagaattctgtcctaggttataagacgacgacgctcaaacgttcttccgttaagctaaaaaacggcacggtcagttacgctttattccccgtgtggattctcaataccaaacacaatgataaacactatctccttatgatgaacggtcaaacaggcaatctggtaggccgtctgccggttgacgagggcaaagcgtggaaatatagggcgatcctcacaggaattatcggcggaatccttgccgtgcttatttatttgacgataatcttcgggacattgcttatagacataaaatcattgggcattgtagcgtcgtcgccaaccctcatatctataattgcgctcgcctctatgaccgccgccgcgataatcggctttgttatggtatctaagtggaaaaaagagatgaacgccgtcggccaggaagagaacgccgtcgaatatgtggttccgggaagccttaaatatacatggatgaacgatgcggatcttaatacgccgggcgcgtacgcgtgggcgggccttgttcgcgcctttcgcaataaatctgacgatgtcgattcgggaacggaatttcggcgtaaaatcccgggcgacgcagattcggaagcggaatttatttgcgagaaccccggcaatgtagactcggaagcggaatttatttgtaggtga

SEQ ID NO: 30658 - protein, 274 aa, Unknown
  Obtained from environmental sample
  misc_feature (1)..(274): Xaa is any amino acid
MDAIEPFYYWGLKDFHPSFLAGYTAEKYDVDVENCMGRAETRIKKTIEDEFKNSVLGYKTTTLKRSSVKLKNGTVSYALFPVWILNTKHNDKHYLLMMNGQTGNLVGRLPVDEGKAWKYRAILTGIIGGILAVLIYLTIIFGTLLIDIKSLGIVASSPTLISIIALASMTAAAIIGFVMVSKWKKEMNAVGQEENAVEYVVPGSLKYTWMNDADLNTPGAYAWAGLVRAFRNKSDDVDSGTEFRRKIPGDADSEAEFICENPGNVDSEAEFICR

SEQ ID NO: 30659 - DNA, 1011 bp, Unknown
  Obtained from environmental sample
  misc_feature (1)..(1011): n is a, c, g, or t
ttgacgcgtatatcaaactggttttccgaaaacgatctgcgtctgcgcgtaaatttacagtgtactatcgaaaatgatgtggtatttaatgaatttatcaggcgtggctggatcacgggatcttcgatgggccatccttatttgacaatgggggcgtcaaaacttttcgccgacggctcgcttggctcgcgcaccgcgtatttgcgaaagccatatttagacgcgccgtctacgcgcggttttcaaattcattcgcaggaagagatggacgcgctggttctcaaaaaccataaaaatggctttcaggtaatcgtgcacgctattggagacgccgctattgaagaaacgttgaacgcttttgaaaaagctgtcggcgggcaaacaaacgagctgcgtcacggtttagtacattgccagattaccgatctgccgcttttgcggcgcatggcgaataacggtaccctcgcgtttatgcagccaatctttcttacccacgatctttatatgcttgagagcagggtaggtaaggaacttgcgtccacttcttacgcccatgcgacaatgaacaagctaggcattaatgcggcttacggaacggacagcccggtggaatccatgagcccgctggaatgtatcgactgcgcggtaaaccgccgcgatgtaacaaacggctatccaaaagaaggcttctacccaggcgaatgtgtagatgtgtataccgcggcagacgcttacaccataggcagcgcatacgccgaatttaccgaagcttgcaaaggcagaatcaagccgggctatcttgccgacatgacgctgtggatcgcgatatttttattattccgcgaaaagaaattcgcaaaacgcaggtactatggactatggtgggcggcgttatggcgtataggaagccccctctgtttaccacaaaaagcccccctgtctgaggggaaggctgtggcgacgggaatgaattggaatatacgggatggacagcgcatagttagggagtag

SEQ ID NO: 30660 - protein, 336 aa, Unknown
  Obtained from environmental sample
  DOMAIN (4)...(272): Amidohydrolase family
  misc_feature (1)..(336): Xaa is any amino acid
MTRISNWFSENDLRLRVNLQCTIENDVVFNEFIRRGWITGSSMGHPYLTMGASKLFADGSLGSRTAYLRKPYLDAPSTRGFQIHSQEEMDALVLKNHKNGFQVIVHAIGDAAIEETLNAFEKAVGGQTNELRHGLVHCQITDLPLLRRMANNGTLAFMQPIFLTHDLYMLESRVGKELASTSYAHATMNKLGINAAYGTDSPVESMSPLECIDCAVNRRDVTNGYPKEGFYPGECVDVYTAADAYTIGSAYAEFTEACKGRIKPGYLADMTLWIAIFLLFREKKFAKRRYYGLWWAALWRIGSPLCLPQKAPLSEGKAVATGMNWNIRDGQRIVRE

SEQ ID NO: 30661 - DNA, 306 bp, Unknown
  Obtained from environmental sample
  misc_feature (1)..(306): n is a, c, g, or t
atgattcattttagtttaaaagaatataccgctcctgatttcttaagtccggaactggcggacgcccctgacgcgacgcttgttccatcgccaatggacggtgtcgccccagaggactatcacgctacaaccgtattccccgagtatttcaaggtgggcgggaaatggctattggcggaggaaagccgcatggattgtgttgccgtttacgagggcggcaggattaatgtgcgggaatttcgccgcttaaaaaaaggagagctcgtttttatcggccgcagcgaatcaggcaactcggccatctga

SEQ ID NO: 30662 - protein, 101 aa, Unknown
  Obtained from environmental sample
  misc_feature (1)..(101): Xaa is any amino acid
MIHFSLKEYTAPDFLSPELADAPDATLVPSPMDGVAPEDYHATTVFPEYFKVGGKWLLAEESRMDCVAVYEGGRINVREFRRLKKGELVFIGRSESGNSAI

SEQ ID NO: 30663 - DNA, 777 bp, Unknown
  Obtained from environmental sample
  misc_feature (1)..(777): n is a, c, g, or t
ttgggatttttccgtatatgggttgtgccagaagtggagcataccggtattttagggcattttgttccctctgttccaatctacatggatgaaattttgcaagcgggaattccaagggaaaccgtgcattatataaccacgccgaattttggtgaagagcagcttgggcactggtttagttttgatacggaaagtgttaaacaaaaatattttgaacatctgcgagatgaccgctatcttttacgtcctgaatatcgttccgaacgtgcaataatctctttgcaggaagagcaacacattaaggacgctctgctgaatgtttactgggatagaatatttgtgccgagcagcaccgaagaaactctttggccctactggtactggtataatgcccctgtgctgcttacattgccagaacacgagagaaatgccatcagagacataataaaaagcaatgaaataaaacaagaggatttgtggggaaaaaatggtcataggcttttgggcgttcttgccaaagaagccgatatgcttgtgtgcgcagaggatttgggtgctgtcccgaactgtgttccgaatgttttgcaggatttagggattttggctcttagagtggagcggtggagccgcaattggagccaaccgggaagcccttacattccgtattcggagtatcctcgcctttctgtttgcacaaccagcaaccacgattcttccacgcttttggggctttggaacgagcacgattttgacagggattttattggaagcatatag

SEQ ID NO: 30664 - protein, 258 aa, Unknown
  Obtained from environmental sample
  misc_feature (1)..(258): Xaa is any amino acid
MGFFRIWVVPEVEHTGILGHFVPSVPIYMDEILQAGIPRETVHYITTPNFGEEQLGHWFSFDTESVKQKYFEHLRDDRYLLRPEYRSERAIISLQEEQHIKDALLNVYWDRIFVPSSTEETLWPYWYWYNAPVLLTLPEHERNAIRDIIKSNEIKQEDLWGKNGHRLLGVLAKEADMLVCAEDLGAVPNCVPNVLQDLGILALRVERWSRNWSQPGSPYIPYSEYPRLSVCTTSNHDSSTLLGLWNEHDFDRDFIGSI

SEQ ID NO: 30665 - DNA, 375 bp, Unknown
  Obtained from environmental sample
  misc_feature (1)..(375): n is a, c, g, or t
atgggtattcaaatcgcgtctctatataccggaggctctatccctatgcctgcccagcaggaaacacaaagggaaaagccgcctcctctcccaattgaacagaaagttgccacggaaaatgcccaggcaactcttcccggtaacaggcaaaacgccccaaatctggagaaaaccacagcggatcttcagcacatcagcctggtatttaactcaaggctgaaattcgtaattgatcaggaatccaaggaaattatcattaaagttattgataatgaaaccgataaagtgatcaaggtgcttccgcccgaagaacttcagaggcttcatagcagaattagggaaacaataggggttttgtttgacaggatggtttaa

SEQ ID NO: 30666 - protein, 124 aa, Unknown
  Obtained from environmental sample
  SIGNAL (1)...(20)
  DOMAIN (16)...(123): FlaG protein
  misc_feature (1)..(124): Xaa is any amino acid
MGIQIASLYTGGSIPMPAQQETQREKPPPLPIEQKVATENAQATLPGNRQNAPNLEKTTADLQHISLVFNSRLKFVIDQESKEIIIKVIDNETDKVIKVLPPEELQRLHSRIRETIGVLFDRMV

SEQ ID NO: 30667 - DNA, 666 bp, Unknown
  Obtained from environmental sample
  misc_feature (1)..(666): n is a, c, g, or t
atgattattaatcacaacatgagcgccatttacgccgatcgtcagcttagcgtaacccagttggatttgaccaaggacatggagaaacttagctccggtctaaagatcaatcgcgccggggatgatgcttccgggcttgcagtttccgaaaaaatgaggagccaagtcagggggttacatcaggccgaacgcaatatcctgaacggtgtgtcctttattcaggctactgagggttatcttcagcagaccacggatatcttgcaccgtcttagggaattagcggtacagtcagccaacggcatttattccgatgaggatcgtatgcagatccaagttgaagtatcgcagatggttgatgaagtgaatcgtatagcaagtcatgcgcaattcaacggtatgaatatgcttacaggcgcttttgcgcaagattctgtttccggcagagttatgcagcttcatattggtgccaacatggatcaaaatacaagaatctatgtaggcaatatgtcagccggcgcgctcggtttggtaaactcacagggggacgaagggaaactttccattgctgacccccaggaagctaacaggacaattggtactgtagacgcggcattaaggccgtatctaaacaaagggcgatcttggcgcttatcagaaccgttttga

SEQ ID NO: 30668 - protein, 221 aa, Unknown
  Obtained from environmental sample
  DOMAIN (27)...(158): Bacterial flagellin N-terminus
  misc_feature (1)..(221): Xaa is any amino acid
MIINHNMSAIYADRQLSVTQLDLTKDMEKLSSGLKINRAGDDASGLAVSEKMRSQVRGLHQAERNILNGVSFIQATEGYLQQTTDILHRLRELAVQSANGIYSDEDRMQIQVEVSQMVDEVNRIASHAQFNGMNMLTGAFAQDSVSGRVMQLHIGANMDQNTRIYVGNMSAGALGLVNSQGDEGKLSIADPQEANRTIGTVDAALRPYLNKGRSWRLSEPF

SEQ ID NO: 30669 - DNA, 858 bp, Unknown
  Obtained from environmental sample
  misc_feature (1)..(858): n is a, c, g, or t
atgctgcgaaaagtagtcacggttgtcaatttccgcgtagatgaaaaacagcaaaaactaaggataaacattgacaataaaatccctcaaacactgatcgccgatgaccagcggctgtctcaagtcgttgccaatcttttaagtaacgctgttaaattcacgcctgtagaaggctcaattaccgttaatgctttatttatgggagaagaaaaagatctttgtaccatacaggtttcagtaagcgatacgggaattggaataagcaaggaacagcaaaaacgcctgtttaattcttttcaacaagccgaaagcagcactacgcgcaaatacggaggtacgggccttggcctggctatttcaaaaagcatcgtagagatgatgaacggaaaaatttgggtcgagtccgaacctgaaaaaggctctgtttttaaatttactgttaagatgaaacgcggctccattgataaacaggggttattgtcttcagatgtgaattggaacaatatccgtattatggtagtagatgacgatcctgatattttaacatatttcagcgatgttacacagggatttggcgtaacctgcgaaactgcaataagcgggaaagacgcgcttgccctggtagaacagaaaggcggctgccatatttattttgtggattggaaaatgcccggtatggacggcatacaacttgcccgtgaacttaaaacgcgaacgcctaanaattctgtggtaataatgatttccgccgttgaatggagcgcggttgccgaagaagcaaaaaaagcgggtgttgtcaaattcctgtccaagccgttgtttccttctaccattgccgaaattatcatgaatgtttag

SEQ ID NO: 30670 - protein, 285 aa, Unknown
  Obtained from environmental sample
  DOMAIN (169)...(283): Response regulator receiver domain
  misc_feature (1)..(285): Xaa is any amino acid
MLRKVVTVVNFRVDEKQQKLRINIDNKIPQTLIADDQRLSQVVANLLSNAVKFTPVEGSITVNALFMGEEKDLCTIQVSVSDTGIGISKEQQKRLFNSFQQAESSTTRKYGGTGLGLAISKSIVEMMNGKIWVESEPEKGSVFKFTVKMKRGSIDKQGLLSSDVNWNNIRIMVVDDDPDILTYFSDVTQGFGVTCETAISGKDALALVEQKGGCHIYFVDWKMPGMDGIQLARELKTRTPXNSVVIMISAVEWSAVAEEAKKAGVVKFLSKPLFPSTIAEIIMNV

SEQ ID NO: 30671 - DNA, 984 bp, Unknown
  Obtained from environmental sample
  misc_feature (1)..(984): n is a, c, g, or t
ttgcttgttattggtgtaatcacgggagttataagcggatatgttataagaaaagtgcctgaaccgccgagagaaaaggacataaaaaagtttaatcttgtaaatttattcaaagatactcttgctcaggatgatttaaaacattttatttttattttgttccttgttgttcttgtgtcgggtgttacacgggcattcgtggttgtgtatgcccgtgaagtgttcgggcacaatgacggtctgctttcgctttactctgtttttggcagtcttggttatcttatggctggcataagcgtgaaatttcttgtagacagaatcggcgcaaagccgctttatcttgtttgcgtgattttaggtcttgtcagcattgtgcccgtaatctttttccctgccgccgctgtcgaaaatatggcaggcgctattctgttccttgccttcttatttttcatgttgaatttcggtttcttaggttcggaaggaatcgctcaaacgtattttttggcgctggttccgcaggaaaaaattcttgaccttggtattatttatttctttattttcggcgtcgccggcgctgtaggttcttttctttcaggtatctttcttgattttctggttatgctcggagtttctacctttgtttcatttaaggttcttttcattattatgtttgtccttgttttaattgccctcgctatgcagaaaaaaatgaaaccattaggttcgcttccgttaaagggcgctcttgaagtaattttttccatgagagaccttcgagcgataaatcttttggataagctgaataaggcggaagattcacagcaggagaaattcttctcggcgcattacatgacactccgtcaagtctgcgatganncggtcttctggataaggcgcgttcgccgaagcttgcgacacgccttgaagcgatcagagcgcttgagaaattgcaacgtctcacggaaaaagcggagcaggcgttga

SEQ ID NO: 30672 - protein, 327 aa, Unknown
  Obtained from environmental sample
  misc_feature (1)..(327): Xaa is any amino acid
MLVIGVITGVISGYVIRKVPEPPREKDIKKFNLVNLFKDTLAQDDLKHFIFILFLVVLVSGVTRAFVVVYAREVFGHNDGLLSLYSVFGSLGYLMAGISVKFLVDRIGAKPLYLVCVILGLVSIVPVIFFPAAAVENMAGAILFLAFLFFMLNFGFLGSEGIAQTYFLALVPQEKILDLGIIYFFIFGVAGAVGSFLSGIFLDFLVMLGVSTFVSFKVLFIIMFVLVLIALAMQKKMKPLGSLPLKGALEVIFSMRDLRAINLLDKLNKAEDSQQEKFFSAHYMTLRQVCDXXVFWIRRVRRSLRHALKRSERLRNCNVSRKKRSRR

SEQ ID NO: 30673 - DNA, 411 bp, Unknown
  Obtained from environmental sample
  misc_feature (1)..(411): n is a, c, g, or t
atggcagaaaatctcagctttaatgttggaaagtgctatgacaacaaggaggaaaactgcaaaaaatacggagggctttacgactggaataccgctgtgaaagcttgcccatccggctggcatttgcctagcaatagggaatgggatatattgatgtcatcagttggcggtgaaaaaatagcaggttatttattgaagtctacgaatggctggtacaaaaatggcaacgggacggatgtatatgacttttccgccttgcctagcggcggcgactacggcggctggtggagtgcctccgagtacgatagcgacaacgcctactactggcatatgcgctacaactatgatagcgcaggcagggaccgcaaccttaagagctacttgttctctgtccgttgtctgcaggattag

SEQ ID NO: 30674 - protein, 136 aa, Unknown
  Obtained from environmental sample
  misc_feature (1)..(136): Xaa is any amino acid
MAENLSFNVGKCYDNKEENCKKYGGLYDWNTAVKACPSGWHLPSNREWDILMSSVGGEKIAGYLLKSTNGWYKNGNGTDVYDFSALPSGGDYGGWWSASEYDSDNAYYWHMRYNYDSAGRDRNLKSYLFSVRCLQD

SEQ ID NO: 30675 - DNA, 672 bp, Unknown
  Obtained from environmental sample
  misc_feature (1)..(672): n is a, c, g, or t
ttggcgaccacggttgggggggcttttacgggggcgaatagggagcagattggctttgtgaggccgcaaagtgcgggaaccctgtttttagatgaagttgcggagctttcgccagagattcagaaaacccttttgcgcaccctgcaagaaaaaactgttacacccgttggcagccaaaaagaggtcagggttgatttcaggttgatttgcgctacccacagggatttgcgcattttgattgaaaaggggctttttaggcaggatttgtattttaggcttgccgctttgcccatccaaattccgcctctgagggagcgaagcgatttgagaagcatagcgcagtccctttggcgagggcaagagcctttggacgagcaccatttcagaaccttgcagagctatttatggcccggaaacataaggcagcttaaaaatgttttggagcgttattcccttttgaaaaaacacggctataagctggagtccattataaaagcggaatttgagcaatgcaaattcaacctgcgcgaaccgccaccgccaaaatacataccaaatatccgtgaaatcagcgaagaaatacggaattgcagcgggaacaaaagccacgccgcaaaaaaactaggtatcagcagggggagcttgtattataggatgagaaaactggcatga

SEQ ID NO: 30676 - protein, 223 aa, Unknown
  Obtained from environmental sample
  DOMAIN (187)...(222): Bacterial regulatory protein, Fis family
  misc_feature (1)..(223): Xaa is any amino acid
MATTVGGAFTGANREQIGFVRPQSAGTLFLDEVAELSPEIQKTLLRTLQEKTVTPVGSQKEVRVDFRLICATHRDLRILIEKGLFRQDLYFRLAALPIQIPPLRERSDLRSIAQSLWRGQEPLDEHHFRTLQSYLWPGNIRQLKNVLERYSLLKKHGYKLESIIKAEFEQCKFNLREPPPPKYIPNIREISEEIRNCSGNKSHAAKKLGISRGSLYYRMRKLA

SEQ ID NO: 30677 - DNA, 978 bp, Unknown
  Obtained from environmental sample
  misc_feature (1)..(978): n is a, c, g, or t
atgggggagggcgatctgacaggaaggattgagaccggcaaaaaaaacgagatgggggaattggccggctacttcaatatgacattggacaagatacgcaaccttattgtcgtcattaaagacgaagcggcgaatctgcataatgtcggcgacaatctggcctcgcatatgcaggataccgccggcgcggtatatcagattacagctaacattgaggttgtaaaagagaaagtaaccggccagtccgcctcggtttcccaaaccggcgccaccatggaacaggtaacggcaaacatagacaaactcggcaggaatgtggaagcacaaaccgaaagcgtgtcccggtcttcctcagcgattgaggaaatgctcgtcaacatagaaaatgtcaccaaaacattgggcaagaacgcggaaagcgtgcaggaattaatcaaggtatccgataccggacgcggaagcctgcaaaaagttacgcaggacattcatgaaatagccagggaatccgaagggcttcttgaaatcaatacggtaatggaaaatatcgccagccagacaaacttgctttcaatgaacgcggcaatagaagccgcccacgccggggaagcggggaagggttttgcggtagtcgccggagaaatacgccgtctttcagaaaccaccagagaaaattccgtaaatatttcccatacacttaaaagtattattggcggaatatccgacacgacaaaacaatccggcgaaacagatacacgaatagcccaaatgtccaaagagataagcggttttgccgaaactatgtctgcttttatgaacacgtttaatgaattatcggcgaaaagcggaaacattaccgcctctcttgtaagcctgaaagagcaaagttcggcggttaaaacaagttatgcgcaaataattgaaatgacaaataaacttgccaaagcattgaaagacttatccgagttgtcaaaaagataa

SEQ ID NO: 30678 - protein, 325 aa, Unknown
  Obtained from environmental sample
  DOMAIN (107)...(321): Methyl-accepting chemotaxis protein (MCP) signaling domain
  misc_feature (1)..(325): Xaa is any amino acid
MGEGDLTGRIETGKKNEMGELAGYFNMTLDKIRNLIVVIKDEAANLHNVGDNLASHMQDTAGAVYQITANIEVVKEKVTGQSASVSQTGATMEQVTANIDKLGRNVEAQTESVSRSSSAIEEMLVNIENVTKTLGKNAESVQELIKVSDTGRGSLQKVTQDIHEIARESEGLLEINTVMENIASQTNLLSMNAAIEAAHAGEAGKGFAVVAGEIRRLSETTRENSVNISHTLKSIIGGISDTTKQSGETDTRIAQMSKEISGFAETMSAFMNTFNELSAKSGNITASLVSLKEQSSAVKTSYAQIIEMTNKLAKALKDLSELSKR

SEQ ID NO: 30679 - DNA, 1038 bp, Unknown
  Obtained from environmental sample
  misc_feature (1)..(1038): n is a, c, g, or t
ttgatgcgccacggcgtccccgtcgccggcaactttttgcaacaagagctggcaatcgcaaccggggcagttgagctgatggttatcgacgtgcagtgctgtatgccgagcctgccggaaatagccaaaaattaccacaccgagatcgtttccacctccgacattgccagaaccatcggagcggttcacaagagtataggccacggcagcgaaccgctaaatgtagccagggatattgtcaggcgggcaatcgacaatttcaaaaaacgcgatgccgcgaaaatcagcatacccaggcataaggaagaccttatcgcgggtttttccgttgacgcaataaagtacatgctgggcgggcggttccgcgcttctttccggcccctgaacgacgcaatcatgcaaaacagaattttgggtgtggtcggtatcgttggctgtaacaacacgaagtgcaaaacggacgaatataccaatgtgcttaccgccgaattaataaaacggaacgtgcttgtgcttcagacaggctgttcggcgattgccagcgcgaaggcggggatgctcaagcccgaaatagctttgagccaggccgggccgggactgcgggaggtctgcgaggccgtcggaatcccgcctgtcctgcaccttggcagttgcgttgacaacagccggatactggaagctgccaccgaatcgattcatgagggcggccttggggaagatatggggggctatcccgctgtgggcgtcgcgcccgaatggatgagtgaaaaagccgttgccatcgcctgttactttgtggcaagcggggttccggtagttttgggaaatccgttctacgtttccggttccaaagctgtaagcgattatctacacggcagtgtacaggaggaattcggcgcgaggttctactgtatagaagatcccttacaggctgccgaccgcattgtggaaatattgaatcaagccagagacgcccttgggatcaataaaaaggcggagcgcaagcttttcgatatgaaagacaggagggcgttgtaa

SEQ ID NO: 30680 - protein, 345 aa, Unknown
  Obtained from environmental sample
  DOMAIN (1)...(312): Prismane/CO dehydrogenase family
  misc_feature (1)..(345): Xaa is any amino acid
MMRHGVPVAGNFLQQELAIATGAVELMVIDVQCCMPSLPEIAKNYHTEIVSTSDIARTIGAVHKSIGHGSEPLNVARDIVRRAIDNFKKRDAAKISIPRHKEDLIAGFSVDAIKYMLGGRFRASFRPLNDAIMQNRILGVVGIVGCNNTKCKTDEYTNVLTAELIKRNVLVLQTGCSAIASAKAGMLKPEIALSQAGPGLREVCEAVGIPPVLHLGSCVDNSRILEAATESIHEGGLGEDMGGYPAVGVAPEWMSEKAVAIACYFVASGVPVVLGNPFYVSGSKAVSDYLHGSVQEEFGARFYCIEDPLQAADRIVEILNQARDALGINKKAERKLFDMKDRRAL

SEQ ID NO: 30681 - DNA, 723 bp, Unknown
  Obtained from environmental sample
  misc_feature (1)..(723): n is a, c, g, or t
gtggtgttcttcacacggcaattggccacaatgataaacggcggcgtgccgctcccgcgcgcggtcgagcagcttagccgcaacgagatacctgtcttcaaacgtatgttggagcaagtggtctacgaccttggaatgggctccaacttctccgacgccctctccaagcatcccggagcgttcggcggtatgtttgtcgccgtggtccgcgccggcgaaacggccggcgcgttggacacggtgctgaaccaactcgccgactacatggagaacacggaggccatgaaatccaaagtgaaggcggctatgcgctacccgacgatcgtctccgtcttcgtcttcgtaatcatcaccggcgtgatgataaaattggttcccatcttcaaagacatgtacgccgacttcggcaccaagctgcccgggccgacgctgctcctcatctccgtctccgacgcgatacgaaataacgcgctgataacgctattgataatagcggccgcagccggcgcgattttcgtattgcaaagcgtagactcgacaagctatatgattgataaatacgcgctgaaattacccatattcggcaacatactgcgcaaaaacatactggcgatctactgccgcaccatgtccctgctgatggacagcggcaccccgatactggaagccacgcaaataaccgaaagccgcggtaagcaacaaacactactccaaggcgcttaa

SEQ ID NO: 30682 - protein, 240 aa, Unknown
  Obtained from environmental sample
  DOMAIN (4)...(126): Bacterial type II secretion system protein F domain
  misc_feature (1)..(240): Xaa is any amino acid
MVFFTRQLATMINGGVPLPRAVEQLSRNEIPVFKRMLEQVVYDLGMGSNFSDALSKHPGAFGGMFVAVVRAGETAGALDTVLNQLADYMENTEAMKSKVKAAMRYPTIVSVFVFVIITGVMIKLVPIFKDMYADFGTKLPGPTLLLISVSDAIRNNALITLLIIAAAAGAIFVLQSVDSTSYMIDKYALKLPIFGNILRKNILAIYCRTMSLLMDSGTPILEATQITESRGKQQTLLQGA

SEQ ID NO: 30683 - DNA, 459 bp, Unknown
  Obtained from environmental sample
  misc_feature (1)..(459): n is a, c, g, or t
gtgggagcaggtttttgcgcaatactgggatattcacaacgacataaccccagaagggcggagattacggctatcttttcccgcttttacgaagagataatcggtggcaacaaaccacgcccaagctattatgcctccaaaatggcctctgacggtattagaggcaaacttgttgagagcaatagcggaagcacagatttaaccacttatttgtcggtgaacggcaaaaagaaaaccttgcttgcggtaaacaaaagcccctacactgctttcaatggcacaattaagattcctggttttgctggaaaagcaaaggtagaggttttggctactccaaaagggcaagcagcaggcaaagtggttaaagttgacccgccaaaagctagcagtcaggatataaaagaaggcagtgcgctaacattccctgcgcactccataacattgattactattgaataa

SEQ ID NO: 30684 - protein, 152 aa, Unknown
  Obtained from environmental sample
  misc_feature (1)..(152): Xaa is any amino acid
MGAGFCAILGYSQRHNPRRAEITAIFSRFYEEIIGGNKPRPSYYASKMASDGIRGKLVESNSGSTDLTTYLSVNGKKKTLLAVNKSPYTAFNGTIKIPGFAGKAKVEVLATPKGQAAGKVVKVDPPKASSQDIKEGSALTFPAHSITLITIE

SEQ ID NO: 30685 - DNA, 1152 bp, Unknown
  Obtained from environmental sample
  misc_feature (1)..(1152): n is a, c, g, or t
atgcgcgtttacgggacgccccaggcggtgttcgccatagagtcccacatagaagacatcgcgaaaagccttaaacttgatccgctggaattacgtttcctcaacgtgatgcctgttggttttgttgataattttaccaaaaacgtcaaccgctttgattcattccgtcagtgcgtggaggccggcaagaaacggatcaaatgggacgagaaacgcgagcgttacgcgaaacaaagcggcccggtcaggcgcggcatcgggatgtccctgttctggtataacaccgccgtctggccaatttcgatagaaatttcatcctgccgtattgtaatgaatcaggacggcagcgtgcagatacagcttggcgaaaccgaaataggacagggagcggacacggctttttcccaaatggccgccaagaccctggggataccctggcagatggttcatgtcatcagcacgcaggatacggacattacgccttttggattcggcgcttacggctcccggcaaacctacgtcggcggcgcgggcgtgcacaaggccgcccttctgctaaaggaaaaaattctgaaggcagcgtccgtgtacacaaaattacccgagggcgaacttgacattgttaacggcgatattgttaatacttcgcataacggtaagaagatttgcagccttgaagaacttgtcattgataccctgtaccacaccgaacattccgaacatttgaccgccgaggctaccgcccaggttaaaagcaacgcccttagcctgggctgcgcctttgccgaggtggaagtagacatccccttctgcaaaatcaagctgctggaaatggttaattgccatgactgcggcgctctgatcaacccaagaaccgccgaagcgcaggttcacggcggcatgagcatggcaattggctacgggttgtatgagaagatgttatacgatcccaaaacgggaaagctccttaacggtaacctgcttgactacaaactgccgacgattatggatcacccgcggcttgtggctgaatttatcgaaaaccccgagccgacaagcccctatgggacaaaggccctcggcgaaccgccgaccgtgccgggcgccgcggctatccgtaacgccgtgcttcatgccaccggcgtggaataa

SEQ ID NO: 30686 - protein, 383 aa, Unknown
  Obtained from environmental sample
  DOMAIN (1)...(339): Aldehyde oxidase and xanthine dehydrogenase, molybdopterin binding domain
  misc_feature (1)..(383): Xaa is any amino acid
MRVYGTPQAVFAIESHIEDIAKSLKLDPLELRFLNVMPVGFVDNFTKNVNRFDSFRQCVEAGKKRIKWDEKRERYAKQSGPVRRGIGMSLFWYNTAVWPISIEISSCRIVMNQDGSVQIQLGETEIGQGADTAFSQMAAKTLGIPWQMVHVISTQDTDITPFGFGAYGSRQTYVGGAGVHKAALLLKEKILKAASVYTKLPEGELDIVNGDIVNTSHNGKKICSLEELVIDTLYHTEHSEHLTAEATAQVKSNALSLGCAFAEVEVDIPFCKIKLLEMVNCHDCGALINPRTAEAQVHGGMSMAIGYGLYEKMLYDPKTGKLLNGNLLDYKLPTIMDHPRLVAEFIENPEPTSPYGTKALGEPPTVPGAAAIRNAVLHATGVE

SEQ ID NO: 30687 - DNA, 360 bp, Unknown
  Obtained from environmental sample
  misc_feature (1)..(360): n is a, c, g, or t
ttggtgcttgaaactgccgctattttgtggtattttatattagtgaggctgttcaagaatacttggtttaatcggtttgccaaaaaagaaagtattacagatgacgaattacgggaagcggcaaacaggattgaggctggacaaacagatgccgaccttggcggagacgtgtacaaagtgcgtgtggcccggtctggcggaggaaaatcgggcggctatcggataatcgtatttttcaagagcgaggaacggctgttttacgtttatggttttgccaagtcagacagaaagcacatagaccagaaagaaaccagggaatacaaggcattggcaaaaaaatatctgaatttatcccgatga

SEQ ID NO: 30688 - protein, 119 aa, Unknown
  Obtained from environmental sample
  DOMAIN (15)...(119): Protein of unknown function (DUF1044)
  misc_feature (1)..(119): Xaa is any amino acid
MVLETAAILWYFILVRLFKNTWFNRFAKKESITDDELREAANRIEAGQTDADLGGDVYKVRVARSGGGKSGGYRIIVFFKSEERLFYVYGFAKSDRKHIDQKETREYKALAKKYLNLSR

SEQ ID NO: 30689 - DNA, 519 bp, Unknown
  Obtained from environmental sample
  misc_feature (1)..(519): n is a, c, g, or t
ttgattggaattaagactctcgtaaaacaacctcttcttcccctttgtgctctttgtcttcttggtgatctttgtgtgaactcttcaagaaaaaattaccgcgtcttacccttcccccgcaatatcctcatacaattaagaatcgccaataaacaaacacccacatccgcaaaaacggcttcccacatggcggcaatgccaaatgcgccgaaaacaagaaaaataatttttacacctaacgaaaaaataatgttttgcgtgactattttacatgtaaatcgcgatatatccacggcctccgccaatttggatggctcgtcagtcatcagtaccacatccgcggcttcaattgccgcgtccgagccaagcgcgcccattgcgacgccaatatccgctattgaaagaaccggcgcgtcgttaatgccgtccccaacaaaggcaagtttgctttttgaatctttcttttcaattaatttttccagtatttctactttttcgtgcggcagtaatccaccgtaa

SEQ ID NO: 30690 - protein, 172 aa, Unknown
  Obtained from environmental sample
  misc_feature (1)..(172): Xaa is any amino acid
MIGIKTLVKQPLLPLCALCLLGDLCVNSSRKNYRVLPFPRNILIQLRIANKQTPTSAKTASHMAAMPNAPKTRKIIFTPNEKIMFCVTILHVNRDISTASANLDGSSVISTTSAASIAASEPSAPIATPISAIERTGASLMPSPTKASLLFESFFSINFSSISTFSCGSNPP

SEQ ID NO: 30691 - DNA, 519 bp, Unknown
  Obtained from environmental sample
  misc_feature (1)..(519): n is a, c, g, or t
ttgaaagagaggggagtgcaaaaaaccgtaatgcttaccggtgatagtccttccatagcgcaaagcgtcgcctccgaattaggaatagatgaagtttacggtggattactgccgcacgaaaaagtagaaatactggaaaaattaattgaaaagaaagattcaaaaagcaaacttgcctttgttggggacggcattaacgacgcgccggttctttcaatagcggatattggcgtcgcaatgggcgcgcttggctcggacgcggcaattgaagccgcggatgtggtactgatgactgacgagccatccaaattggcggaggccgtggatatatcgcgatttacatgtaaaatagtcacgcaaaacattattttttcgttaggtgtaaaaattatttttcttgttttcggcgcatttggcattgccgccatgtgggaagccgtttttgcggatgtgggtgtttgtttattggcgattcttaattgtatgaggatattgcgggggaagggtaagacgcggtaa

SEQ ID NO: 30692 - protein, 172 aa, Unknown
  Obtained from environmental sample
  misc_feature (1)..(172): Xaa is any amino acid
MKERGVQKTVMLTGDSPSIAQSVASELGIDEVYGGLLPHEKVEILEKLIEKKDSKSKLAFVGDGINDAPVLSIADIGVAMGALGSDAAIEAADVVLMTDEPSKLAEAVDISRFTCKIVTQNIIFSLGVKIIFLVFGAFGIAAMWEAVFADVGVCLLAILNCMRILRGKGKTR

SEQ ID NO: 30693 - DNA, 843 bp, Unknown
  Obtained from environmental sample
  misc_feature (1)..(843): n is a, c, g, or t
ttgaccggaggcgtttatattgtcggcagattcaaagaaggggccggaagcgaacgcaaagaactgttgcaattatgggattccggttcctatgacgaagtgtttaacctgagcggggttgcccttgtttcgcggcctgtggattattttctgttaaccatgcacggcttttccgcgtatcaaatgggcatttcccaaattaacagcctggattctgcccgctactttgacgaatgtatcgagtctttgcggaaagcgatgcttttgaaaaatggcgcatacgatggccggctgcattatgtcctgggaaaagcctacagcaacaagggcgaaagctatgccgatctcgcggtgaaatttctggagagagcgcggggcttgtcctataaagccgccgatattcccgaataccttgggctcgcgtacgcggcttacggcgattaccggagcagcgtagaagcgtttactcaggcttttgtntccggcaaacaaccttccgataatcttttattgtcgatatcccgatcctatatcgaaatggaagaatacaatatggcgttaggttatcttaaccgctgtattgatttttccgccgattcaaaatccgttattttatcgcgttttatgttagctgaaatatacagaaacaaaaacgattatgacagcgcggaaaaacaatatgtaatcattataaatgactccggtgaaaacgccgaagtgcattatcaattaggcgaactttataacctaaggggcgatacgacaagagcgcgttctgagtggagaacagcttacagacaggacccggctcacgcaaaagcaagagcgcggcttaatatataa

SEQ ID NO: 30694 - protein, 280 aa, Unknown
  Obtained from environmental sample
  DOMAIN (238)...(271): Tetratricopeptide repeat
  misc_feature (1)..(280): Xaa is any amino acid
MTGGVYIVGRFKEGAGSERKELLQLWDSGSYDEVFNLSGVALVSRPVDYFLLTMHGFSAYQMGISQINSLDSARYFDECIESLRKAMLLKNGAYDGRLHYVLGKAYSNKGESYADLAVKFLERARGLSYKAADIPEYLGLAYAAYGDYRSSVEAFTQAFVSGKQPSDNLLLSISRSYIEMEEYNMALGYLNRCIDFSADSKSVILSRFMLAEIYRNKNDYDSAEKQYVIIINDSGENAEVHYQLGELYNLRGDTTRARSEWRTAYRQDPAHAKARARLNI

SEQ ID NO: 30695 - DNA, 396 bp, Unknown
  Obtained from environmental sample
  misc_feature (1)..(396): n is a, c, g, or t
atgttaggcggtttatcatcggatttcggcattgatttaggaacttgtaatactctgattttcataaagggtaaaggaatagttttaaatgagccgtctgtagtcgcggttgaacgcggcacaaaaagaatagtagccgtcggtgtcgacgccaaaagaatgctttggaaaactcccgaaaacattatcgcgataagaccgatgcgcgacggagtaatcgcggacattgaatcaacggaaaaaatgatccgctgttttatcgaccgcgtcttcccgcgctaccgcttttttaaaccaagaatggtaataggcgttccttcctgtatcacagaagtagaaagacgcgcggtagaggaaagcgcgtataaattccnggcgcgagagaagttcgcgtaa

SEQ ID NO: 30696 - protein, 131 aa, Unknown
  Obtained from environmental sample
  DOMAIN (6)...(129): MreB/Mbl protein
  misc_feature (1)..(131): Xaa is any amino acid
MLGGLSSDFGIDLGTCNTLIFIKGKGIVLNEPSVVAVERGTKRIVAVGVDAKRMLWKTPENIIAIRPMRDGVIADIESTEKMIRCFIDRVFPRYRFFKPRMVIGVPSCITEVERRAVEESAYKFXAREKFA

SEQ ID NO: 30697 - DNA, 837 bp, Unknown
  Obtained from environmental sample
  misc_feature (1)..(837): n is a, c, g, or t
atgtccaatgatccgaaactgcgcgcggcatttgtcgaaaatgtgtgcaaatggctggaagagtacgacctggacggcatggatgttgactgggaatacccggtagggccggaatgggggcaggagataaaatcgcggcctgcggacaagcagaattacattgccttgttgaaagacttgcggagcgggatggataagctgggagcgaagaccggcaagcgctacgggctttccaccgcggtgccggcgagcggctggttccccaaagccaacgacgtaaaagcggcggcgaagatagtggattcgcttaaactcatggcttatgactattacggcggctggagcaccaccacggggcatcactccaatctgagcaacaacccgcttgatccggcgtggggcggctggagcaccgagcaggctctgaacgaatacctgtgggcaggggtgcctcccggaaagatagcgctgggcgtgggcttttacggtcgggcgtggcagggtgtcgagaaaggcaccaatgagaatacccccgggctgttccagaaatacaagtctattcccaataatccgccttttgatcaggggactataggctggactgacatgaaagaattcctgaagccgaattccgcctacaagcgctactgggacgatgttggcaaggccccttacctgtacaacggcgacatctggatcagctacacggacgcggagcagataanaattctgactgattttgccaaagagaaaaatttgggcggcgtttttgtatgggaatacagccacgacatgagcgccgaactgatccaaacattagcagaaagttttaaatag

SEQ ID NO: 30698 - protein, 278 aa, Unknown
  Obtained from environmental sample
  DOMAIN (1)...(264): Glycosyl hydrolases family 18
  misc_feature (1)..(278): Xaa is any amino acid
MSNDPKLRAAFVENVCKWLEEYDLDGMDVDWEYPVGPEWGQEIKSRPADKQNYIALLKDLRSGMDKLGAKTGKRYGLSTAVPASGWFPKANDVKAAAKIVDSLKLMAYDYYGGWSTTTGHHSNLSNNPLDPAWGGWSTEQALNEYLWAGVPPGKIALGVGFYGRAWQGVEKGTNENTPGLFQKYKSIPNNPPFDQGTIGWTDMKEFLKPNSAYKRYWDDVGKAPYLYNGDIWISYTDAEQIXILTDFAKEKNLGGVFVWEYSHDMSAELIQTLAESFK

SEQ ID NO: 30699 - DNA, 600 bp, Unknown
  Obtained from environmental sample
  misc_feature (1)..(600): n is a, c, g, or t
atgctttcatgcgttcaaaccatgacggctgtagcgaaaaaactgcgcgaatggaaactgcgcatcccttcacaaacgcatagtgttgtcattgatccggtgatgtacgctaaaaacggcgctccccttatggagacggaagccattagtacgctgatgaaggaaattttaccgttaggcgatttaataacgccgaatattcccgaagcggagaaaatatccggaattagcgttaaaacgcgtgacgatatgcgcgaagcggcaaagcgtattcacgcgactggttgccgcgcggttgtcgttaaaggcggacacatagaaggggacgcgacggatattttattcgacggtaacgcgtttcatgaatacccgtccccgaggattgacacaaaacacacccacggaacaggctgtactttttcctcggcgattgcctcgaatctcgcccttgggcttcccgtttataaagcagtcgaagacgctaaggcgtatataaatacggcaattacccacgctcccggactcgggaagggcaacggaccaacgcatcatttttatatgatatatcaaaattattttaaggagaaagaaaatggttaa

SEQ ID NO: 30700 - protein, 199 aa, Unknown
  Obtained from environmental sample
  DOMAIN (1)...(183): Phosphomethylpyrimidine kinase
  misc_feature (1)..(199): Xaa is any amino acid
MLSCVQTMTAVAKKLREWKLRIPSQTHSVVIDPVMYAKNGAPLMETEAISTLMKEILPLGDLITPNIPEAEKISGISVKTRDDMREAAKRIHATGCRAVVVKGGHIEGDATDILFDGNAFHEYPSPRIDTKHTHGTGCTFSSAIASNLALGLPVYKAVEDAKAYINTAITHAPGLGKGNGPTHHFYMIYQNYFKEKENG

SEQ ID NO: 30701 - DNA, 819 bp, Unknown
  Obtained from environmental sample
  misc_feature (1)..(819): n is a, c, g, or t
atggttaaatcatacgccgccttattaaataaggtgcgggaaaacaaaccgttggtgcatcacattacaaactatgtaaccgtgaatgactgcgccaacatcaccctcgctatcggcgcgtcgccggttatggcggacgctatcggcgaagcggcggacatcgcggcaatagcgcaggcggttgttctgaacatgggaacgctcaacgagcgtaccattgcgtcaatgattgccgccggcatttcggctaacgctaagggaatccccgtcatttttgaccctgtaggcgcgggagcttcaaaactacgcaacgatacagcggcaagtttgatacgcgaagtaaagttaagcgtaatccggggaaatatttccgagattaaatttatcgctggtgtcagttcgcaaaccaaaggcgtggacgcttcagataacgatatcgccgcagcggaaagcgcaggtcttaccgcaaaaacgctggcgcaaaaactcggctgtgtagcggtaataagcggcgctgtcgataccatttctgacggcaagaaaactatctttgcggaaaacggacaccccatgctgggaaacttgacaggcacgggctgtatgtgctcatcgcttatcggctccttttgcggagcctcaccgcaggaacctcttgccgccgccgctgccgcaatgctgtgcatgggtatcgcaggcgaattggcttttgaaaattcgggacagcgcggcaacggaagtttccgcattgcgcttcatgacgcggtaagccgactggacacggcggcgtttgaaaggatggcgaaatatcatgaagaataa

SEQ ID NO: 30702 - protein, 272 aa, Unknown
  Obtained from environmental sample
  DOMAIN (9)...(261): Hydroxyethylthiazole kinase family
  misc_feature (1)..(272): Xaa is any amino acid
MVKSYAALLNKVRENKPLVHHITNYVTVNDCANITLAIGASPVMADAIGEAADIAAIAQAVVLNMGTLNERTIASMIAAGISANAKGIPVIFDPVGAGASKLRNDTAASLIREVKLSVIRGNISEIKFIAGVSSQTKGVDASDNDIAAAESAGLTAKTLAQKLGCVAVISGAVDTISDGKKTIFAENGHPMLGNLTGTGCMCSSLIGSFCGASPQEPLAAAAAAMLCMGIAGELAFENSGQRGNGSFRIALHDAVSRLDTAAFERMAKYHEE

SEQ ID NO: 30703 - DNA, 675 bp, Unknown
  Obtained from environmental sample
  misc_feature (1)..(675): n is a, c, g, or t
atgcggaaacttccgttgccgcgctgtcccgaattttcaaaagccaattcgcctgcgatacccatgcacagcattgcggcagcggcggcggcaagaggttcctgcggtgaggctccgcaaaaggagccgataagcgatgagcacatacagcccgtgcctgtcaagtttcccagcatggggtgtccgttttccgcaaagatagttttcttgccgtcagaaatggtatcgacagcgccgcttattaccgctacacagccgagtttttgcgccagcgtttttgcggtaagacctgcgctttccgctgcggcgatatcgttatctgaagcgtccacgcctttggtttgcgaactgacaccagcgataaatttaatctcggaaatatttccccggattacgcttaactttacttcgcgtatcaaacttgccgctgtatcgttgcgtagttttgaagctcccgcgcctacagggtcaaaaatgacggggattcccttagcgttagccgaaatgccggcggcaatcattgacgcaatggtacgctcgttgagcgttcccatgttcagaacaaccgcctgcgctattgccgcgatgtccgccgcttcgccgatagcgtccgccataaccggcgacgcgccgatagcgagggtgatgttggcgcagtcattcacggttacatag

SEQ ID NO: 30704 - protein, 224 aa, Unknown
  Obtained from environmental sample
  misc_feature (1)..(224): Xaa is any amino acid
MRKLPLPRCPEFSKANSPAIPMHSIAAAAAARGSCGEAPQKEPISDEHIQPVPVKFPSMGCPFSAKIVFLPSEMVSTAPLITATQPSFCASVFAVRPALSAAAISLSEASTPLVCELTPAINLISEIFPRITLNFTSRIKLAAVSLRSFEAPAPTGSKMTGIPLALAEMPAAIIDAMVRSLSVPMFRTTACAIAAMSAASPIASAITGDAPIARVMLAQSFTVT

SEQ ID NO: 30705 - DNA, 879 bp, Unknown
  Obtained from environmental sample
  misc_feature (1)..(879): n is a, c, g, or t
atgcctgatatatctcaaatttatgaaaaattgaattttacgcctagaaaagggcagctcgactacagcaaatttgttgcggaaactttaaaagcgaacagccgttcaaaacagcaaattactttggcagaaggcgaaaccggaattggaagaacgttgggctatttaatccccgctatgctccacgcagacgaaaccgatgagagaattttaatcaccgttgcaggcaaagcgcaattaaaacaaattcaggaaaaagaaattccagcaattttgccatttttaaacggtaaaattcgcccttctattttaaaagagagattcagctatgtatgtatgcgcaaattttacaactgcgtaaatagcccggaactctacctaaccgcagaagagcgcgtggctttttttgccgtggttacgtggatagaaaaaacaaaagatggggatttaaacgaggttctccattacaaccgcactcctatcctctggaaaaaaatcgcatgtgaagctagctcctgccttggcgataaatgcgagcatttttcaaaatgccattttcaaaatgctaagaaaaagtctgaaaactccaattttcttttggtgcaacaccgcctatttttacaagatatgcagatggattttgcacttttgccgcacagtgaaaaaattatttttgacaatgcccataaactcccgcaagagagccaaaaaacttttggacgaactctttatttttatgctctgagaaatgcaattaaacagaatacctggtgcaaggaatgggagaaacaagctgcggaaagcgaaaaattatttttgaccttggtaaaggatattcaaaacttttttcaaaaaacaaaaagcgcaaatcacttatga

SEQ ID NO: 30706 - protein, 292 aa, Unknown
  Obtained from environmental sample
  misc_feature (1)..(292): Xaa is any amino acid
MPDISQIYEKLNFTPRKGQLDYSKFVAETLKANSRSKQQITLAEGETGIGRTLGYLIPAMLHADETDERILITVAGKAQLKQIQEKEIPAILPFLNGKIRPSILKERFSYVCMRKFYNCVNSPELYLTAEERVAFFAVVTWIEKTKDGDLNEVLHYNRTPILWKKIACEASSCLGDKCEHFSKCHFQNAKKKSENSNFLLVQHRLFLQDMQMDFALLPHSEKIIFDNAHKLPQESQKTFGRTLYFYALRNAIKQNTWCKEWEKQAAESEKLFLTLVKDIQNFFQKTKSANHL

SEQ ID NO: 30707 - DNA, 399 bp, Unknown
  Obtained from environmental sample
  misc_feature (1)..(399): n is a, c, g, or t
atgccaatggactcttttgagatattttttgcgctctttgtgctggtgttgctggcggtggcggttccctttgggatgatgttcgcaaattggctgctctccccgcagacacagctgaaaaataaagtaaaaaccgatgcttatgagtgcgggctttcaaaggtggtaggcaatgcctcggaaagattcccaataaaatattacatagtggctatgctttttttggtatttgatttggaagtggcttttctatacccgctggcggtggggttcaagcacggcggctgggaaatgctcgcctttttgatggtattcctgctgattttggaagttgggtacctttacattgtgcggaaaggcgttttgaactggtcaaaaatcagcgacaggattgattag

SEQ ID NO: 30708 - protein, 132 aa, Unknown
  Obtained from environmental sample
  SIGNAL (1)...(21)
  DOMAIN (21)...(124): NADH-ubiquinone/plastoquinone oxidoreductase, chain 3
  misc_feature (1)..(132): Xaa is any amino acid
MPMDSFEIFFALFVLVLLAVAVPFGMMFANWLLSPQTQLKNKVKTDAYECGLSKVVGNASERFPIKYYIVAMLFLVFDLEVAFLYPLAVGFKHGGWEMLAFLMVFLLILEVGYLYIVRKGVLNWSKISDRID

SEQ ID NO: 30709 - DNA, 372 bp, Unknown
  Obtained from environmental sample
  misc_feature (1)..(372): n is a, c, g, or t
ttggaaatttggcgcaaacccacagattcgtttgagaaactctctancgagagcgagcaaaaggcgggcgacctgttgcaaatgcgctacatagcggaggaaaaatgctacggcgttcttttgagcatagatggcaataaggttttgaccatacatctctccggcgaaaacggcagggcaaaagaacttgaggccggaagaataatctctctggaaaactcttacgagctggacaacgccccaaaatccgagactttttaccttttcacctctaaaaatgaatttgcccttgcacccattgcagaagctttgttgagcggcaaaatgccaaaaagcctgcaagtttcgcaaatcacgattaagaagaggtag

SEQ ID NO: 30710 - protein, 123 aa, Unknown
  Obtained from environmental sample
  misc_feature (1)..(123): Xaa is any amino acid
MEIWRKPTDSFEKLSXESEQKAGDLLQMRYIAEEKCYGVLLSIDGNKVLTIHLSGENGRAKELEAGRIISLENSYELDNAPKSETFYLFTSKNEFALAPIAEALLSGKMPKSLQVSQITIKKR

SEQ ID NO: 30711 - DNA, 1326 bp, Unknown
  Obtained from environmental sample
  misc_feature (1)..(1326): n is a, c, g, or t
atgcccggcgggccggttctctgggtgccgggcaccgaccaccctggaatagccacgcaaaatatggtcgcggaaaaactgctggaggaacggggtataagccgccgcgaactgggcagggagaaattccttgaagaaacctggaaattcaaacatgagaaacatgccagaataaccgagcagcttgcccggattggggcaagcgtggactgggacagggaacgctttaccctggacgaaggtttggcaagagcggtgaaggaagtgtttgtaacactgtacgagcgggatctgttgtacaagggagaatacctgataaactggtgtacaaaatgcggcaccgcccttgccgatgacgaggttaagcatgaggacacgccggggaaaatgtaccacctgcgttactacttcgctaatgccgaaggagacgccgcaagaaacgccgttattaacggccaaacacccccgtgcgcgggcgcgcacgaaggcgcttatgttgaaattgccacaacccgccctgaaacgctgttaggcgacaccgccgtagccgtccaccccgaggacgaacgctactccgcgctgaaaggcaaaaccctgcgtcttcctctgacggatcgggatattccgcttatttttgacgcctacgttgagcgcggattcggaacaggtgcgttaaaggttacgccagcccacgatccaaatgactgggaactggcgaaacggcacaaccttgccgtaatcaatatactcaaccccgacggcacgcttaacaatgaagtgccggaaaaataccgcggacttccggtgtcaaaggcgagagcgattgtaattgaagacctgcaggctgggggctggtttgtaaaagacgagcctattaatcactcagtcgggcattgttaccgctgccatacggtaatagagccgtttctctccgaacagtggtttgtccgcatgaagccgttagctgaaaaggcgttagcctcatggcagaaaggcgagattattttttacccgaaaaaatgggaaaacacctataaacactggatggaaaacataagagactggtgtgtcagccgccaactgtggtgggggcatagaatccccgcgtggacttgcgcggactgcggcaaaatgacagtttcacgtaacgacatcgacgtatgccctcattgcaaaagcaaaaaaatagagcaagaccccgacgtgcttgacacttggttttcaagctggctttggcccttcagcactcttggttgggaaacgccgattgtaataccgacgacttcaaaaatattatccgacaacggcgcttataaccgcctatga

SEQ ID NO: 30712 - protein, 441 aa, Unknown
  Obtained from environmental sample
  DOMAIN (3)...(441): tRNA synthetases class I (I, L, M and V)
  misc_feature (1)..(441): Xaa is any amino acid
MPGGPVLWVPGTDHPGIATQNMVAEKLLEERGISRRELGREKFLEETWKFKHEKHARITEQLARIGASVDWDRERFTLDEGLARAVKEVFVTLYERDLLYKGEYLINWCTKCGTALADDEVKHEDTPGKMYHLRYYFANAEGDAARNAVINGQTPPCAGAHEGAYVEIATTRPETLLGDTAVAVHPEDERYSALKGKTLRLPLTDRDIPLIFDAYVERGFGTGALKVTPAHDPNDWELAKRHNLAVINILNPDGTLNNEVPEKYRGLPVSKARAIVIEDLQAGGWFVKDEPINHSVGHCYRCHTVIEPFLSEQWFVRMKPLAEKALASWQKGEIIFYPKKWENTYKHWMENIRDWCVSRQLWWGHRIPAWTCADCGKMTVSRNDIDVCPHCKSKKIEQDPDVLDTWFSSWLWPFSTLGWETPIVIPTTSKILSDNGAYNRL

SEQ ID NO: 30713 - DNA, 1005 bp, Unknown
  Obtained from environmental sample
  misc_feature (1)..(1005): n is a, c, g, or t
ttgccctgggtttccgcagacagggccttggcaaacgccggcatagatccggatgacccggaactgaaaaatggccgttgcggcgttgcttatggttcctcagcgggcagcgttgattctatcatggacttctacagtatgcttgttctggatgatctaattaacatgaacgccactacctatatcaaggcaatgccccagacctgcgccgctaatatcggcatatttttcggcctgaccggaaggattattaccactaacacagcttgtacatccggcagtcaggccattggctttgcctatgaaaccatacagcggggcattcaggatattatgctggccgggggggccgaagaattaaatcctgcggacgccgcggtctttgacaccctctttgccgccagttccaggaacgacagccctgaaaaaaccccggcagcttatgacaaaaaccgcgacggactagttgtcggcgaaggcgcgggaaccctgattttagaagaatatgaacacgccgttaaacggggagcaaaaataattgccgaaattgtcggttttggaaccaataccgacggcagccacattacccagccgaatcgcaataccatgggcatcgccatgaaactggcactggaagactctcagttggagccggcctccattggctatgtgaatacccacggaaccgccaccgatgccggcgacgtggccgagagctgggctacttttgatgtattccaaaggccggttccggcaagcaccttaaagaattatttaggccatactatgggggcctgcggcgccatagaggcatggatttcaataaatatgatgaaggaaaagtggttctgtcccaacattaaccttgaagaactcgatccccgctgcgggccgctggattatatcaccggaaacggacgggaaattgacggtgaatatatcatgtccaataatttcgcttttggaggaatcaacacttcgcttattttcaggaacttgccgtga

SEQ ID NO: 30714 - protein, 334 aa, Unknown
  Obtained from environmental sample
  DOMAIN (1)...(172): Beta-ketoacyl synthase, N-terminal domain
  misc_feature (1)..(334): Xaa is any amino acid
MPWVSADRALANAGIDPDDPELKNGRCGVAYGSSAGSVDSIMDFYSMLVLDDLINMNATTYIKAMPQTCAANIGIFFGLTGRIITTNTACTSGSQAIGFAYETIQRGIQDIMLAGGAEELNPADAAVFDTLFAASSRNDSPEKTPAAYDKNRDGLVVGEGAGTLILEEYEHAVKRGAKIIAEIVGFGTNTDGSHITQPNRNTMGIAMKLALEDSQLEPASIGYVNTHGTATDAGDVAESWATFDVFQRPVPASTLKNYLGHTMGACGAIEAWISINMMKEKWFCPNINLEELDPRCGPLDYITGNGREIDGEYIMSNNFAFGGINTSLIFRNLP

SEQ ID NO: 30715 - DNA, 873 bp, Unknown
  Obtained from environmental sample
  misc_feature (1)..(873): n is a, c, g, or t
atgaaattctttgacgatcttctttgtcaaaaaaataaaaaacatcatgatgtctgcggagattactgcctttatgaaagaacatccgccggtatgatttatgtattatgcgacggagtcggttcggggatttacgccaacatttccgccatcacctgcgccaaccgtattttggaactgattaaaggcggaatgtccataaggatgacctgcgaaatggttgcggcgtccatgcaccgcgcgcgcaaagaagatatccctttcgccgctttttcagcggctttgatttcatacgacggcaaatataccatttattcttatgaatcgccgaatcccattttaatgaaaaacaaccacgcgacggttcttaatccgcgtttttacacgacagggtttgaagtaatcggcgaatctaccggcgttcttaatttaggagattcacttataatgttttccgacggcgtaagtcaggcggggcttggacacgggcacggtatgggcatcggctctgacggcgtttgctcttacatcaacttaaactttaaaccgaacgatattatctcgaacctgccatatagaattgtagaaatgtgcaaaaaagtatccggagggcattgcgaagatgatactactcttgcaatgctcaactgccgcgaggcgaaagagttaactcttcttacaggaccgccttccaagcggacgatgaatcatgattatgcgttgaattttaaaaatatgcccggcaagaaaataatatgcggttccacaactacagatataatagcggaagaacttgggtttaaaggtgaaacgatatcaatgggaaaatctttcgggcagctgccggatacaaaattgacggaattgatttag

SEQ ID NO: 30716 - protein, 290 aa, Unknown
  Obtained from environmental sample
  DOMAIN (28)...(218): Stage II sporulation protein E (SpoIIE)
  misc_feature (1)..(290): Xaa is any amino acid
MKFFDDLLCQKNKKHHDVCGDYCLYERTSAGMIYVLCDGVGSGIYANISAITCANRILELIKGGMSIRMTCEMVAASMHRARKEDIPFAAFSAALISYDGKYTIYSYESPNPILMKNNHATVLNPRFYTTGFEVIGESTGVLNLGDSLIMFSDGVSQAGLGHGHGMGIGSDGVCSYINLNFKPNDIISNLPYRIVEMCKKVSGGHCEDDTTLAMLNCREAKELTLLTGPPSKRTMNHDYALNFKNMPGKKIICGSTTTDIIAEELGFKGETISMGKSFGQLPDTKLTELI

SEQ ID NO: 30717 - DNA, 588 bp, Unknown
  Obtained from environmental sample
  misc_feature (1)..(588): n is a, c, g, or t
atgcaggggcgctttcactattacgaaggctactctatgcaacagatagtctttccggtgcgcgttatgaaatcattgggggctgctactctcgttgtgtcaaacgcttgcggcgggataaacccgctcttccctccggggacgattatggccattaccgaccatatcaacctgcttggcgacaatccgcttataggcccgaatgacgaacgcataggcccgcgttttccggatatgtcggagccttattcaaacgagctgctggccatcgcctccaaggttgcgcttgacaacggtataaaactggaacgcggcgtgtacgcctcgatgagcggtccgtcgcttgagactaaggccgagtaccgcatgttaaaaacgctcggcgccgacgttatcgggatgagcaccgttccggaggtgatcgccgccgtccacgcggggatgcgggtgctcgggttttccgtgatcaccgactcatgcctccccgacgcgcttgagccggccacgctggcgaagatcctcgcggtagccgataaggccgagcccgtacttgttaaactgatagaaaaggttttgcagtcactatga

SEQ ID NO: 30718 - protein, 195 aa, Unknown
  Obtained from environmental sample
  DOMAIN (1)...(195): Phosphorylase family 2
  misc_feature (1)..(195): Xaa is any amino acid
MQGRFHYYEGYSMQQIVFPVRVMKSLGAATLVVSNACGGINPLFPPGTIMAITDHINLLGDNPLIGPNDERIGPRFPDMSEPYSNELLAIASKVALDNGIKLERGVYASMSGPSLETKAEYRMLKTLGADVIGMSTVPEVIAAVHAGMRVLGFSVITDSCLPDALEPATLAKILAVADKAEPVLVKLIEKVLQSL

SEQ ID NO: 30719 - DNA, 552 bp, Unknown
  Obtained from environmental sample
  misc_feature (1)..(552): n is a, c, g, or t
gtgccggaaaaatatagacttcaagcaaaactcgcagtcaaggatgaatacaattttgactttattgaaatgggtatcgagcacagcgaggctgaacttgaagtaggtataataaacaatattcgttcattcttatctgaaatgggcggagatttcagttttattggcaatcaatatcatcttgatgttactgatgatgattattatattgacttacttttatatcataggagactgcgatgtctgattgctattgatttaaagattggcgaattcaaaccggaatatgcaggaaaaatgcaattttacctgaccgcacttgatgaaaaaataaaattaccggatgaaaacccttctattgggattatcatttgtaaaagtaaaaaccgtacaagagttgaatatacattaaaggcagcgaataaacctatcggtgttgcgacatattcattttatgacaacttgccggatgaaatacgttctttacttccatcaccggatgaaatagcggcaattattaatgtaatagatgtaaatgacgatgatgaatag

SEQ ID NO: 30720 - protein, 183 aa, Unknown
  Obtained from environmental sample
  DOMAIN (3)...(166): Protein of unknown function (DUF1016)
  misc_feature (1)..(183): Xaa is any amino acid
MPEKYRLQAKLAVKDEYNFDFIEMGIEHSEAELEVGIINNIRSFLSEMGGDFSFIGNQYHLDVTDDDYYIDLLLYHRRLRCLIAIDLKIGEFKPEYAGKMQFYLTALDEKIKLPDENPSIGIIICKSKNRTRVEYTLKAANKPIGVATYSFYDNLPDEIRSLLPSPDEIAAIINVIDVNDDDE

SEQ ID NO: 30721 - DNA, 807 bp, Unknown
  Obtained from environmental sample
  misc_feature (1)..(807): n is a, c, g, or t
atgctgaagtattttatccgtacggataatctgggacaggtgctgcccctgcaaaattattttatgtattccgaaaaaaggatcatatctgctgccactctggccgaaatgggaggctactttctggacaaaaggcttgaaaaagtccgcggcgttccgaacgagtatctcgatcaaatcggtgggatcagggagatactcatacgcgctatcaggcaggatcctatgcttccggaatcctattatcatcttgccaggtactataactattttgaaaattctacggacgaaaggcttacgcttgaagtagcggtgcgcgcttttgaagcggcaaaggaagaaagcccaaaacgaatcgggtatcatattaatgccctgcgccgttacgcggaagtcctgactaacgggaaagaattttttcctgccgaagaaagtcttatcaagggaattaatgtataccaaaacgggctatcccgcagattactgacaccttcgcctgagtacggcaagttatatgccgaccttggggatttggaattctttgtaaaagacggagacatgcagacagctctggattattacaactacagcgaacagaacggctgggctccgcctgaaattcaataccgcatgggcgctgctcactatcagctccgtcaatgggggcccgcgctggaacgtttttttgcggctttcagggaaatgcctttcaaccgccggattctttacgcccttgggaacgtatcgtatatgcgggggaattatttcgccgctcagggctattatgacaggcttcggaaattctga

SEQ ID NO: 30722 - protein, 268 aa, Unknown
  Obtained from environmental sample
  misc_feature (1)..(268): Xaa is any amino acid
MLKYFIRTDNLGQVLPLQNYFMYSEKRIISAATLAEMGGYFLDKRLEKVRGVPNEYLDQIGGIREILIRAIRQDPMLPESYYHLARYYNYFENSTDERLTLEVAVRAFEAAKEESPKRIGYHINALRRYAEVLTNGKEFFPAEESLIKGINVYQNGLSRRLLTPSPEYGKLYADLGDLEFFVKDGDMQTALDYYNYSEQNGWAPPEIQYRMGAAHYQLRQWGPALERFFAAFREMPFNRRILYALGNVSYMRGNYFAAQGYYDRLRKF

SEQ ID NO: 30723 - DNA, 702 bp, Unknown
  Obtained from environmental sample
  misc_feature (1)..(702): n is a, c, g, or t
gtgccggaacagatgtcccgcttgattggaatgctgatagaaggcgcgcccgccgcggaaaccgccgctctggcagggaaactgctggacaaacccatacccattccaaaaggctatgagaaaagaaccggcgaggatttggaagccgaacagtccagttttgcgtatattttcgttcacaacttccttccagtgttaaggctttttatggctattgctttggtcgtcctttctgctggctaccttttttaccggtatatctatatgcccattaaggccgagggaatatataaactcgggatagagcggattgacgccggggaatattccagggcgaatgaacggtttttggaagcctataaaatacaccccaaaaagccgtggttttacacttacgccagggcctttagggacgcaaggcaatatacccttgcggaagaaaaatacagggaactgcttaattttacggcttccaaaaacaagcgcggaattcccgaaaaatcggcagttttggaatatgccgatttggaaacaaattacataggggattatcagacagcggacagcataatcaggcgcaatattttagattatttccctatggacaaggacgccctccttgcccttggggataacagccttatctggggcgaatacgataaggagcgtctgaagacgcccgcgaagcatacgccaagctga

SEQ ID NO: 30724 - protein, 233 aa, Unknown
  Obtained from environmental sample
  misc_feature (1)..(233): Xaa is any amino acid
MPEQMSRLIGMLIEGAPAAETAALAGKLLDKPIPIPKGYEKRTGEDLEAEQSSFAYIFVHNFLPVLRLFMAIALVVLSAGYLFYRYIYMPIKAEGIYKLGIERIDAGEYSRANERFLEAYKIHPKKPWFYTYARAFRDARQYTLAEEKYRELLNFTASKNKRGIPEKSAVLEYADLETNYIGDYQTADSIIRRNILDYFPMDKDALLALGDNSLIWGEYDKERLKTPAKHTPS

SEQ ID NO: 30725 - DNA, 687 bp, Unknown
  Obtained from environmental sample
  misc_feature (1)..(687): n is a, c, g, or t
atggcgtcggacgacgccgccggtctggccatcagcaacaggctgggggccgacatcagggtctccacgcaggccaggcgcaacgcccaagacggtctcgcctacatgcaggtggcagacggcgcgctggaggaagtcaccgcgctgctcacccgcgccgccgaactggcgcagcaggcgcagacgggcaccatcagcagcaccaaccgcaaggcgctcgacctcgaattccaggtcatatccagcgccatcaacaacgtcgcagaaaatgcggtgttcaactcagtctccgtgttccgcaccaatgccatctacgtagccgtcgccagcttcgaaaagatagacttcaccatcggcacaatggagggtaacgtcaagctttccagcctgagcatcacggacgacaccgccgcgttggccgcccagaagaagctggacgatctgatccagaacgtctccatgcagcgcgccaccatcggctcgcgcatgcagtacatgaacacgatatccaacacgcttggcatccaggtggagaacttcactgcggcgaagagccagatagaggacgccaacattgcggacgaggtcatcagcctgaccaagttccagattctgggccagtccggcaccagtgccctggcgcagtccaaccaggccgcgcagttgatgcttggcctgctccgctag

SEQ ID NO: 30726 - protein, 228 aa, Unknown
  Obtained from environmental sample
  DOMAIN (135)...(206): Bacterial flagellin C-terminus
  misc_feature (1)..(228): Xaa is any amino acid
MASDDAAGLAISNRLGADIRVSTQARRNAQDGLAYMQVADGALEEVTALLTRAAELAQQAQTGTISSTNRKALDLEFQVISSAINNVAENAVFNSVSVFRTNAIYVAVASFEKIDFTIGTMEGNVKLSSLSITDDTAALAAQKKLDDLIQNVSMQRATIGSRMQYMNTISNTLGIQVENFTAAKSQIEDANIADEVISLTKFQILGQSGTSALAQSNQAAQLMLGLLR

SEQ ID NO: 30727 - DNA, 594 bp, Unknown
  Obtained from environmental sample
  misc_feature (1)..(594): n is a, c, g, or t
atgaaagatatatttctgatggggccgaaacactccggtaaaacaaccacgggtaaagcacttgcctcgttattttcatgcgattttatcgacattgacgaattgattttgcaaagaaccggaaaaagcccccgtcagctttttagcgaagactcggctatttttcaaaaagctgaggccgaagctttggcggctctcgtagactcaaacggcagttcggtcggctcattctgcggcgcaaataacataggctgtggtacaaatatcaccggcggtgcagacatagccaaggctaagcggcgtgtaattgccactggcggtggattaattgacaacagtgaagccttgtctatattgaagaaatcaggcgcagtgacgatttacctcgatatttccgccgaaagcgcgtgggatagaatcgccgccggtggggaattaccccccttcctcagaacagaaaacccacgtgagacacaccgcgctttacatgagcggcgggcggcggcttatctgcagattgccaatattgttatcgaaactgagggaaagtcgccacaagaaagagctaccgaaattttttcgcgtttgaattga

SEQ ID NO: 30728 - protein, 197 aa, Unknown
  Obtained from environmental sample
  DOMAIN (7)...(197): Shikimate kinase
  misc_feature (1)..(197): Xaa is any amino acid
MKDIFLMGPKHSGKTTTGKALASLFSCDFIDIDELILQRTGKSPRQLFSEDSAIFQKAEAEALAALVDSNGSSVGSFCGANNIGCGTNITGGADIAKAKRRVIATGGGLIDNSEALSILKKSGAVTIYLDISAESAWDRIAAGGELPPFLRTENPRETHRALHERRAAAYLQIANIVIETEGKSPQERATEIFSRLN

SEQ ID NO: 30729 - DNA, 666 bp, Unknown
  Obtained from environmental sample
  misc_feature (1)..(666): n is a, c, g, or t
ttgcagaaatataacctgcaaaaccgactaattaaggttaatttatctcttgtaaacctttttataggagataatatgcaaaccgcttacaactggcacgtcaccgaaaggtgtaactacaaatgtgaattttgcttcgcaaaatggaacgatccaaatgaaatttggaaagaccaagatgctgttcgcaaaattctaaatgagctttccaacaaagaagtcgtttatcgaaaattcggcggaacggggaagcctatcaggataaactttgcaggaggtgaaccgctaattctttacaaggaatttttagcgattatcaaacttgcaaaggaaatgaagtttgaaacgtccataattaccaatggctcgttcttgaaacttaatcaagacatatatcaatatattgatatgcttggaatttccatagacagcctaaacacagacacttgtcgcanaattggacgttgcgacaatagcggaaaggttctagaaaaggaacaaatagaaaaattgctaattaaagcaagggcagaaaatcctgatatatccataaaattcaatgtgactgtgaataggcataattacaacgaatgtgtagttgagcgattgcaggaatttactccaaacagaaataaaaattctgaggcagctgcctttttcgcataa

SEQ ID NO: 30730 - protein, 221 aa, Unknown
  Obtained from environmental sample
  DOMAIN (32)...(207): Radical SAM superfamily
  misc_feature (1)..(221): Xaa is any amino acid
MQKYNLQNRLIKVNLSLVNLFIGDNMQTAYNWHVTERCNYKCEFCFAKWNDPNEIWKDQDAVRKILNELSNKEVVYRKFGGTGKPIRINFAGGEPLILYKEFLAIIKLAKEMKFETSIITNGSFLKLNQDIYQYIDMLGISIDSLNTDTCRXIGRCDNSGKVLEKEQIEKLLIKARAENPDISIKFNVTVNRHNYNECVVERLQEFTPNRNKNSEAAAFFA

SEQ ID NO: 30731 - DNA, 1017 bp, Unknown
  Obtained from environmental sample
  misc_feature (1)..(1017): n is a, c, g, or t
ttgatggcgagttcagcgaatggcgacatggatatgcagttttatcttcaaagaaaagatgaagcgatttcgaatgtgcaaaacaagataggctcaaacagcaggcttaacaagttaagcgatgatcctatttccgcatcccatgccgtgcgttatgagtcatttttagcgaggcttgaccgttttgaaacaaatacaaagttcgcaatggaacattttaacaacactcatgattatcttaacgaggtaaattccatattgcaaagaatacgcgagcttgctgtaacaggggcgcacggcacctattcagaagatcagcataaaattatggcggtagaggtaaatgagctcttaaaagaacttgtcgccatttccaataaaacaggccccgatacaaagcaggcgttcgcgggcgacaaagtctttacggaacctttccgcattgtagagggaagggtagacggcggcgaagagtcaatgatagtacgcgttgaatacaggggagcgggagcgactcgcagggcggagataaacgatcgtacttttgtggaacttgatataggaggggacgaggcgttttgggctgaaagaatgaagattttttcttcgacagacgctacagattaccgcgtgcagcaggcaggcgctttttttgttgacggtgttgaaatacaagtaacacccggagataccttaccagccattgtagccaaaattaatgattcgtctgctcctgtaaaagcgtacatagatcctgattcaagagggcttgttcttgaaggaacaacgcctcacctgatacgcgccgaagacagcgttgcgggaggagcgactgtgttacgcgatttaggaataataaacggaaatatgcagaataacgctcccaattggagcaataccgcgcgcgttcacggaggttctttattgatatgggtatacgccttanagacggaaatgttaggggagactctgaatttatcggaagccagggaattgcgggaattgatcttgcgttaa

SEQ ID NO: 30732 - protein, 338 aa, Unknown
  Obtained from environmental sample
  DOMAIN (27)...(162): Bacterial flagellin N-terminus
  misc_feature (1)..(338): Xaa is any amino acid
MMASSANGDMDMQFYLQRKDEAISNVQNKIGSNSRLNKLSDDPISASHAVRYESFLARLDRFETNTKFAMEHFNNTHDYLNEVNSILQRIRELAVTGAHGTYSEDQHKIMAVEVNELLKELVAISNKTGPDTKQAFAGDKVFTEPFRIVEGRVDGGEESMIVRVEYRGAGATRRAEINDRTFVELDIGGDEAFWAERMKIFSSTDATDYRVQQAGAFFVDGVEIQVTPGDTLPAIVAKINDSSAPVKAYIDPDSRGLVLEGTTPHLIRAEDSVAGGATVLRDLGIINGNMQNNAPNWSNTARVHGGSLLIWVYALXTEMLGETLNLSEARELRELILR

SEQ ID NO: 30733 - DNA, 363 bp, Unknown
  Obtained from environmental sample
  misc_feature (1)..(363): n is a, c, g, or t
ttggagcaataccgcgcgcgttcacggaggttctttattgatatgggtatacgccttanagacggaaatgttaggggagactctgaatttatcggaagccagggaattgcgggaattgatcttgcgttaagcaataacgcggtaaggatggcggatgtgggaagccgtcaggaacgcgctcaaatggcatgggagaggattaacagggaaataccggatataacaaacatgctgaaccgggaatccggccttgatttagctgacgccgcaatggaattaagagaactccaacttgcgcatcaggcgactcttcaaacggcggcaaaaattattccgccttcattgcttgattttttaaggtaa

SEQ ID NO: 30734 - protein, 120 aa, Unknown
  Obtained from environmental sample
  misc_feature (1)..(120): Xaa is any amino acid
MEQYRARSRRFFIDMGIRLXDGNVRGDSEFIGSQGIAGIDLALSNNAVRMADVGSRQERAQMAWERINREIPDITNMLNRESGLDLADAAMELRELQLAHQATLQTAAKIIPPSLLDFLR

SEQ ID NO: 30735 - DNA, 450 bp, Unknown
  Obtained from environmental sample
  misc_feature (1)..(450): n is a, c, g, or t
gtgaaggtattaacaaaagcatacggaatggttgaggtaaacgagcatcagaaggttacttttccttcgggccttttcggatttgaatccctaaaagactatgtgcttttagacgcagagcagcagcctttttactggttgcagtcgcttgacgaagagaagacggcttttattcttatagacccttttattttccggccagattacgaaatggatattgacaatgaagaactccgcccgattggcataaccgatcctgaaaaagccgtgatatttacaatcgttactgtccccccggataacagcccgatgacagcaaaccttcaggggccgttggtaattaaccgcgacagtcggcttggtgtccaggcggtgctgaccgattccagatggaagacaaagcacgatattttagcggagcttgncgctttaaagcaggaagggcggtag

SEQ ID NO: 30736 - protein, 149 aa, Unknown
  Obtained from environmental sample
  DOMAIN (17)...(140): Uncharacterized BCR, COG1699
  misc_feature (1)..(149): Xaa is any amino acid
MKVLTKAYGMVEVNEHQKVTFPSGLFGFESLKDYVLLDAEQQPFYWLQSLDEEKTAFILIDPFIFRPDYEMDIDNEELRPIGITDPEKAVIFTIVTVPPDNSPMTANLQGPLVINRDSRLGVQAVLTDSRWKTKHDILAELXALKQEGR

SEQ ID NO: 30737 - DNA, 594 bp, Unknown
  Obtained from environmental sample
  misc_feature (1)..(594): n is a, c, g, or t
atgagcggtaccctctttgtattcagcgcggcgagcggtgctggaaaaaccacactcataaatagggttatacccgattttccaaacgtggtgtattcggtttctgcaacaacgcgagaccctcgccctggcgaagtggacggggtgcattatttttttaaaacaaaagaagaattcaaaaagatgattgttcaaaatgaactcattgaatggaatgaggttcatggcaactattacgggacgcccaagttttttgttgagcagaaattagaagagggcagggatgtggctttggacttagatgtttttgggaaaatcaattttgacaagatttatccgcaggcaataggcattttgattttgccgccgagcatggaggatttggaaaagaggttaaaaaccagaggcacagagacaagaaaaaccttgaagattaggttggaaaatgcgaaaaaagagacggattttgctgtcactgagggtaagtatcagcatgttatttacaacggggatttggagattgcggttgcggaactcaagggcataatggaaaaatacagctctttcaagtcctctatccaaagcgggtcttga

SEQ ID NO: 30738 - protein, 197 aa, Unknown
  Obtained from environmental sample
  DOMAIN (38)...(142): Guanylate kinase
  misc_feature (1)..(197): Xaa is any amino acid
MSGTLFVFSAASGAGKTTLINRVIPDFPNVVYSVSATTRDPRPGEVDGVHYFFKTKEEFKKMIVQNELIEWNEVHGNYYGTPKFFVEQKLEEGRDVALDLDVFGKINFDKIYPQAIGILILPPSMEDLEKRLKTRGTETRKTLKIRLENAKKETDFAVTEGKYQHVIYNGDLEIAVAELKGIMEKYSSFKSSIQSGS

SEQ ID NO: 30739 - DNA, 588 bp, Unknown
  Obtained from environmental sample
  misc_feature (1)..(588): n is a, c, g, or t
atggggattgcgggtcaagcccgcaatgacggcaatcctactaacaccttttcaatcaataaaatcccctacctcctcagaagccgcgtccacgatgtcataaacacggcccaaacccaagaggcgcggggcatcttccacgccgccttcttgggcgaaaaggagcacctgcccgaatcgctgaacgccacattccgcaaagccggaataatccacctactggcgatctccggcttccacgccgcgctgctctactccgccgtattcgcgctgctcagcctgcttcacataccgggccgccccaaaacgctcatagcgctagccgcgctttggggctacctgttccttataggcttcatcccctcgctcttccgcgccaccgtcatggccaccctcttatgcgtatccgtaacgctccaacgcaaaaaccacatagtccacacgctcggcatagccggattcttctggctctgcctctcgccgcacagcctcttcgcccccggcttccaactctccttcgccgcgaccgccgggatcgcgatgctgcagccggtacttaacggatcacccgcgcctcggccgatctga

SEQ ID NO: 30740 - protein, 195 aa, Unknown
  Obtained from environmental sample
  DOMAIN (49)...(195): Competence protein
  misc_feature (1)..(195): Xaa is any amino acid
MGIAGQARNDGNPTNTFSINKIPYLLRSRVHDVINTAQTQEARGIFHAAFLGEKEHLPESLNATFRKAGIIHLLAISGFHAALLYSAVFALLSLLHIPGRPKTLIALAALWGYLFLIGFIPSLFRATVMATLLCVSVTLQRKNHIVHTLGIAGFFWLCLSPHSLFAPGFQLSFAATAGIAMLQPVLNGSPAPRPI

SEQ ID NO: 30741 - DNA, 807 bp, Unknown
  Obtained from environmental sample
  misc_feature (1)..(807): n is a, c, g, or t
gtgatcggctctcccatgacgataccctatttttcaactatacgggcccatgcgaaacgcattttacggaataagtttcatattatcgccgacgcggttgaaccgggcgcggatcatgatgtttacaccggccttaacgtggaagagcgcgtggccctggaagagatcaccttgatgggcttccctgttaaaacatggttcatgtttaaaactcttgacgacgcttcgctacccactcttttatcgacaataaaaactctggacggcgagtacttcgccgatttctggactgtccccggctaccttggcgcggataaatacggttcggcggttcgggatcgcatctatcataaaacaaccatacgtgaagttcgccaagccgacacggagcgacagccggttcttgttttgacgaacctgcccgactgtcacggttacacggatggcctggaggcggttttccttaccggggaagccacaggccgccgcatggctgtggaacgcattgaaggcaatgttgttacgctttgccttgggtttgaaccggtttacagcgcggcttgcgtggtaagagatgtcgttaacaaggtaaaggccggtgacgaggtactgctggacaattctgattatctggcgatccagacttaccaccgccatcagattcccgatgaaagctacgaagggtggaaacagttttgccggaaagacggtacgccgctatatccgcagcggtcttttctggtcggaccgcgtatcgcttacaatagcgccggttcaatccatgcggcaaatataaaggaaagatga

SEQ ID NO: 30742 - protein, 268 aa, Unknown
  Obtained from environmental sample
  misc_feature (1)..(268): Xaa is any amino acid
MIGSPMTIPYFSTIRAHAKRILRNKFHIIADAVEPGADHDVYTGLNVEERVALEEITLMGFPVKTWFMFKTLDDASLPTLLSTIKTLDGEYFADFWTVPGYLGADKYGSAVRDRIYHKTTIREVRQADTERQPVLVLTNLPDCHGYTDGLEAVFLTGEATGRRMAVERIEGNVVTLCLGFEPVYSAACVVRDVVNKVKAGDEVLLDNSDYLAIQTYHRHQIPDESYEGWKQFCRKDGTPLYPQRSFLVGPRIAYNSAGSIHAANIKER

SEQ ID NO: 30743 - DNA, 432 bp, Unknown
  Obtained from environmental sample
  misc_feature (1)..(432): n is a, c, g, or t
atgcagttctattgcaggttctgtcagggagatgggcttttcgcaacaacccttgaaactgcggacggaatttttatctccgctcccaattccagccttnggggagtgccgctaaaaaattattcccgcaatccctacaggcgcatggatatttccgtttcaatttcctattcagactcaatagacgaagccttcaaggttctcaataaaattatcagcgaggaaagccgtttcctgaaagaaccgcccagccaggttacggttcagtcccttggagattccggcatcggcatcaccctgagggcatgggtacgtggttcggattattggagcgtgtattttgaacagatgaaaaatgtgaaggagagaatagaaggagcgggcctcaccataccattcccgcagcgggatatacacctgatcaaagcatga

SEQ ID NO: 30744 - protein, 143 aa, Unknown
  Obtained from environmental sample
  DOMAIN (1)...(132): Mechanosensitive ion channel
  misc_feature (1)..(143): Xaa is any amino acid
MQFYCRFCQGDGLFATTLETADGIFISAPNSSLXGVPLKNYSRNPYRRMDISVSISYSDSIDEAFKVLNKIISEESRFLKEPPSQVTVQSLGDSGIGITLRAWVRGSDYWSVYFEQMKNVKERIEGAGLTIPFPQRDIHLIKA

SEQ ID NO: 30745 - DNA, 1590 bp, Unknown
  Obtained from environmental sample
  misc_feature (1)..(1590): n is a, c, g, or t
gtgaacataggcgcggattccatttgcataaaggacatggccggccttcttaaaccgtatgaaggctacgatcttgtaaaagccatcaagaaagtaacggatattcctatcgagattcacactcacgcgactacaggtatgtcggtgtccacccttaccaaatgcgccgaagctggcgcggaaatcctggacacgaccatttcttccatgtccatgggaaccagccacagcccaaccgaaaccatggtggaaattttcaggggcaccgaatacgacaccggtcttgacatcaacctgcttttggaaattgccgcctacttccgcgatgttcgcaagaactacaagaagtttgagtccagttttcttggcgcggacacgcggatcctcttgtcccaggtaccgggtggtatgctcagcaacctggaaagccagctcaaggagcagaacgcttccaacaaaattgatgatgttctaaaagagatcgcgatagtccagaaggatgccggttatccgccgctggttacccccacaagccagattgtaggaacccaggctgtattcaacgtgctctttggtcgttataacaggctttccggggaattccaggatctgatggcaggcaaatacggcgcttgcccggctcccaagaacaaggatgtggtcaagaaagcccttgaagccctcaagatggaaaaagaaattacttaccgccccgccgacgatattccagccgaatacagcaaactcgaaggcgaatgcaaaaccctccttggaaccggcacggttacacccgaggacgtgcttactcttgccatgttcccgaaagtagcgcctgatttcttcaagaaccgctccaagggccctgtggtctttaagcccgagccggaagcggccccggcggcggttgctcccgcagctaaagcaggccaggcagccaaatacagcgttaacgttgacggcgttaattacaacgtggtagtggccccggcgggaacagtggcaattgccccagcgactggcggttcagcggctgttgcggcgcccgctgcagcgacggtagctgcctcaggcggcggaaccgcggttctagcccctgtggcgggaagcgtcatccgctacgcggtagccgaaggcgcgaccgtaaaagcgggggacaacgtcattatcatggaatccatgaagatggagctggaaataaaagccactgcgtccggaaaagttcattttctggttgctgccgggacgacagtcgcgtcccagcagcctatcgctgaaataggcggcgtgccgggcgctgttccggtagcgccggccgtgccggttgcgcccgccgcaccagcggcgcctgtcgcgccggccgctcctgtggccccctcaggcgggactgtagttctcgctccggttgccggaacgattatccgctacgcgacagcagaaggcgcggcagtaaaagccggagacaatgtggtcatcatggaatccatgaaaatggaactggaaattaaagctaccgtggctggaaaggttcatttcctttcaacgcttggcgcgaaagtcgcgtcccagcagccaatcgcggaattgaagtag

SEQ ID NO: 30746 - protein, 529 aa, Unknown
  Obtained from environmental sample
  DOMAIN (462)...(528): Biotin-requiring enzyme
  misc_feature (1)..(529): Xaa is any amino acid
MNIGADSICIKDMAGLLKPYEGYDLVKAIKKVTDIPIEIHTHATTGMSVSTLTKCAEAGAEILDTTISSMSMGTSHSPTETMVEIFRGTEYDTGLDINLLLEIAAYFRDVRKNYKKFESSFLGADTRILLSQVPGGMLSNLESQLKEQNASNKIDDVLKEIAIVQKDAGYPPLVTPTSQIVGTQAVFNVLFGRYNRLSGEFQDLMAGKYGACPAPKNKDVVKKALEALKMEKEITYRPADDIPAEYSKLEGECKTLLGTGTVTPEDVLTLAMFPKVAPDFFKNRSKGPVVFKPEPEAAPAAVAPAAKAGQAAKYSVNVDGVNYNVVVAPAGTVAIAPATGGSAAVAAPAAATVAASGGGTAVLAPVAGSVIRYAVAEGATVKAGDNVIIMESMKMELEIKATASGKVHFLVAAGTTVASQQPIAEIGGVPGAVPVAPAVPVAPAAPAAPVAPAAPVAPSGGTVVLAPVAGTIIRYATAEGAAVKAGDNVVIMESMKMELEIKATVAGKVHFLSTLGAKVASQQPIAELK

SEQ ID NO: 30747 - DNA, 1425 bp, Unknown
  Obtained from environmental sample
  misc_feature (1)..(1425): n is a, c, g, or t
atggccgagattgatcctatttgggtattgaaaggatgcatgatcctgctcgcagccgcctttttgtttaattttgtcggctccgctttttcccccagggctgaggcgcaaaccgccgcgtcaagcgatgagcttccttctttcagaaatatggctggccttatccccaatagccgtgatttgccacggataacccttggtagctttcttgtaaacattgccaggactacagggatatatgcctttttcaccgacataatccagggtgaaactcccgcaggccagaaaataaccgtgttcggctggcatgaacttataatggttctggtcgggtttttggttatttatttgggagcggccaagggctttgaacctctgctgttggtgccaatcggtttcggcattgtttttgccaatatcccattcgcgaacatgggcagcccgggaatctggaacgaagaactccacctttttgagcatcagggttttctcagcgttatttacaacagcggggtagggaacgaattcttccccctgataatcttcattggtataggggccatgaccgatttcggcccgcttatagcaaaccccaaaaccgcccttttaggcgcggcggcccaattcggcgttttcgctagcatgttttttatcagcgttgccaacttcctgccgggagtggcctttaacctgaaagaggcctgcgctgtggcgatcatcggcggcgctgacggccccacaacgatctacatcgcggcaaaactcgccccgcatcttctggcaactgtggcggtagcggcctattcctacatggccctggtaccgctgattcagccgcccattatgagggcgcttacaaccaaacaagaacggctaatcagaatgaggcaattaaggccggttttcaaagcgaaaaaagtcgccttccccatgctggtttttattctcgcgatatttctcattccgcccgctgccccgcttatcggctgccttatgtttggcagttttatacgggaaatcggcgtggtggacaggctctcaaacaccgcccagaacgatttaatgaacgtcgtgtccatgttcctttcccttggtgtaggcagccagatgacccccgaaaagttccttaacccctcttcccttattatcgttgtaatggggcttattgccttttccatcgccacagccggcggtgtactggtggccaagttcatgaacctcttccttaaagaaaaaatcaatccgctcatcggttcagcgggcgtttccgccgtgccgatggctgcccgcgtttccaacagggtcggtcttgaagaagacccgggcaactttatcctgatgcacgccatgggacccaatgtggccggcgtcatcggaaccgccattgcagcgggcgtcatgatcgctgtttacggcgcgcattag

SEQ ID NO: 30748 - protein, 474 aa, Unknown
  Obtained from environmental sample
  DOMAIN (101)...(472): Na+-transporting methylmalonyl-CoA/oxaloacetate decarboxylase, beta subunit
  misc_feature (1)..(474): Xaa is any amino acid
MAEIDPIWVLKGCMILLAAAFLFNFVGSAFSPRAEAQTAASSDELPSFRNMAGLIPNSRDLPRITLGSFLVNIARTTGIYAFFTDIIQGETPAGQKITVFGWHELIMVLVGFLVIYLGAAKGFEPLLLVPIGFGIVFANIPFANMGSPGIWNEELHLFEHQGFLSVIYNSGVGNEFFPLIIFIGIGAMTDFGPLIANPKTALLGAAAQFGVFASMFFISVANFLPGVAFNLKEACAVAIIGGADGPTTIYIAAKLAPHLLATVAVAAYSYMALVPLIQPPIMRALTTKQERLIRMRQLRPVFKAKKVAFPMLVFILAIFLIPPAAPLIGCLMFGSFIREIGVVDRLSNTAQNDLMNVVSMFLSLGVGSQMTPEKFLNPSSLIIVVMGLIAFSIATAGGVLVAKFMNLFLKEKINPLIGSAGVSAVPMAARVSNRVGLEEDPGNFILMHAMGPNVAGVIGTAIAAGVMIAVYGAH

SEQ ID NO: 30749 - DNA, 465 bp, Unknown
  Obtained from environmental sample
  misc_feature (1)..(465): n is a, c, g, or t
atgagttttacaaaaaatatagagttgccgccgggaagcctcgtttatataggggacaggcccgcgttagagatggatttatcaataacaacatatgattcggcatcggcggaattatcgcatttatccacaattgatgaattgtcaaaataccaaaatgactcaaaaatatcgtggataattatcagcggattaaaaaatgttgattccataaaggctttggggaaattatataacattcacccgttaaccattgaagatattctgaataccgaacaacagccaaaagttgaaatatttgagaattatcgttttttatcaatcaagacaatacagcgtgaaaagagatttcatcacaatgaaaataaaaagaaaaaatcagtttatattattcaaaaagaagaagaaaaaatagatgaatttttaattgatcaagttagtatgatagttatgaaaatacactga

SEQ ID NO: 30750 - protein, 154 aa, Unknown
  Obtained from environmental sample
  misc_feature (1)..(154): Xaa is any amino acid
MSFTKNIELPPGSLVYIGDRPALEMDLSITTYDSASAELSHLSTIDELSKYQNDSKISWIIISGLKNVDSIKALGKLYNIHPLTIEDILNTEQQPKVEIFENYRFLSIKTIQREKRFHHNENKKKKSVYIIQKEEEKIDEFLIDQVSMIVMKIH

SEQ ID NO: 30751 - DNA, 561 bp, Unknown
  Obtained from environmental sample
  misc_feature (1)..(561): n is a, c, g, or t
atggattatcttacatacgaaatagttgacgcggttgttgataaatattttctggtgttaaaccatttggaagacgatattgaggattatgaagatcgcgctacaaaaacaaacgatgatatgtttattcaggaactgcaggatacaaaaaaatatcttttaaaaataaaaagagctatttctccgttaaaagataatgtctcgataactttacggcagaataaatttcttttagcggacaaattaaaaccgtttgtacaagacttactggaaaatttacataatgcggaaataattgtggaacattatcgtgagtggttatcaaatataatggacgtaaatttatcggttttgtcgcagcagacgaacaaagtaatgaaagtattggcgattatatcaacgatttttatccctttaacttttattgtaggaatatacggtatgaattttgaatatatgccggaactaacaaaggaatggggttatcctgttgttttaggtttcatgggattaatcgcaatgacaatgatattaacatttaaatttaaacgttggttttaa

SEQ ID NO: 30752 - protein, 186 aa, Unknown
  Obtained from environmental sample
  DOMAIN (1)...(186): CorA-like Mg2+ transporter protein
  misc_feature (1)..(186): Xaa is any amino acid
MDYLTYEIVDAVVDKYFLVLNHLEDDIEDYEDRATKTNDDMFIQELQDTKKYLLKIKRAISPLKDNVSITLRQNKFLLADKLKPFVQDLLENLHNAEIIVEHYREWLSNIMDVNLSVLSQQTNKVMKVLAIISTIFIPLTFIVGIYGMNFEYMPELTKEWGYPVVLGFMGLIAMTMILTFKFKRWF

SEQ ID NO: 30753 - DNA, 777 bp, Unknown
  Obtained from environmental sample
  misc_feature (1)..(777): n is a, c, g, or t
ttgtcagtgaacattaccaacgtgggtaacacgccgacaggtgttcttactgtcgctttaagcggaaccaacgcgggcagtttcacacggaataattcgtcagtcagcagtataggggcagacgctaccgttaacaacgcttttaccgtcaggcccaataccggcctcgcgctcggaacttatacggcgattgttacagtgtcgaacaccgccaacgccattactgcaagctttccggtcagcttcacggtcagcgcccccagctacggcgttacactttcacagaccaacgcttatatcttccccgccgcggataccgggtatacccagcaaagcccgctgactgtaaccgttaccaactcgggcaacgcggcgacaggtaatcttaacgtagctctaagcggaaccgacgcgagcagtttcacgctttcatcaaattcagtcagcagtatagcggtgggaaataccggcagttttaccatcagacccaataacagccttgcccccactaacaaccttgccgcggctacctacaccgcgacagttaccgtgtcgggaagcaatatcacttcgcaaacatttaatgtgagcttcaccgtggtagattcctccgccgtttacattatcagcggcagcggaacacagtttagcgcgaccagaggcggaatacccgtaggaacggccaaccagcccatacagaccgttattacagccatcagaacagccgccaacggaagggacgcggccattcagttcggcaacggtacgacggtatga

SEQ ID NO: 30754 - protein, 258 aa, Unknown
  Obtained from environmental sample
  misc_feature (1)..(258): Xaa is any amino acid
MSVNITNVGNTPTGVLTVALSGTNAGSFTRNNSSVSSIGADATVNNAFTVRPNTGLALGTYTAIVTVSNTANAITASFPVSFTVSAPSYGVTLSQTNAYIFPAADTGYTQQSPLTVTVTNSGNAATGNLNVALSGTDASSFTLSSNSVSSIAVGNTGSFTIRPNNSLAPTNNLAAATYTATVTVSGSNITSQTFNVSFTVVDSSAVYIISGSGTQFSATRGGIPVGTANQPIQTVITAIRTAANGRDAAIQFGNGTTV

SEQ ID NO: 30755 - DNA, 381 bp, Unknown
  Obtained from environmental sample
  misc_feature (1)..(381): n is a, c, g, or t
gtgatcagatcggccgagtcacattgccgccatacggggcttaccccgccaatgatcggcagaaccccggttaatgccattaccgaaaatgcgcaatacagcggaacggtaacgtggaatccaaaccattcaacttttgccgcttcgacgatgtacactgcgaccattaacttgaaggcgaaaaccggctacacattgcaaggcgtaccggctaatttctttaccatctccggagcggattacattgattactacagcggctcctccagtattaacgtcacattcgagccaactaccgccttcggcataccctttcagagtccgagtacacattccccggcgctatccccggttacgcgcagccagaagcgttgtcagtga

SEQ ID NO: 30756 - protein, 126 aa, Unknown
  Obtained from environmental sample
  misc_feature (1)..(126): Xaa is any amino acid
MIRSAESHCRHTGLTPPMIGRTPVNAITENAQYSGTVTWNPNHSTFAASTMYTATINLKAKTGYTLQGVPANFFTISGADYIDYYSGSSSINVTFEPTTAFGIPFQSPSTHSPALSPVTRSQKRCQ

SEQ ID NO: 30757 - DNA, 1461 bp, Unknown
  Obtained from environmental sample
  misc_feature (1)..(1461): n is a, c, g, or t
gtgctcgccctgaagatggcggcttacgccaatggcgtcgccaaattgcacggagtggtttcccgcgatatgtggcagggcctctggccgggagttccgataaacgaagtccctataggccatgtcaccaacggcgtgcacccccgcacctggatttccagcggcatgatcgagcttttggaccgctattttggcccccattttgagaacaagccgacggatctgtcggtttgggagcgcatgagcagaatcagcgacgaggaattatggcgtacccatgaacgccgccgtgaacggctggttgtctttgtccgcgaacgcatacgcgaacagtacaagcgcaccggcgcggtggaacgccgcatccagcaggcggaagacgccctttctccctatgcccttaccctgtgctttgcccgccgctttgctacctacaagcggggtaatttgctgctgcgcgatccggaacggctcttgcggctggtaagggacaacgaccgccccattcagttaatattcgccggcaaggcccacccccacgacatgcccggcaaggacattatccgcgagatcgtccattttgccgaaaggtacgatgtcacgagccgcattgtgtttgtagaaaattacgacatgagcgtcgcaaaatatttaacatccggcggcgatgtatggcttaatactccccgtcgtcccatggaagcatccggtacaagcggtatgaaggcggcgatgaacggcgttcttaactgttcaattttggacggctggtgggacgaagcgtataatgccgaagtcggttgggcaatcggtcatggcgaacagtacaacgatgaaaggcttcaggacgatattgaaagtaaggctttatatgatttactggaacgtgaaattattccgatgttctacgacagaggccgcgacggtcttccgcgcgaatggataaaaatgatgaaagactgcatgaaacaaatcgggcagtccatggcgtctcaccgtatgttgatggattactcaaatcaattttacttccccgcgcttaaaaatttccgccgtttcagcaaagacaattattcagaagcaaaatcacttgcgacatattttaacaaactacaacagtcatgggctaatttaaaaattgttaaaattgattccaactccaagccggttatgcaacgcggcgatatgctgactgtaacagcttatcttgatttgggtagtatttcccctaatgacttgcaggttgaattgtaccacggcacggtgtcgaaccagaccagggaaattgccgatgcgagaaaaacagaaatgaagtggctcanaagcgaaggcaatttgaatctgtatcaggttcgcattgaatgtgtggatacgggaatgcaaggtcacacggtacgtattatgccaaagcacgacgcgttgatacacccgtacaggtgcggctttattaagtgggcataa

SEQ ID NO: 30758 - protein, 486 aa, Unknown
  Obtained from environmental sample
  misc_feature (1)..(486): Xaa is any amino acid
MLALKMAAYANGVAKLHGVVSRDMWQGLWPGVPINEVPIGHVTNGVHPRTWISSGMIELLDRYFGPHFENKPTDLSVWERMSRISDEELWRTHERRRERLVVFVRERIREQYKRTGAVERRIQQAEDALSPYALTLCFARRFATYKRGNLLLRDPERLLRLVRDNDRPIQLIFAGKAHPHDMPGKDIIREIVHFAERYDVTSRIVFVENYDMSVAKYLTSGGDVWLNTPRRPMEASGTSGMKAAMNGVLNCSILDGWWDEAYNAEVGWAIGHGEQYNDERLQDDIESKALYDLLEREIIPMFYDRGRDGLPREWIKMMKDCMKQIGQSMASHRMLMDYSNQFYFPALKNFRRFSKDNYSEAKSLATYFNKLQQSWANLKIVKIDSNSKPVMQRGDMLTVTAYLDLGSISPNDLQVELYHGTVSNQTREIADARKTEMKWLXSEGNLNLYQVRIECVDTGMQGHTVRIMPKHDALIHPYRCGFIKWA

SEQ ID NO: 30759 - DNA, 870 bp, Unknown
  Obtained from environmental sample
  misc_feature (1)..(870): n is a, c, g, or t
atgaaaactgccagctttgttcacgagagtcttattaaagaagaatacatcgctggtgacaaactaaccaagaaatactacgaggatagaaagaacggtaagataaccgtaccagaaaagattagtgatcttgttgcggacgttgttgcagtattggattccgttgatgaaccaactgccatcatgcctgaaaatgctcgtaaaaataccattgaggccaagttggacaagaaaaaattcgaaatgttcagagaattatggtcacgtatcaacagtaagagttattatatcgtgaaatttgacgatgatgagctggtagaaaaatccgtcaaaaaattgaatgccgaattatacgtaacgccgattaaatataaggttgtgataggttggcagaaagaggacataaaatccaaggtgcaacttgaagtgggcgatagctttgagcgtaaaaaggcgtaccacgatgataccgtttctcacgctataattaaagcaagttcttctgttcaatacgatctcgtcggaaagattgtcaatgaaactgaattgacgcgaaaagtagtggtaagtattttgagaaggttggaaaaaaacatatttgacaaattcggcgataatcctgaagagtttattcttcgcgccgctagaatcatcaatgaacagaaagccacagtgattattgagcatatcacttacaacaaaacggacaacaagttcgaagagaacatatttaccgaacctgaatggaaaaaaggatgtcttggagtgaacgctatagcggcggaacgccacctgtacgactatgttatctatgattcccatgttgagcgcagttttgctaaagagttagacgagaatcaaaaagagtaa

SEQ ID NO: 30760 - protein, 289 aa, Unknown
  Obtained from environmental sample
  misc_feature (1)..(289): Xaa is any amino acid
MKTASFVHESLIKEEYIAGDKLTKKYYEDRKNGKITVPEKISDLVADVVAVLDSVDEPTAIMPENARKNTIEAKLDKKKFEMFRELWSRINSKSYYIVKFDDDELVEKSVKKLNAELYVTPIKYKVVIGWQKEDIKSKVQLEVGDSFERKKAYHDDTVSHAIIKASSSVQYDLVGKIVNETELTRKVVVSILRRLEKNIFDKFGDNPEEFILRAARIINEQKATVIIEHITYNKTDNKFEENIFTEPEWKKGCLGVNAIAAERHLYDYVIYDSHVERSFAKELDENQKE

SEQ ID NO: 30761 - DNA, 333 bp, Unknown
  Obtained from environmental sample
  misc_feature (1)..(333): n is a, c, g, or t
atgtatagcgatataagaacaccagtatcaaactcaaagccgctgagcgacacagttcagccgcttaaccccggcattgacccaaaacgcatgggcccccaaaaggcagatgcgcccaaatttgacgaaatgctaaaaggatttttaacagacgtaaaccatatgcaaaactacgccgacgagtccattcaaaaaatggtagccggagaaatcaaggatgttcaccaagttatgcttgcagttggcgaggcaaaggttgcttttaacctaatgctggaaatccgcaataaaaccatggatgcctacaacgagcttatcaaaatgcgtggttaa

SEQ ID NO: 30762 - protein, 110 aa, Unknown
  Obtained from environmental sample
  DOMAIN (17)...(110): Flagellar hook-basal body complex protein FliE
  misc_feature (1)..(110): Xaa is any amino acid
MYSDIRTPVSNSKPLSDTVQPLNPGIDPKRMGPQKADAPKFDEMLKGFLTDVNHMQNYADESIQKMVAGEIKDVHQVMLAVGEAKVAFNLMLEIRNKTMDAYNELIKMRG

SEQ ID NO: 30763 - DNA, 1491 bp, Unknown
  Obtained from environmental sample
  misc_feature (1)..(1491): n is a, c, g, or t
ttggaagaaggcgtccgtaccatggagcgggaaatggaagaacgccgggaagcggcggataagtatgaccgtgaaatggaggaaaaactactccacagcgacaaacagtttgagaaaattcttttggaagccattgatcgggcgggcatccgggcagacaaggctgaagaagcggcagtcgccaaactccgcgatcaggcgcaggaacggctgactctgattaaaaccagttttgaagaaaaaattaaatccgttcaggataccatcaaagtaaaactcgctgagattcaggaacaggtcaagagcaaccgcgaagaatggaaagccgaaacctccgccattgagacccgccagaaaacatacagcgccgactggaaaaaagacatgcaggaacttaacctcttcgcgaaacaacagcaggacatctggaataaggatattgaggaacttaacctctttgtaaaacaacagcaggacaactggaataaggagattgatgtattaaacgtcctcgcccggcagcagaaagaacaatggaacagggatatgcaggaatttaccgcccgtgcgcagcagcaggcggaaaacctgggcgcggcaatacagaagcaaaaggaagaactgggcgaagcggtcaaaaaacagcgggaagaatggcaaaccatgtcccgcgataccggacgggagataatcgccgccgctgatgaaaccatcaaaacaaaactcgctgaaattcaggagcaggtcaaaaacagctacgaagaatggcaaaccggaaccgccgctatcgaagcccgccagaaggcatacagcgccgactggaaaaaagaagtgcaggagcttgccgcttttgcccggcagcacaaagatcaatggaacaaagagatacaggaatatgccgacattgcgcggcagcaggcggaaagtctgatcacggcgatacagaggcaaaaagaagaatttggcgaaacgctcaagaaacagcgggaagaatgggaagccgccgcccatgataccgggcaggaaatcataaactcagcccaggatcggattgaagaataccgccaggcgcaggaagaacaattcaggcagcttgccggcattgccaatgacgccgcccatctggaaattgaattgcggcgctccatgcaggacgcaatgaaccgcgtcaacggcgactttgccgtgtttgggcaggaaacgcgcaatacctgggaaaacgcgtccgctgaatttaacggccacctgcaggttctgcgggatgaactgtcgggcatagaccgggaacttaccggaatcaaggaaaaagccattgaaaatgtttcccaaaaaattaagatcttcgaagacgaattcctggcggatctcagcaagcggaacgccgtaatagaccagcagcttgccgcctggcaggaggcgctggacaaacggctggaatcaatcgccgcggattccgaaaccaacggcaaaaaccgagactctcattattga

SEQ ID NO: 30764 - protein, 496 aa, Unknown
  Obtained from environmental sample
  misc_feature (1)..(496): Xaa is any amino acid
MEEGVRTMEREMEERREAADKYDREMEEKLLHSDKQFEKILLEAIDRAGIRADKAEEAAVAKLRDQAQERLTLIKTSFEEKIKSVQDTIKVKLAEIQEQVKSNREEWKAETSAIETRQKTYSADWKKDMQELNLFAKQQQDIWNKDIEELNLFVKQQQDNWNKEIDVLNVLARQQKEQWNRDMQEFTARAQQQAENLGAAIQKQKEELGEAVKKQREEWQTMSRDTGREIIAAADETIKTKLAEIQEQVKNSYEEWQTGTAAIEARQKAYSADWKKEVQELAAFARQHKDQWNKEIQEYADIARQQAESLITAIQRQKEEFGETLKKQREEWEAAAHDTGQEIINSAQDRIEEYRQAQEEQFRQLAGIANDAAHLEIELRRSMQDAMNRVNGDFAVFGQETRNTWENASAEFNGHLQVLRDELSGIDRELTGIKEKAIENVSQKIKIFEDEFLADLSKRNAVIDQQLAAWQEALDKRLESIAADSETNGKNRDSHY

SEQ ID NO: 30765 - DNA, 726 bp, Unknown
  Obtained from environmental sample
  misc_feature (1)..(726): n is a, c, g, or t
atgtttttttatcttcccccggaacgctggcatccgcctgtttgccttgacggccatgaagcgcggcatgtcacgcaagtgttgcgtcgtgtgccgggcgcggtggtgcgcctgcttgacggcgccggtcgcgagggcgtgttccgcatcgcggctgtccgcaaagggcgcgtggaacttgccctgctttccgaaaagacgcaccctgtgcccgagtgccgggccattgtggccgttgcctggagcaaggccgtccggcgcggtttttttctggaaaaggccgcggaactcggggcggccgaactgtggtgctggcaggcgcggcgcagccagggccgcatgccggacgacgtgtatgaacactggcaaggcccgcttgcggccggattgaagcaatgcggcaatccctacctgcctttggtgcgtgttttttccgggggcgtgaacgaactggcgcttcacgcgccggagcatccgcgcattttgttgcaggaaccgggcgcggactgccccatgctcgaccttgcccaagtcggacggaaaggtgatactgtgtacgtcatcgggcctgagggcggtttcgacccgcaggaacgggaaacgctgatcaaggcgggctgtatgcccgcaagcctcggcgaacgccccctgcgttgggaaactgccgcgctgatgtgtttgagcctgcattgcttttgttccgcctccggcggccgggaggcgtga

SEQ ID NO: 30766 - protein, 241 aa, Unknown
  Obtained from environmental sample
  DOMAIN (14)...(232): Protein of unknown function (DUF558)
  misc_feature (1)..(241): Xaa is any amino acid
MFFYLPPERWHPPVCLDGHEARHVTQVLRRVPGAVVRLLDGAGREGVFRIAAVRKGRVELALLSEKTHPVPECRAIVAVAWSKAVRRGFFLEKAAELGAAELWCWQARRSQGRMPDDVYEHWQGPLAAGLKQCGNPYLPLVRVFSGGVNELALHAPEHPRILLQEPGADCPMLDLAQVGRKGDTVYVIGPEGGFDPQERETLIKAGCMPASLGERPLRWETAALMCLSLHCFCSASGGREA

SEQ ID NO: 30767 - DNA, 303 bp, Unknown
  Obtained from environmental sample
  misc_feature (1)..(303): n is a, c, g, or t
atgggcgacctgatggagaccttcgccgacactgcgttctcgatagacagcatggacatggtggtcacggttgacacctctgcggcccacattgcaggtgcgctggggaagcccaccatgcttatgctgcccttccgcggcgaatggcggtggctggaggacagggacgacagcccctggtacccaacgatgcgcctgtgcaggcagacccgcgccgggcactggtcagatgtcgtggcgaccgtggccgctttactagccccaacatcggccgcaagccgaaagtggcggatacagctataa

SEQ ID NO: 30768 - protein, 100 aa, Unknown
  Obtained from environmental sample
  misc_feature (1)..(100): Xaa is any amino acid
MGDLMETFADTAFSIDSMDMVVTVDTSAAHIAGALGKPTMLMLPFRGEWRWLEDRDDSPWYPTMRLCRQTRAGHWSDVVATVAALLAPTSAASRKWRIQL

SEQ ID NO: 30769 - DNA, 897 bp, Unknown
  Obtained from environmental sample
  misc_feature (1)..(897): n is a, c, g, or t
ttggcttatgccgcaggcatgggaattgatgttacatctgatcttgccgattttaccaacgcccaggaaaaaacccggcaagaaaaagccatacaggaaacggcggcaagcttggcagaaaaattcgggacgcttgccattgagactgacccagaaaaacagaaggcaatcattggagatatacaaccggtatatgatcgcttaaaaaagacagaaccaacatatacgaaaataatcacttcaaaagcgctcatgcagaaaccgttcccgccccgtaaatgggtagttgaaaatcttataggccgcccagggcttaccattctctccggggctccgaaaatcggtaaaagctggctgctatacgcgcttgacgaggcggcatctacaggcgggaagtttcttggcttttacaccgtaaacaaaacaccggtattgcatttatcgtttgaagataaagaacaggacataaaagaacgcagggggatactggcaaagaaacaagaagggagctttaacggaaatgacaatttattcattgctacagaatgggaaaacgggccggacgggcttgaagcctatttaagaacgcataacgaaattaaatttgtaataattgacaccttgggacagtttatgccggacaccgagaatatgaacgattacacccccgcagtaaaagccatgtcaagaattaaacgaatggcggacagtttggacgtagccattttagtagttcatcacacaaggaagggaaagcgtaaagaggaatatcaaggggaacgggaggattcaaagcctggagtagccataggcattgtagcatcggcagataccgtaattgttttacagcgggatattgaaaaatcaacagaatatatacagacaaaacaggtatga

SEQ ID NO: 30770 - protein, 298 aa, Unknown
  Obtained from environmental sample
  misc_feature (1)..(298): Xaa is any amino acid
MAYAAGMGIDVTSDLADFTNAQEKTRQEKAIQETAASLAEKFGTLAIETDPEKQKAIIGDIQPVYDRLKKTEPTYTKIITSKALMQKPFPPRKWVVENLIGRPGLTILSGAPKIGKSWLLYALDEAASTGGKFLGFYTVNKTPVLHLSFEDKEQDIKERRGILAKKQEGSFNGNDNLFIATEWENGPDGLEAYLRTHNEIKFVIIDTLGQFMPDTENMNDYTPAVKAMSRIKRMADSLDVAILVVHHTRKGKRKEEYQGEREDSKPGVAIGIVASADTVIVLQRDIEKSTEYIQTKQV

SEQ ID NO: 30771 - DNA, 1473 bp, Unknown
  Obtained from environmental sample
  misc_feature (1)..(1473): n is a, c, g, or t
atgtaccttaaacgcccggatattatctatacaggcagaactctgttcggcgcaaggccgccgaaagggcaggagcttgaggatcactatttcggtactattaaaccgcgcgtatccgcttttatgaaagaacttgatgaagaactctggaaacttggggtaaacgccaagaccaaacataacgaagttgctccggcccagcatgagcttgcgcctatcttttcaacgacaaatatcgccaccgaccacaaccagctgacaatggaactgatgaagagcatagcgaacaagcacggtcttgcctgtctgcttcacgaaaaaccgttcgccggagttaacggcagcggcaagcacaacaactggtcaatcagtaccgacacaggcattaacctgcttgagcccggcgataccccgaacgacaacgctcagttccttctgttccttgtcgcggtaatcaaagccatagacgaatatcaggaccttttgcgcgtatcagtcgcaagcgcgggaaacgatcacaggcttggcgcgaacgaagcgcctcccgccatcgtgtccatgttcctcggcgaagaattaactgaaattattgaagccattgaatccggcaagggttataaaaacaaagaaaaactcgacatggaaataggcgtatccgtcctgccgcacttccccaaagatacgacagaccgcaacagaacgtctcctttcgcgtttaccggcaacaagtttgaattccgcatggtcggctcggcgttctcaatcggcggcccgaacatcgtattgaacacaattgtagccgagtctctcagtcagttcgcggacgctcttgaaaaatctaagaactttaagggagacctcgcggcgttaatcaagaaaacaatcagcgatcacaagcggattgtttttaacggcaacaactacgccgaggaatgggtggtcgaagcgcaaaggcgcggactttccaacctaaaaaccacagtagacgcgcttccggaatttatttccaaaaagagcatcgaactgtttaccaaacaccatgttttttccgatgtggaaattcactcacggtatgaaatccttatggaagcatactgtaaaacagtccatatagaagcgcttactatggttgatatggtcaagggagatattttcccggccagcgtaggctaccagaaagatttgacgaagcttttgcagcagaaaaaagcgttgggttattatgattcatcgctggaggaacatttgataagtaatatttcaaaactgtccgccagcctgctcaagaaattaactgatttggaaaacgcgcttctgcagacaaaagaagaaagggacattgtaacccacgcgcgtttttaccgcgagaaagtttttgccgcgatggtggaactgagaatcgatgttgacggtctgaaacattggtggcaaagaagtattggccgttccgacttacgacagatgctcggctaa

SEQ ID NO: 30772 - protein, 490 aa, Unknown
  Obtained from environmental sample
  DOMAIN (2)...(251): Glutamine synthetase, catalytic domain
  misc_feature (1)..(490): Xaa is any amino acid
MYLKRPDIIYTGRTLFGARPPKGQELEDHYFGTIKPRVSAFMKELDEELWKLGVNAKTKHNEVAPAQHELAPIFSTTNIATDHNQLTMELMKSIANKHGLACLLHEKPFAGVNGSGKHNNWSISTDTGINLLEPGDTPNDNAQFLLFLVAVIKAIDEYQDLLRVSVASAGNDHRLGANEAPPAIVSMFLGEELTEIIEAIESGKGYKNKEKLDMEIGVSVLPHFPKDTTDRNRTSPFAFTGNKFEFRMVGSAFSIGGPNIVLNTIVAESLSQFADALEKSKNFKGDLAALIKKTISDHKRIVFNGNNYAEEWVVEAQRRGLSNLKTTVDALPEFISKKSIELFTKHHVFSDVEIHSRYEILMEAYCKTVHIEALTMVDMVKGDIFPASVGYQKDLTKLLQQKKALGYYDSSLEEHLISNISKLSASLLKKLTDLENALLQTKEERDIVTHARFYREKVFAAMVELRIDVDGLKHWWQRSIGRSDLRQMLG

SEQ ID NO: 30773 - DNA, 630 bp, Unknown
  Obtained from environmental sample
  misc_feature (1)..(630): n is a, c, g, or t
ttgtgcgagcactaccgcgacaagatcgccggggcgtccatcatcgccaacccgggttgctacgtgaccagcgttctgctgccgctgctgccgctgtacaagggcggggtgccgattgattgggtgatcgccgactctaagtccggcgtgagcggggcggggcgcgggctgaagcagagcacgcactttccggaggccaacgaaaatttcagcgcgtactctataggacacaagcatcggcacacgccggagatagagcaggagctatcggttgcggccgggaggcccgtgacgataaccttttcgccgcaccttttgccggtgaacagggggatattgtcaacgatatacataaagacggagagcggcgccgcggagtgcggagatatagttaagaagttttacgccggttccgatttcgtgagaataagagaggcgtctgatttgccgcagatatcctccgttgtccatacgaattattgcgacatagcctttacgggcggcggcggcggacagccggtgatcgcggtatcggcgttagataacttagtgaaaggggcaagcggtcaggcgttgcagaatatgaatataatgttcggactgaaggagagcgcggggcttttgagatag

SEQ ID NO: 30774 - protein, 209 aa, Unknown
  Obtained from environmental sample
  DOMAIN (29)...(185): Semialdehyde dehydrogenase, dimerisation domain
  misc_feature (1)..(209): Xaa is any amino acid
MCEHYRDKIAGASIIANPGCYVTSVLLPLLPLYKGGVPIDWVIADSKSGVSGAGRGLKQSTHFPEANENFSAYSIGHKHRHTPEIEQELSVAAGRPVTITFSPHLLPVNRGILSTIYIKTESGAAECGDIVKKFYAGSDFVRIREASDLPQISSVVHTNYCDIAFTGGGGGQPVIAVSALDNLVKGASGQALQNMNIMFGLKESAGLLR

SEQ ID NO: 30775 - DNA, 753 bp, Unknown
  Obtained from environmental sample
  misc_feature (1)..(753): n is a, c, g, or t
atggcagactcagtaggaatggcggtaataaagatcggcggttcaaccgtagacactcccgggctcttggaagagttcgcccggagcgtcgagaatttccagcacaaccacctcccgatcatcgtgcacggcgggggcaaggatattgctcggcagcttgacaaactgaataaggagtctgtctttgtggaggggatgcgcgttaccgacgcggaatctatgcgggttgttcagatggtgctctccggggacgtcaacaagcgcatagtgcacgagctggtaaagaggaatgtcccggcgctgggtctgagcggggtcgacggcgggttgctgatagccaccaagatgctggtgaacggtcaggacataggctttgtgggggaaatcggcgtagtgagggacgagataatccgggccctgttttcggtcggctacatcgccgtcatatcgccggtttcgcacggtctgcacggggatatctacaacgtcaacgctgattcggcggcgagcgacgtctccagggtaatgaaggtcggagacctgatcttcatctccgacgtgccgggcgtgaagatcggcggggcggtgcggaaggttatacgggtatcggagatagagggcctgatagagtccggcgaagtcaccggcgggatgattcctaagctgcgttcggcggcgtcggctgtggaggccggggtggccagagtgcatatctgcggatggacgggcctactacgctcttggacgagatga

SEQ ID NO: 30776 - protein, 250 aa, Unknown
  Obtained from environmental sample
  DOMAIN (6)...(240): Amino acid kinase family
  misc_feature (1)..(250): Xaa is any amino acid
MADSVGMAVIKIGGSTVDTPGLLEEFARSVENFQHNHLPIIVHGGGKDIARQLDKLNKESVFVEGMRVTDAESMRVVQMVLSGDVNKRIVHELVKRNVPALGLSGVDGGLLIATKMLVNGQDIGFVGEIGVVRDEIIRALFSVGYIAVISPVSHGLHGDIYNVNADSAASDVSRVMKVGDLIFISDVPGVKIGGAVRKVIRVSEIEGLIESGEVTGGMIPKLRSAASAVEAGVARVHICGWTGLLRSWTR

SEQ ID NO: 30777 - DNA, 333 bp, Unknown
  Obtained from environmental sample
  misc_feature (1)..(333): n is a, c, g, or t
atggaagcggctcttttggtattaaaatccgagattgtcaataaattaattgccagcaatgaagattttaaagaaattatggaaggtgaagagccaaaggatctcgccgatatcgcatccgatgatatggacaggaaaatgatcgaagccatcggcactcaggaattaaaacagcttaaattgattgaatccgccattacccgcatcaagcagggcaagtacggtcactgcataaaatgcggcaaaagaattcctcaggaccgtctgatcgcgattccctacgccctcatgtgcattgaatgtaagtccgaggaagaacggcgcaacagataa

SEQ ID NO: 30778 - protein, 110 aa, Unknown
  Obtained from environmental sample
  DOMAIN (39)...(109): Prokaryotic dksA/traR C4-type zinc finger
  misc_feature (1)..(110): Xaa is any amino acid
MEAALLVLKSEIVNKLIASNEDFKEIMEGEEPKDLADIASDDMDRKMIEAIGTQELKQLKLIESAITRIKQGKYGHCIKCGKRIPQDRLIAIPYALMCIECKSEEERRNR

SEQ ID NO: 30779 - DNA, 564 bp, Unknown
  Obtained from environmental sample
  misc_feature (1)..(564): n is a, c, g, or t
atggcaaaaaaagcgattgtattattggcagacggttttgaagatgtcgaagcggtaacgccgattgactatctgcgccgcgccggaatagaagttaccaccgtgtcaatttctgatagtttgaccgtaacaagcaagtggggcggcattaaaataattgccggcgctgtgctgacagagattgtcaaacagggaaccggcggctgggacgcggtaattgctcccggcggaatgcccggttcggcaaatctggcggcttccaaagagacaggcgctctcctaaaaaaaatggcggcagacggaaaattgatctgcgcgatttgcgccgcccccgctcttgtactcgccccgcttgacttgcttgccgggaagaaatttacctgctaccccggcatggaagaaaaagtaacagatggcaaatggtcggacgaccgcgttgtaacggacggcaatgtaatcaccagccgaggcgcgggaacagcgggcgaatttgcggtcgcgataattgaaaaattactggataaagccgccgcgcaaaagttggcggagacggttttattgtaa

SEQ ID NO: 30780 - protein, 187 aa, Unknown
  Obtained from environmental sample
  DOMAIN (31)...(173): DJ-1/PfpI family
  misc_feature (1)..(187): Xaa is any amino acid
MAKKAIVLLADGFEDVEAVTPIDYLRRAGIEVTTVSISDSLTVTSKWGGIKIIAGAVLTEIVKQGTGGWDAVIAPGGMPGSANLAASKETGALLKKMAADGKLICAICAAPALVLAPLDLLAGKKFTCYPGMEEKVTDGKWSDDRVVTDGNVITSRGAGTAGEFAVAIIEKLLDKAAAQKLAETVLL

SEQ ID NO: 30781 - DNA, 567 bp, Unknown
  Obtained from environmental sample
  misc_feature (1)..(567): n is a, c, g, or t
atgcaaaatacaaaatcgtctgtctgtacattcataggcattggaataaaagttgaaattcctgaaacaacgaaatttgatctgcctgatcctatcgtatgcgggggtatctcttatacagaacttggttttaattataacgcttataaagggtacgcccccgatggcggcacggcgttgaccaccgcatttataggtgatacatatgatttttggaagaaggcgaaagatgagggaaggtatgaagctgaaaaacaattgcttgcggaacagatcagacgcgccatttgcgctaaatatccgcaagctgaaggtaacatagaagtcattgatattgccacaccgctcacttatgaacgttatacaggcgcatatcacggttcatggatgagtactatgaataaaggtgacaaacaaaaactatactcgggttttttaaagagtattaaaagtttgtattttgctggacatcgaatgatgcctccgggcggtttgcctgtagcgcttctatcaggtcgcacagcagcccagatggtgtgcaggcagtttgatatggagtttatataa

SEQ ID NO: 30782 - protein, 188 aa, Unknown
  Obtained from environmental sample
  misc_feature (1)..(188): Xaa is any amino acid
MQNTKSSVCTFIGIGIKVEIPETTKFDLPDPIVCGGISYTELGFNYNAYKGYAPDGGTALTTAFIGDTYDFWKKAKDEGRYEAEKQLLAEQIRRAICAKYPQAEGNIEVIDIATPLTYERYTGAYHGSWMSTMNKGDKQKLYSGFLKSIKSLYFAGHRMMPPGGLPVALLSGRTAAQMVCRQFDMEFI

SEQ ID NO: 30783 - DNA, 774 bp, Unknown
  Obtained from environmental sample
  misc_feature (1)..(774): n is a, c, g, or t
atgaaactgctgctggtatttgccgctgatgacaactgcaatatcatctccagaagcataagcccgcttggttttgaaatgatccgttaccgccaggtgcttaaagcaatggacaacattaatgagataaatccctcagccattgtcgtaagcgcgagggattttccccggcattggaagtttcttgtccagtttgtacgcacggaacgggcgaatgagatatgccccattgtcatcctgaaaggcggaaacttcagtacggaggaaacgacaagcgcgtattttctcggagtcagcggggtaatagacgactcgctgaacagtccggcggagattaaccgccttaaaaatatcctgagccattgcgcgccaaatggcgcgacgcctaatggcgcgacgcctaatggcgcgacgcctaatggcgcggcgccattggaggaaaagagaaaacaccgccgtttccatgtggaaccctggcaccgcgcatgtatgcttgccgtanaccgccgtgataaatcgcttgtcaccggagacgtggaaaacatttcatcaggcggcctaacctttgttcccgccaattccccgcaaattggggaagcctcgttgaacgatgaattcagcgagtgcagcctgcgccttggcgattccatcctctcgcccgtctgccgcctagtccgcgccggcgaaaaacccgcgtttgagttcacgtcgtttttagaaagcgaacaacagacattcgagcgatttataaatcagttagcgatgagcaactag

SEQ ID NO: 30784 - protein, 257 aa, Unknown
  Obtained from environmental sample
  misc_feature (1)..(257): Xaa is any amino acid
MKLLLVFAADDNCNIISRSISPLGFEMIRYRQVLKAMDNINEINPSAIVVSARDFPRHWKFLVQFVRTERANEICPIVILKGGNFSTEETTSAYFLGVSGVIDDSLNSPAEINRLKNILSHCAPNGATPNGATPNGATPNGAAPLEEKRKHRRFHVEPWHRACMLAVXRRDKSLVTGDVENISSGGLTFVPANSPQIGEASLNDEFSECSLRLGDSILSPVCRLVRAGEKPAFEFTSFLESEQQTFERFINQLAMSN

SEQ ID NO: 30785 - DNA, 336 bp, Unknown
  Obtained from environmental sample
  misc_feature (1)..(336): n is a, c, g, or t
atgaaatacgggcaggtaaaaaccgagaagatgtattttaccagcaacgaagcctctaaaatagtaggcgttcctatcagcgttttgcgctcgtgggaaaaggaatttcccgcttttaatccaaaaaaaaatagggcaggcaaacgaatgtacagccacagcgatattgagatagcaaaaaaaatcaaaagcgatgcaaattatgacccagcaaaagaacccagaaaaaaaacatctcaattaaaagcggttaaaagcaaacttgtgatggacaaaaattctctgctaaaaatcagaagcaacctgcaaagtgtcttgaataaaataaagaagtga

SEQ ID NO: 30786 - protein, 111 aa, Unknown
  Obtained from environmental sample
  misc_feature (1)..(111): Xaa is any amino acid
MKYGQVKTEKMYFTSNEASKIVGVPISVLRSWEKEFPAFNPKKNRAGKRMYSHSDIEIAKKIKSDANYDPAKEPRKKTSQLKAVKSKLVMDKNSLLKIRSNLQSVLNKIKK

SEQ ID NO: 30787 - DNA, 342 bp, Unknown
  Obtained from environmental sample
  misc_feature (1)..(342): n is a, c, g, or t
ttgctcaacaaagaaagcgggcttcttggtctcagcaaaatctccagcgatatgcgagtgcttttggaaaatgcggacagaggcgaggaaagagcaaagatagccatagaggttttttgctaccgcgctgcaaaggaaattgcatcgttaatgcccgcgctccccagactggataaccttgttttcacaggcggaataggtgagaactccgagcctgttcgcgaaaaaatattatcccatttaaaaattttcaaattcggcgaaggcggtccgcaggttatggttgttccaaccaacgaagaacttttaatagcaatggataccgaggctgttttaaaatga

SEQ ID NO: 30788 - protein, 113 aa, Unknown
  Obtained from environmental sample
  misc_feature (1)..(113): Xaa is any amino acid
MLNKESGLLGLSKISSDMRVLLENADRGEERAKIAIEVFCYRAAKEIASLMPALPRLDNLVFTGGIGENSEPVREKILSHLKIFKFGEGGPQVMVVPTNEELLIAMDTEAVLK

SEQ ID NO: 30789 - DNA, 741 bp, Unknown
  Obtained from environmental sample
  misc_feature (1)..(741): n is a, c, g, or t
gtggcgactaccgtgcaggccaacatagacttttcgaattttctggcccatctgtaccagcgcgacggcagactgtacaacgagaacggctcccgcactctgctgtccgaagagacatccattgaggcgtttgacgtctacacgaaattttttacccattacaaaacaccggcggtgtatgattttctcaaccgtttccgcaccggcgagatgcccctcgctttcgccgattacaccaactttaacacgctggaagtttttgcgccggagctgcgcggcctttggggtttcgcccgtatgcccggactccgcagaaaggacggcagcgttaaccgttcggtgccgacgggaacgctggcctcgatgattttttccaacgcgaaaaaaccggaacttgcctgggaatttttaaaatggtgggtcagcgccgatacccagctccgttttggccgcgagcttgaaagcgtcatgggcgcggcggcgcgttatcccacggcgaattatgacgcttttacgcggctttcctggggctcggagcaaatggcggtgctcaaggaacagcgcgcatggacggtgggtacgccggaagtgccgggcggttactacgtcagccgtcatataaccaacgcggtgcgccgcatactgaacgaaggcgaagatacgcgggaaaccctgctggattacagcataacgataaatgacgagctgctgaaaaaacgcaaggaattcggtctggagtag

SEQ ID NO: 30790 - protein, 246 aa, Unknown
  Obtained from environmental sample
  misc_feature (1)..(246): Xaa is any amino acid
MATTVQANIDFSNFLAHLYQRDGRLYNENGSRTLLSEETSIEAFDVYTKFFTHYKTPAVYDFLNRFRTGEMPLAFADYTNFNTLEVFAPELRGLWGFARMPGLRRKDGSVNRSVPTGTLASMIFSNAKKPELAWEFLKWWVSADTQLRFGRELESVMGAAARYPTANYDAFTRLSWGSEQMAVLKEQRAWTVGTPEVPGGYYVSRHITNAVRRILNEGEDTRETLLDYSITINDELLKKRKEFGLE

SEQ ID NO: 30791 - DNA, 1233 bp, Unknown
  Obtained from environmental sample
  misc_feature (1)..(1233): n is a, c, g, or t
atgggatgtggtctgggaagggcagactttcccggcaacgtagccctcgccaccacactggggcgcgtaatgttcccctacctgctgctggtgagcataacggccgccatggccgccgtgctgaacatgagggggcgcttcgcgctggcggcatccacaaacctgtgcggcaacttggcgttcatagctgcggcctggctggccttcagggtgtggcaaagccccgaccgcgccgccttggtgttcgcctgcgccatgctgctccacggcctagtgcagatattggtgcttatgcccactttcaggcggctgggctttggctttgggtggctggccaagttcaaggaccccgacgtgcgccttgcactgaagcgaatggtgcccggaatcatcgcgggcggcatacaccccatcaacgtctttgtcagccagagcctagcgagccagttgaagcctggggcgcagacggtgctggccaattccaaccttttgggcgagctagcgctgggcctgttcgccgtcagcgtggcaacagtgagccttcccgctatgagccgccaagccagcagcggcgacatggccggcgtcagatccagcctggccgaggcgctaaggggcgcggcactcatggtgatacccgcgtcagtcggcatggcggtgcttgccactccaataatcgccatgatttaccacaagggcgcgtttggcgcggaagccgtcgcttggaccgcggccaccgtgccctaccaggcgttgggcctgctctttattgcgtctgcgcggataagcacacaggcactcaatgccacgaaggactaccgcggccctgccttggccgcattagtcggcttcgtctgcaacgtggtctttagcctgcttttgatgaagccgcttgggacaagcggaatggcgttggccaacagtctggctgcggtcgccggccttgcgttccagaccatgcgcctgaagcgcaccttgggggggctgccggtgggagccgtcgtgggcggctggacaaagatgtgcgccgctgcggcgctgatgggtctggcggcgtattatggcaacaccatgcttcaaatccatgacccgcaacagttccagggcacggcgaccacagcttggcggctcctcccgctggtggccgtctgcggcgccatgtacttctgcttggcgtggctcttccgagtgccagaggccaagaggatggcgcgggccgtcctgaaaagatag

SEQ ID NO: 30792 - protein, 410 aa, Unknown
  Obtained from environmental sample
  DOMAIN (1)...(370): MviN-like protein
  misc_feature (1)..(410): Xaa is any amino acid
MGCGLGRADFPGNVALATTLGRVMFPYLLLVSITAAMAAVLNMRGRFALAASTNLCGNLAFIAAAWLAFRVWQSPDRAALVFACAMLLHGLVQILVLMPTFRRLGFGFGWLAKFKDPDVRLALKRMVPGIIAGGIHPINVFVSQSLASQLKPGAQTVLANSNLLGELALGLFAVSVATVSLPAMSRQASSGDMAGVRSSLAEALRGAALMVIPASVGMAVLATPIIAMIYHKGAFGAEAVAWTAATVPYQALGLLFIASARISTQALNATKDYRGPALAALVGFVCNVVFSLLLMKPLGTSGMALANSLAAVAGLAFQTMRLKRTLGGLPVGAVVGGWTKMCAAAALMGLAAYYGNTMLQIHDPQQFQGTATTAWRLLPLVAVCGAMYFCLAWLFRVPEAKRMARAVLKR

SEQ ID NO: 30793 - DNA, 996 bp, Unknown
  Obtained from environmental sample
  misc_feature (1)..(996): n is a, c, g, or t
atgacagattggccgaggcatttgatgccaagggctataaaaaaagccataattgaggtccaactcagcctggtggaaaattttgaccaaattttcatccaacccatggtggagaacgtggccatgagcggagtggttacgaccagggttctagatgacggttctccttattatgtcatcaattacgatgatgtttctgggcgtaccgacacagtcaccagcggaaccggcaccagcaaaacggtatttatctatcacggggcgcgggaggcggatttcgattcatcgcgtctagttgagatcgtccgattgaccaagactcttgaagaattttttgaccaagcgcctctggatattgaattcgttttagacaaggaagagcggatctttcttctgcaggtgcggcgcatttgctctgaccggcactggattccccgcattgagcagaaaatcagccgacgcatgtaccaagtgaaggaatttatcacaaggtccacagccccgcgtgaaggccttgccgggtgccggacaattctgggtatcatggcggactggaatcccgctgaaatgattggcgtatctccgcggcctttggctttcagtctgtatcgggaattgatcacacgccgcacgtggagtttggcgcgggagcgcatgggctatcaatgtctgcctccggttgagttgatggtggcggtaagcggacgaccctacatagacgttagagccagcttcaattcatttttgccggccggccttgacgaccacctttccgggtgcttggtggacgcctggctggatcgccttgacaggcaccctcatcttcatgacaaagttgaatttgaaattgtgcatacggtggcggatttcgattttgtcgctacatttgcggaacgttaccaagatttgctaaagccggcagaattcatcgtctaccaggccgccttgngcagactgaccgatgcggccttgcggcccggcggcacccctggataa

SEQ ID NO: 30794 - protein, 331 aa, Unknown
  Obtained from environmental sample
  misc_feature (1)..(331): Xaa is any amino acid
MTDWPRHLMPRAIKKAIIEVQLSLVENFDQIFIQPMVENVAMSGVVTTRVLDDGSPYYVINYDDVSGRTDTVTSGTGTSKTVFIYHGAREADFDSSRLVEIVRLTKTLEEFFDQAPLDIEFVLDKEERIFLLQVRRICSDRHWIPRIEQKISRRMYQVKEFITRSTAPREGLAGCRTILGIMADWNPAEMIGVSPRPLAFSLYRELITRRTWSLARERMGYQCLPPVELMVAVSGRPYIDVRASFNSFLPAGLDDHLSGCLVDAWLDRLDRHPHLHDKVEFEIVHTVADFDFVATFAERYQDLLKPAEFIVYQAALXRLTDAALRPGGTPG

SEQ ID NO: 30795 - DNA, 627 bp, Unknown
  Obtained from environmental sample
  misc_feature (1)..(627): n is a, c, g, or t
atgggcagaacctgcagccgccggggagtttgggcgctgatattgattccttcgggagtttgcgcttccactgtccagtaccatacgccttcctcaagactgtcaatacggattgtcctgtttggatcgattatttctattaccgcccgtcctgtaagggggttggaattatgcgaaagaacgaaccttgattttgccaccgcttcatcgctggtccagcggaataccgtttgctgccgcagggcggtcagacccggcaatgttgtctcattagacggagattccagcgttatgcgcttgggctgtgaaggacgcgcgggagcggatacgggcgctggtttaggtgcgggatctgaagttggtgtagaccctggagctggtgcgggtgttggggtgagcgcgggttctagcgcaggtacaggctccggagcgggcgcgggtgtggcttctggcgcgggtgtgggggcagtcgttaaaaccggcgctggtgcgggaacggacgcgggagcggacgaaggcgctggttcttcaataaaagtgagagacggcgtttgcggctctttgcttttaactatgcgaaaagcggacgggggcggattaacgccatcggcgttggcgtgggtttga

SEQ ID NO: 30796 - protein, 208 aa, Unknown
  Obtained from environmental sample
  SIGNAL (1)...(22)
  misc_feature (1)..(208): Xaa is any amino acid
MGRTCSRRGVWALILIPSGVCASTVQYHTPSSRLSIRIVLFGSIISITARPVRGLELCERTNLDFATASSLVQRNTVCCRRAVRPGNVVSLDGDSSVMRLGCEGRAGADTGAGLGAGSEVGVDPGAGAGVGVSAGSSAGTGSGAGAGVASGAGVGAVVKTGAGAGTDAGADEGAGSSIKVRDGVCGSLLLTMRKADGGGLTPSALAWV

SEQ ID NO: 30797 - DNA, 810 bp, Unknown
  Obtained from environmental sample
  misc_feature (1)..(810): n is a, c, g, or t
atgaccgaaacacaacgcatggcaaagtggtatggcaattacgcctcgttttgcatgttggcgtgcggtaacgaacctgccggacgctgggtcccttgggtaagccgatttgtggattactggaaagcaacagaccagcgtcgggtatataccggagcatcagttggcggcagttgggcatggcagcctaaaaaccagtatcacgtgaaagccggcgcgcgcggattagcatggaatgcgcgtcctgaatcggtttctgatttcacttcaaaaattgatacagtgcgacagccatttgtatctcacgaaaccgggcaatggtgcgtgtttcccagttttgacgaaatcaagaaatacaccggcgtcaacaaagccaaaaacttcgagttgttccgcgaagaccttgccgacaacgatatggcatcgctggctcacaattttatgatggcttcgggaaagttgcaggcgctcgcctataagcacgaaatagaaaaaactttgcgcactcccgattacgccggattccaactgctttgcctaaatgactattcgggacagggaacggcgctggtaggcgtgctcgatgtcttctgggacgaaaagggatatatcaatgcatcacagtttcgacgtttttgctgcgaaacagtgccgctaatgcgaactgcaaaattcacctaccacaacaacgaatcacttaatgctgaagtggaagtggcgcatttcggacagggaccattacgtttcgcgcattttgagtggacgttgaaggataaatcaggtaaaacagtatgccaaaggcgattttga

SEQ ID NO: 30798 - protein, 269 aa, Unknown
  Obtained from environmental sample
  misc_feature (1)..(269): Xaa is any amino acid
MTETQRMAKWYGNYASFCMLACGNEPAGRWVPWVSRFVDYWKATDQRRVYTGASVGGSWAWQPKNQYHVKAGARGLAWNARPESVSDFTSKIDTVRQPFVSHETGQWCVFPSFDEIKKYTGVNKAKNFELFREDLADNDMASLAHNFMMASGKLQALAYKHEIEKTLRTPDYAGFQLLCLNDYSGQGTALVGVLDVFWDEKGYINASQFRRFCCETVPLMRTAKFTYHNNESLNAEVEVAHFGQGPLRFAHFEWTLKDKSGKTVCQRRF

SEQ ID NO: 30799 - DNA, 459 bp, Unknown
  Obtained from environmental sample
  misc_feature (1)..(459): n is a, c, g, or t
atgacagatcggccgagacttgatgtgggtaccggaggaggttttccgggcatacctctggctattctttttcctgaaacacacttccatttgattgattctatcggaaaaaaattgaaagtagtagatgatgttatcgaaaagttacagttgcaaaatgtatccacacagcatatacgcgcagaacagttatccgggaagtacgatcttgcagtcagccgagccgttgcatctatttctcaattcatgccgtggatgaaaggtaaatttttgaaacgcaacattcacgatttgcctgatggagtcttcttcctgaaaggcggcaatcttgacaacgaactttttccgtatcgcaacaatgtaactgtatataatatcagcaatttttttcctgagccgttttttgaggaaaagaaagtggtgtatatatcctcagaacttctgactaagttcaaataa

SEQ ID NO: 30800 - protein, 152 aa, Unknown
  Obtained from environmental sample
  DOMAIN (1)...(122): Glucose inhibited division protein
  misc_feature (1)..(152): Xaa is any amino acid
MTDRPRLDVGTGGGFPGIPLAILFPETHFHLIDSIGKKLKVVDDVIEKLQLQNVSTQHIRAEQLSGKYDLAVSRAVASISQFMPWMKGKFLKRNIHDLPDGVFFLKGGNLDNELFPYRNNVTVYNISNFFPEPFFEEKKVVYISSELLTKFK

SEQ ID NO: 30801 - DNA, 456 bp, Unknown
  Obtained from environmental sample
  misc_feature (1)..(456): n is a, c, g, or t
ttgtttaagatgcgtccgccgcatacaacgggcatacatgttaatccggagcatccggtgtttgccgactttccaacagactaccacagcaatatgcaatggtgggaactggtacataacgcacaggtgatgcaactgaccgattttccgaaaggatttcagccgctgattcaaagcattgatacatggttcatcaaccggaaactggggatgctcttcgaggcgaaagtattgaacggaaatattgtagtatgcagcgccgacctgaaaggtaaccggaaagaccgtcccgtagcgcaacagttatacgcctcgattgtgaaatacatgcaatcaaataatttcagcccgcaatttactgtggacatccaaaacataaatgacttgtgccgcaaagccggcgaacgtgtgagaacatacaccagcgacgcgcctgatgaattgaaaaataattaa

SEQ ID NO: 30802 - protein, 151 aa, Unknown
  Obtained from environmental sample
  misc_feature (1)..(151): Xaa is any amino acid
MFKMRPPHTTGIHVNPEHPVFADFPTDYHSNMQWWELVHNAQVMQLTDFPKGFQPLIQSIDTWFINRKLGMLFEAKVLNGNIVVCSADLKGNRKDRPVAQQLYASIVKYMQSNNFSPQFTVDIQNINDLCRKAGERVRTYTSDAPDELKNN

SEQ ID NO: 30803 - DNA, 444 bp, Unknown
  Obtained from environmental sample
  misc_feature (1)..(444): n is a, c, g, or t
atgatcagatcggccgagagaagttcagaaaaattcccctatataacagatgaaaaagaactatcagttaaaaaagaagattggattgagttcgcaaaatttttgcaaagcgaattgaactgcgattatctaatagatatggtggcagcagattggactgagcattttgacgttattctgcaaactatgagcttgaatgaggggcacaaaatttttgcaaaatgcagcctgccaaaaccggaaaacaaagaagaactgccagcaattccaagcctcacagaaatttaccctgccgcagaatggaaagagcgcgaggtttacgatatgtttggtatttcctttgatgggcatcctgatttgcgccgcattttcacagaagacaattttgagggctggcctctccgcaaagattttacaaatccgagtatgcttatcaagccttaa

SEQ ID NO: 30804 - protein, 147 aa, Unknown
  Obtained from environmental sample
  DOMAIN (77)...(146): Respiratory-chain NADH dehydrogenase, 30 Kd subunit
  misc_feature (1)..(147): Xaa is any amino acid
MIRSAERSSEKFPYITDEKELSVKKEDWIEFAKFLQSELNCDYLIDMVAADWTEHFDVILQTMSLNEGHKIFAKCSLPKPENKEELPAIPSLTEIYPAAEWKEREVYDMFGISFDGHPDLRRIFTEDNFEGWPLRKDFTNPSMLIKP

SEQ ID NO: 30805 - DNA, 450 bp, Unknown
  Obtained from environmental sample
  misc_feature (1)..(450): n is a, c, g, or t
ttggagggcatggttatgggaacgcgcagcggctcaatagaccctgggataatcctccatttaatgaaatctttgggctatgattacgataaattgaacaagctgctcaacaaagagagcggccttttggggcttagcggcatttccagcgatatgcgtgttcttttgggcgaagccgaaaaaggttccgaaagagccaaaattgcaatagaggttttctgttatcgcgtagcaaaggaaataggctctcttgtaccagctctcccaaaattggatgcccttgttttcaccggaggaataggcgaaaattccgaacctgtccgcaaaaagatattgtctttcttaaacgttttcaaatttggcgagccaaatggccctaaggttatggttgtgccaacgaatgaagaacttatgattgcaatggatacggaagaggttgttaaggcttga

SEQ ID NO: 30806 - protein, 149 aa, Unknown
  Obtained from environmental sample
  DOMAIN (1)...(141): Acetokinase family
  misc_feature (1)..(149): Xaa is any amino acid
MEGMVMGTRSGSIDPGIILHLMKSLGYDYDKLNKLLNKESGLLGLSGISSDMRVLLGEAEKGSERAKIAIEVFCYRVAKEIGSLVPALPKLDALVFTGGIGENSEPVRKKILSFLNVFKFGEPNGPKVMVVPTNEELMIAMDTEEVVKA

SEQ ID NO: 30807 - DNA, 534 bp, Unknown
  Obtained from environmental sample
  misc_feature (1)..(534): n is a, c, g, or t
atgagccgctatgaggtcgagtacggcgacatccaggggatacccctttccgatgcgctttccggactgaccatagccaaggtcatcgaggtattaaacaagctcaccacggcgatacgcgacaacgggatcggcggcccgattgagtttgtcgcggcatcggacgtgttcaccgcgattaacaacgcggccgcggtacagcaccagtacatcgtggttccggggccgggaaaaatcagcgtcgccgggtttgaaatccttctggacaacgacacctggtttgacattgacgagggcggcacgcagtccaagaagtcgatggtcgagccgctggaattgatggcgcgcgctgtcaacgcggggcagaaaatgccgtatctgaagctggatgacgtggtaatgaaccaggcggttccgttctacgcctttaccaaagtgcgcacggatcagcgcggcgaagatttgttcgtcaagagcaaacccttcccgctgattaaccgcaagggaatcgcgatcgcgaaattctcggcttag

SEQ ID NO: 30808 - protein, 177 aa, Unknown
  Obtained from environmental sample
  misc_feature (1)..(177): Xaa is any amino acid
MSRYEVEYGDIQGIPLSDALSGLTIAKVIEVLNKLTTAIRDNGIGGPIEFVAASDVFTAINNAAAVQHQYIVVPGPGKISVAGFEILLDNDTWFDIDEGGTQSKKSMVEPLELMARAVNAGQKMPYLKLDDVVMNQAVPFYAFTKVRTDQRGEDLFVKSKPFPLINRKGIAIAKFSA

SEQ ID NO: 30809 - DNA, 990 bp, Unknown
  Obtained from environmental sample
  misc_feature (1)..(990): n is a, c, g, or t
ttgatgggtggagttgacgggcgtactgcccacccgcgcctgtcattggtaaggaaaggcattgaaatcgccaaaaaagaaaaactggaattgatccttgccgtgggcggcggttcggcgattgattccgccaaagcgattgccgccggagcggtaaatgactgcgatgtgtgggatttttttgaaagaaagaaaaccgcggacaaagccctgccggtcggaactgtcgtaacgattcccgccgccggaagcgaatcaagcataagctgtgtcatcaccaatgaagaaggcccgtggaaaagggggatgaattttcaatgtatccgtcccgccttttcaatcatgaatcccgaactaacctacactttgccgccgtatcagactgcctgcggaataaccgatatgctggctcacataatggagcgttattttaccaaagaacccaacgtagaacttaccgatgaactatgcgaaggcgcaatgcggaccatcataagaaacgcccgaaccattttttccggcggagaaaacaactacaacgcgcgggcggaaatcatgtgggcgggcgcgctggcgcataacggcctgcttgacaccggacgcattggcgactgggcaagccacgctcttgatcacgaactgtccgcgcttttcgagattgcccacggcgcgggacttgccattattttcccggcatggctcaggtacaacatcaaggaaaacactccccgccttgcgcgttttgccgcgaaagtctggggcgtagacggcgcattctatgattacgaacaagccgccctggaaggggtaatctgcatgggaaactttttcaaatctatcgggatgctcataaggttcgccgacgcaaacatcgatcctgcctgcataccagagatggcacaacgcgtcgtccactttggccccatcggcaactaccgcaaactggacgaaaaagatgccgaagcgatttaccggcttgcggcggagtag

SEQ ID NO: 30810 - protein, 329 aa, Unknown
  Obtained from environmental sample
  DOMAIN (3)...(320): Iron-containing alcohol dehydrogenase
  misc_feature (1)..(329): Xaa is any amino acid
MMGGVDGRTAHPRLSLVRKGIEIAKKEKLELILAVGGGSAIDSAKAIAAGAVNDCDVWDFFERKKTADKALPVGTVVTIPAAGSESSISCVITNEEGPWKRGMNFQCIRPAFSIMNPELTYTLPPYQTACGITDMLAHIMERYFTKEPNVELTDELCEGAMRTIIRNARTIFSGGENNYNARAEIMWAGALAHNGLLDTGRIGDWASHALDHELSALFEIAHGAGLAIIFPAWLRYNIKENTPRLARFAAKVWGVDGAFYDYEQAALEGVICMGNFFKSIGMLIRFADANIDPACIPEMAQRVVHFGPIGNYRKLDEKDAEAIYRLAAE

SEQ ID NO: 30811 - DNA, 420 bp, Unknown
  Obtained from environmental sample
  misc_feature (1)..(420): n is a, c, g, or t
atgaagaagcacaccacaataggcgccgccatactcaacaaccctaaatcccccataatagagtgcgccagacagatagccctcttccaccacgagaagtggaacggacacggctacccgcacgggataaagggcgaggacatacccataaacgcgcgcatagtcgccatctgcgacactttcgacgcgctgacctccaaacgcccgtacaaaatgccctaccccatagacgtctcctgcgacataatagccaaggggcgcggcgaagactttgacccagacctagtagacctcttcctgaaaaacatagagggcttcgtgaaaatcaaggacaacgtagacgaggagaacgacgacgaagatatcgtgcgggcgaatttttcttggagcgagcgggataaagaaaacgggaaggcgtaa

SEQ ID NO: 30812 - protein, 139 aa, Unknown
  Obtained from environmental sample
  misc_feature (1)..(139): Xaa is any amino acid
MKKHTTIGAAILNNPKSPIIECARQIALFHHEKWNGHGYPHGIKGEDIPINARIVAICDTFDALTSKRPYKMPYPIDVSCDIIAKGRGEDFDPDLVDLFLKNIEGFVKIKDNVDEENDDEDIVRANFSWSERDKENGKA

SEQ ID NO: 30813 - DNA, 528 bp, Unknown
  Obtained from environmental sample
  misc_feature (1)..(528): n is a, c, g, or t
gtgtccggcgcgggctatcccggcgtcccaagtctcgacatgatcgacaacatagttccctacatcgggggtgaggaagaaaagtcagaactggagccgctgaagattcttgggtcaattgacggaggagtttttaagaacgccgaattgccgagaatttccgcccactgtaaccgcgttcccgtaaccgacggacatacagcctgtgtaagcgtggagttcggtgaaaaaaagccgtcggtggacgaagtaaaaaaaatctggaccaatttcagaagcctcccgcaagaactgaaactcccaatggcgccggagcggcctatcataatacgggaagaaaatgaccgcccccagccgcgcaaggacagggatgcggacaaggccatggcggtaactatcgggcgaatcaggccctgcaatgtttttgacctccgcttcgtgggcctgtcccacaacactgcccgaggcgcggctggtggaggcatactcaacgcggaattactaaaacacaagggatatttgaactga

SEQ ID NO: 30814 - protein, 175 aa, Unknown
  Obtained from environmental sample
  DOMAIN (1)...(155): Semialdehyde dehydrogenase, dimerisation domain
  misc_feature (1)..(175): Xaa is any amino acid
MSGAGYPGVPSLDMIDNIVPYIGGEEEKSELEPLKILGSIDGGVFKNAELPRISAHCNRVPVTDGHTACVSVEFGEKKPSVDEVKKIWTNFRSLPQELKLPMAPERPIIIREENDRPQPRKDRDADKAMAVTIGRIRPCNVFDLRFVGLSHNTARGAAGGGILNAELLKHKGYLN

SEQ ID NO: 30815 - DNA, 330 bp, Unknown
  Obtained from environmental sample
  misc_feature (1)..(330): n is a, c, g, or t
atgggctaccggaccatttgggcactttttggcgcggcaaaccagcttttggccgcgttaacccttattgcctgcatgatgttctttaagaaaaccaggcaaaaaagcatcttgctactcatccccacaatcataatgctggcagtcacatttacttcgcttaccctgtccattagggaccgggtagttttgcttcaaaatggcaaccaaaacgtttcggtgctgggcttgcagatagttatcgcggcgctgcttttggttttgggaattcttgtagcaatttcctgcgcggcaaaacttttggaaaagagcccttcagttaaacaatga

SEQ ID NO: 30816 - protein, 109 aa, Unknown
  Obtained from environmental sample
  SIGNAL (1)...(18)
  misc_feature (1)..(109): Xaa is any amino acid
MGYRTIWALFGAANQLLAALTLIACMMFFKKTRQKSILLLIPTIIMLAVTFTSLTLSIRDRVVLLQNGNQNVSVLGLQIVIAALLLVLGILVAISCAAKLLEKSPSVKQ

SEQ ID NO: 30817 - DNA, 732 bp, Unknown
  Obtained from environmental sample
  misc_feature (1)..(732): n is a, c, g, or t
ttgattgtctgcattgttataggtatctttttccctctttttttgccaaaatccgtttggctcctgttgatttttggctatatttttaccgcctcggtgcttcccatctgggtattgggccagcccaggaattaccttaactcgttcctcttaatcgcgatgatcattgcggcctttgcgggcgtggtatttacaagcccaaagattgaaatccccgcctttacctccttctatgtgaacggcaactggctattcccaggcctttttatcaccatagcctgcggggcaatatcgggctttcattcgctggtcgttacaggggcaacatccaaacagataagcagcgaaaaatacatgcttcctatctcctatggggcaatgcttgtcgagacgctggtggctgttcttgcgcttatagccgttggttccctggcaaaaggcggcgttttgccgggtgagacccctccggtggtttttgcgagagcggtttctggcttcctttttaaattgggtttgcctgaacatgtttcgtatataattgtttcccttgcggtatcttcttttgtgctgaccacgcttgatacagtagcccggctgggccgtctttcgtttcaggaactgtttaccattgaggacagagccaaaggagccgataatttatttattcgtgcattaaaaagcaagagcgctgcttcaatttttacgctggtgcctgcttttcttctggcataa

SEQ ID NO: 30818 - protein, 243 aa, Unknown
  Obtained from environmental sample
  DOMAIN (1)...(180): Carbon starvation protein CstA
  misc_feature (1)..(243): Xaa is any amino acid
MIVCIVIGIFFPLFLPKSVWLLLIFGYIFTASVLPIWVLGQPRNYLNSFLLIAMIIAAFAGVVFTSPKIEIPAFTSFYVNGNWLFPGLFITIACGAISGFHSLVVTGATSKQISSEKYMLPISYGAMLVETLVAVLALIAVGSLAKGGVLPGETPPVVFARAVSGFLFKLGLPEHVSYIIVSLAVSSFVLTTLDTVARLGRLSFQELFTIEDRAKGADNLFIRALKSKSAASIFTLVPAFLLA

SEQ ID NO: 30819 - DNA, 873 bp, Unknown
  Obtained from environmental sample
  misc_feature (1)..(873): n is a, c, g, or t
ttgccgcgtgaagacgagttgaatgcgctttttccgagtctgagctttacctacattgtcctgagccagcctactttagccctcactgcagaagatcggctggtgctaatctatgctgcgacggtgccattagaagtcagcagtgggacgagtgcggatatcggcttgcccctgaagggtcatagctacgccgggcgattgttgattaagcaaatcagtggtgctttgcaggtagtcaaccgggtggactgtgaggagtttgtggctagtgcgctgtccaaagaggtcagccctgattggccgttggaggctttgaaagcgcaggcggtagccattcgcagtttagtggccaaacggcaggcggatagtacaggcggtgactattggctgcgcgatagcgagatgtcctacgtgggctcggataatgtctcgttggggggggtcaaacaggcggtgacggctacggcgggggaaattatgctctatgaggggcagccgatcgaagctacttatcatgcggacgctggcgggcatacttttaacagcgaggatgtttggctgagtgctttgccctatctacgcggggtagcggagctcttcccgagcctggggccggatgccgcctggtcgactagtcctggctatagcggcacggagctgcagcagttgctgcgggcggcgggctaccccgatatagggccgattcagcaggtgatctgcgaggaagtgacgaattttggtgccgccttaagcttgcgcttggtgggcagccgcggtgaacgggtcttgccctgtggcactattcgcagtgtcttgcagttaaaaagcaataatgtacagctacatctagccgcgcagttgggtgacccgtag

SEQ ID NO: 30820 - protein, 290 aa, Unknown
  Obtained from environmental sample
  DOMAIN (69)...(162): Stage II sporulation protein
  misc_feature (1)..(290): Xaa is any amino acid
MPREDELNALFPSLSFTYIVLSQPTLALTAEDRLVLIYAATVPLEVSSGTSADIGLPLKGHSYAGRLLIKQISGALQVVNRVDCEEFVASALSKEVSPDWPLEALKAQAVAIRSLVAKRQADSTGGDYWLRDSEMSYVGSDNVSLGGVKQAVTATAGEIMLYEGQPIEATYHADAGGHTFNSEDVWLSALPYLRGVAELFPSLGPDAAWSTSPGYSGTELQQLLRAAGYPDIGPIQQVICEEVTNFGAALSLRLVGSRGERVLPCGTIRSVLQLKSNNVQLHLAAQLGDP

SEQ ID NO: 30821 - DNA, 870 bp, Unknown
  Obtained from environmental sample
  misc_feature (1)..(870): n is a, c, g, or t
gtgctagttaaggactttgattatcagctgccagctgagcttatcgctcaaacggctctggctgagcggacggcggcgcggctgatggtcatcgatagacagcgagggttagtagccgaaagtgtctttgcgcagatcggccaatggctgcgggcgggtgacctattggtgatcaacgacgcgcgggtcatgccggcgcggctgaagggacagaagacgacaggtggtagggtcgagctcttgcttttggagcagcaggcggcgcagcagtggtcggccttagtgcgtccaggccgccgcttgccgcttggcagtgaaattatggtggccgctggccgtctgcaggcacgcattttagagcgcttgccccgcggggagcgcttagtggctttgagctgggatccggctatcgcttttagcgatctgttggaagagatcggtgaagtgcccttgccgccttatatccatcagccattagccgatcgcgagcgttatcagacggtctatagtcaagtgcccggctcggtggccgcccccactgccgggctgcattttactagcgaactgctggcggctttgcaaaagcaaggcgtggaagtagctcgaataacgctgcgcatcggcttaggcacctttcgttctttacgggtggatcgggtagccgagcatgtgatgcaccgcgagcagttcgtcttaagtgccgcgagcgctgcgcgcgtcaatcgggctaagcatgaaggacggcgggtgattgctgtgggcactaccagctgtcgggtgctggaaacggccgctaccgatcaggggctagtggtggctcaggaaggcttttcggagctgtttatcaccctggctaccgctttaaggtga

SEQ ID NO: 30822 - protein, 289 aa, Unknown
  Obtained from environmental sample
  DOMAIN (1)...(217): Queuosine biosynthesis protein
  misc_feature (1)..(289): Xaa is any amino acid
MLVKDFDYQLPAELIAQTALAERTAARLMVIDRQRGLVAESVFAQIGQWLRAGDLLVINDARVMPARLKGQKTTGGRVELLLLEQQAAQQWSALVRPGRRLPLGSEIMVAAGRLQARILERLPRGERLVALSWDPAIAFSDLLEEIGEVPLPPYIHQPLADRERYQTVYSQVPGSVAAPTAGLHFTSELLAALQKQGVEVARITLRIGLGTFRSLRVDRVAEHVMHREQFVLSAASAARVNRAKHEGRRVIAVGTTSCRVLETAATDQGLVVAQEGFSELFITLATALR

SEQ ID NO: 30823 - DNA, 381 bp, Unknown
  Obtained from environmental sample
  misc_feature (1)..(381): n is a, c, g, or t
ttgcgtcaaattctagttttcattatatttaaaacaatcatgccaacttatgaatacgaatgtaaaagttgttcacataaatttgaggtttttcagtctataaatgatgcgccaataaaagactgccccgaatgcggcaaggaagtccgcaggctcatttttggcggaacaggcgtaatttttaaaggctcaggcttttatgtcaccgacaaaaataaaagctccggtgataaagccggtaaaaaaacagccgaaaccgatacaaaacccgcgcctgacacaaagcccaaaagcggcgaaagttctcagtcaacaccggttgcgcctgccccatgcagtgagtgtcctaaaaaaggcgtttccccctcctgtccggcgtaa

SEQ ID NO: 30824 - protein, 126 aa, Unknown
  Obtained from environmental sample
  misc_feature (1)..(126): Xaa is any amino acid
MRQILVFIIFKTIMPTYEYECKSCSHKFEVFQSINDAPIKDCPECGKEVRRLIFGGTGVIFKGSGFYVTDKNKSSGDKAGKKTAETDTKPAPDTKPKSGESSQSTPVAPAPCSECPKKGVSPSCPA

SEQ ID NO: 30825 - DNA, 699 bp, Unknown
  Obtained from environmental sample
  misc_feature (1)..(699): n is a, c, g, or t
atggctaaaataactgttgaaaaaacagtaatttctatcattcaagttaatgaagaagactacatctcccttactgacatagcaaaattcaaatccgatgaaccaaatgccgttataggaaactggatgcgcaatcgtaataccattgaatatttgggcatttgggaaactttatataaccctgaatttaaacccctcgaattcgaggggtttagaaaacaggccgggttgaacgcttttgtcttgtcgcctcaaaaatggatagaaacaacaggagcaaggggaatagtttccaaatccggacgcaatggcggtacttttgcccataaagacatcgccttcaaatttgcaaactggatttccacagaatttgaactttattttatccgcgagtttcaacgcctaaaagaagctgaacaaaaacttttgggctggtcagccaaacgagaattggcaaaaatcaattatcacatccatacagatgcgataaagcagaaccttgtcccaaaagaactaactccaaaacaatccgcaatcatttacgctgatgaagccgatgtcttaaatgtagctttatttggcttgcctgcaaaagaatggagaacaaagaaccctgaattgaaaggaaatatccgtgattatgctatcataaacgaacttatctgtttgtcaatatggaaaatatcaatgcggtcatga

SEQ ID NO: 30826 - protein, 232 aa, Unknown
  Obtained from environmental sample
  DOMAIN (9)...(135): KilA-N domain
  misc_feature (1)..(232): Xaa is any amino acid
MAKITVEKTVISIIQVNEEDYISLTDIAKFKSDEPNAVIGNWMRNRNTIEYLGIWETLYNPEFKPLEFEGFRKQAGLNAFVLSPQKWIETTGARGIVSKSGRNGGTFAHKDIAFKFANWISTEFELYFIREFQRLKEAEQKLLGWSAKRELAKINYHIHTDAIKQNLVPKELTPKQSAIIYADEADVLNVALFGLPAKEWRTKNPELKGNIRDYAIINELICLSIWKISMRS

SEQ ID NO: 30827 - DNA, 387 bp, Unknown
  Obtained from environmental sample
  misc_feature (1)..(387): n is a, c, g, or t
atggatttatcggatatcgtgattattttatgccggccgagcgagcccggcaatgttggggctgtatgccgcgtgatgaaaaacatggggctatcccgcttgcgcatggtcgcgcccgaatcttttgacgaggcaacgctgctggcgcggaccgttcacgccgaggatgtctggcgtaacgccggcttttttgacaccctcgcggacgctgcggctgactgttcgcttgtggtggggacaacccggcgcaggggcagaaggcgtaaaagtatcagcatggagccgcgcgcccttaccacgtggcttaaagagcagaaacgctcgcccgtggggttcgtttttggcaacgagcgcaccggccttgaggaagacgagcttatttcttaa

SEQ ID NO: 30828 - protein, 128 aa, Unknown
  Obtained from environmental sample
  DOMAIN (5)...(128): SpoU rRNA Methylase family
  misc_feature (1)..(128): Xaa is any amino acid
MDLSDIVIILCRPSEPGNVGAVCRVMKNMGLSRLRMVAPESFDEATLLARTVHAEDVWRNAGFFDTLADAAADCSLVVGTTRRRGRRRKSISMEPRALTTWLKEQKRSPVGFVFGNERTGLEEDELIS

SEQ ID NO: 30829 - DNA, 1119 bp, Unknown
  Obtained from environmental sample
  misc_feature (1)..(1119): n is a, c, g, or t
atggctctaaattgcggtatcgtcggtcttcccaatgtcgggaaaaccgcgattttttcggctttaagttccactatcgcggaaacggctaactaccagttctccaccaaaaacccgaatgtgggtatcgccgatgtccctgattcccggctgacaaggttaagcgaaatattcaaacccaaaaaaaccattccggcgacagttgaattcgtggatattgccgggctggtaaaaggctcctcaaagggggaagggttggggaatcagtttcttgcccatatccgcgaagtgggaattatcgcccatgttgtccgttgttttgacaaccccgacattatccatgtaagcgacaagatcgatcccgaagtcgacattgaaacgattaacatagaacttgctcttgccgatctggaaacccttgcaaagcggaaggaaagggcggaaaaaacgttaaaaatccagagcgagaaaaaaaacgccgagcttgttcttgccgtgctggataaaatcagccccttgcttgaagacgggaaacccgtccgtttagccaatttaaacgaagacgagaaagccctgatttacgactgccattttatcaccgctaaacccattctgtatgtctgcaatgtggacgaggaagggatgaaaactgtcgtggctgaggggaaagttccttatgtggaagccgtgcgcaaagtaggcgtcgccgagggttccccggtagtggtcataagcggcaaattcgaggcggaactcatcgccatagaagaccctgcggaaagactcgcctttctggaagagcttggactgaaagagccgggccttgcgccgctgatacgcgcggcttacgggcttttggggctcaggacttttttcaccgccggcgaagacgaatgccgggcatggactatccgcgccggggatcccgcgcccaaagccgcaagggcgattcacactgattttgaaaaaggctttatcaaagccgaagtgtacacctgcgatgatattttcaaatacggcaccgaggcaaagatcaaggaagccggcaagtaccgcattgagggcaaggaatacatcgtgcaggacggcgatgtaatgttttttaaatttaatgtgtga

SEQ ID NO: 30830 - protein, 372 aa, Unknown
  Obtained from environmental sample
  DOMAIN (3)...(145): GTPase of unknown function
  misc_feature (1)..(372): Xaa is any amino acid
MALNCGIVGLPNVGKTAIFSALSSTIAETANYQFSTKNPNVGIADVPDSRLTRLSEIFKPKKTIPATVEFVDIAGLVKGSSKGEGLGNQFLAHIREVGIIAHVVRCFDNPDIIHVSDKIDPEVDIETINIELALADLETLAKRKERAEKTLKIQSEKKNAELVLAVLDKISPLLEDGKPVRLANLNEDEKALIYDCHFITAKPILYVCNVDEEGMKTVVAEGKVPYVEAVRKVGVAEGSPVVVISGKFEAELIAIEDPAERLAFLEELGLKEPGLAPLIRAAYGLLGLRTFFTAGEDECRAWTIRAGDPAPKAARAIHTDFEKGFIKAEVYTCDDIFKYGTEAKIKEAGKYRIEGKEYIVQDGDVMFFKFNV

SEQ ID NO: 30831 - DNA, 765 bp, Unknown
  Obtained from environmental sample
  misc_feature (1)..(765): n is a, c, g, or t
gtgatcctgtttaggccaaaacagggtgatgtcgtgcttgatccctttttcgggacaggcacaacaggggccgtcgccaaaaagttaaaacgaaattacatagggatagagagggagccggaatatataaaactcgcggaaaacaggatcgccaatatcaaggagtttttgaagaagccgagtggacagaaggctgcctcacacattaaatttaaaaaacattacatcgccgtcctgcacgatgtattccttgccctcaatgcggtacttgccggcttccttgatctttgcctcggtgccgtatttgaaaatatcatcgcaggtgtacacttcggctttgataaagcctttttcaaaatcagtgtgaatcgcccttgcggctttgggcgcgggatccccggcgcggatagtccatgcccggcattcgtcttcgccggcggtgaaaaaagtcctgagccccaaaagcccgtaagccgcgcgtatcagcggcgcaaggcccggctctttcagtccaagctcttccagaaaggcgagtctttccgcagggtcttctatggcgatgagttccgcctcgaatttgccgcttatgaccactaccggggaaccctcggcgacgcctactttgcgcacggcttccacataaggaactttcccctcagccacgacagttttcatcccttcctcgtccacattgcagacatacagaatgggtttagcggtgataaaatggcagtcgtaaatcagggctttctcgtcttcgtttaa

SEQ ID NO: 30832 - protein, 254 aa, Unknown
  Obtained from environmental sample
  misc_feature (1)..(254): Xaa is any amino acid
MILFRPKQGDVVLDPFFGTGTTGAVAKKLKRNYIGIEREPEYIKLAENRIANIKEFLKKPSGQKAASHIKFKKHYIAVLHDVFLALNAVLAGFLDLCLGAVFENIIAGVHFGFDKAFFKISVNRPCGFGRGIPGADSPCPAFVFAGGEKSPEPQKPVSRAYQRRKARLFQSKLFQKGESFRRVFYGDEFRLEFAAYDHYRGTLGDAYFAHGFHIRNFPLSHDSFHPFLVHIADIQNGFSGDKMAVVNQGFLVFV

SEQ ID NO: 30833 - DNA, 972 bp, Unknown
  Obtained from environmental sample
  misc_feature (1)..(972): n is a, c, g, or t
ttgccaacaagaaataaatcgaaatggaatccgaagcggccccgtgacgcgcttttacgttttgaaacgatctgtaactgggtagaatgcggcatagttattattaacgccataacaaagcaaatactggatataaaccctgtcgcggtgcgtatgttcggcggggaacgacctgctattatcgggaattactgtcatgagactttctgtccctcggataaacattcctgcccgatcctcgactttgatcaggaagttgatcattcggagtgcgtgtttgaaaacaacaagggcgagagactcccaataataaaatccgtaataaaaattacttataacggccagccggcgctgcttgaatgttttactgatatatcgaatttgaaaaaagccgaagaacaattaaggattatgagcatagcagaaaaagcaaatcaggcaaagagcgatttcctgtccagaatgagccacgaaatgcgcacccccatgaacgccattatcggaatgacaaagatagctgaaaaaacggacgatgtttccaaattgaaatactgcctttccaccattaatacatcatccgtgcatcttcttggaataatcaacgacgttctggatatgtcaaaaatcgaagcgggaaaattcgaacttgaaatgcttccgatgaatatcgaaaagatgattatgaaggtaagcaatataattattgataacatagaaaagaaaaatcaaaaacttaatatagatatggcaaaagacatggggatggattatatcgccgatgatctcaggctgtcgcaggtagtaaccaatctgctgtcgaacgccgtgaagtttacccccgaaaatggggagatcacgctcgccgttgcagagacaggaagcaaagataattttaataccatccgtttttccgtaacagatacgggcataggaatgacggaagagcagatagcgcgtctgtcaacgcgttga

SEQ ID NO: 30834 - protein, 323 aa, Unknown
  Obtained from environmental sample
  DOMAIN (259)...(323): Histidine kinase-, DNA gyrase B-, and HSP90-like ATPase
  misc_feature (1)..(323): Xaa is any amino acid
MPTRNKSKWNPKRPRDALLRFETICNWVECGIVIINAITKQILDINPVAVRMFGGERPAIIGNYCHETFCPSDKHSCPILDFDQEVDHSECVFENNKGERLPIIKSVIKITYNGQPALLECFTDISNLKKAEEQLRIMSIAEKANQAKSDFLSRMSHEMRTPMNAIIGMTKIAEKTDDVSKLKYCLSTINTSSVHLLGIINDVLDMSKIEAGKFELEMLPMNIEKMIMKVSNIIIDNIEKKNQKLNIDMAKDMGMDYIADDLRLSQVVTNLLSNAVKFTPENGEITLAVAETGSKDNFNTIRFSVTDTGIGMTEEQIARLSTR

SEQ ID NO: 30835 - DNA, 435 bp, Unknown
  Obtained from environmental sample
  misc_feature (1)..(435): n is a, c, g, or t
ttggccgaggagacgcccggcgctttccttgtttccgttgacctttccctcctctcccgcgaatttgacaaaggcttgtttaacggcgaaaatttttcttttatccagggcgatttcaccgagccccctatccgcgacgccattgtttcaaaacagccatacaatttgatcgtcagcgacgcggcccctgcgaccaccggcaaccgcgttgttgataccagccgttcattggagcttgccgaagccgccttcttttacgccgaaaccgccttggccgcgggcggcagtttggtaataaaagttttccagggcggtgaaacctcagaattgctaaaacgacttggcggccttttcaaaaccgcgaaaagctataaaccccaggcctgccgcagcgattcctttgaaacatactacctgggccttgaaaaaaaatga

SEQ ID NO: 30836 - protein, 144 aa, Unknown
  Obtained from environmental sample
  DOMAIN (1)...(144): FtsJ-like methyltransferase
  misc_feature (1)..(144): Xaa is any amino acid
MAEETPGAFLVSVDLSLLSREFDKGLFNGENFSFIQGDFTEPPIRDAIVSKQPYNLIVSDAAPATTGNRVVDTSRSLELAEAAFFYAETALAAGGSLVIKVFQGGETSELLKRLGGLFKTAKSYKPQACRSDSFETYYLGLEKK

SEQ ID NO: 30837 - DNA, 945 bp, Unknown
  Obtained from environmental sample
  misc_feature (1)..(945): n is a, c, g, or t
atgccaataaagataccaaaagaactgccggcttataacgcgctccacagggaaggggtttttgtaatgacccatgaccgcgccgagcggcaggatatacgcccgcttaaagtaggcattgtcaaccttatgcccacaaccgtcactacggagatacagcttctgcggcttctgggtaacagccctttgcaggtggatcttacatttctgcggatgggcagccatgaaccaaaaaacgcccctcaggggcatttggataaattctatatcaacagtgaagatataattgccacggatacccgttttgacggccttattatcacaggcgctccggtggagaccctgccctttgaggaagttgattactgggacgagcttgccagggtaattgactattctgaaaaaaatgttttttccactttgcacatatgctggggagcgcaggcggggctgtaccgccgctataacatccccaagaagcagttggataaaaaactgttcggcatttttccccacgcggtgaacgagcaataccatactttgttccgcggcttcgacgatgaattccttgcccctcagtcccggcacacgacctgcgaccgtgacgcaatcgccgcggaatcgcgccttgtgattcaatccgaaaccgaagaaactggggtcttcatcgcgaccgcccgcgacgcccgcgagatttatgtgacaggccatctggagtacgatccccttaccctggacgcggaataccgccgcgatcttgccagagggctttccatagagccgccaaagaattactatcccgataatgatccctcaaaggccccggtagtccgctggcgtgcccatgccaatctgttttttgacaactggctaaactatgtttaccaggaaaccccttttgatctgaacaaattaggagaaggagatatcgaatggataatataa

SEQ ID NO: 30838 - protein, 314 aa, Unknown
  Obtained from environmental sample
  DOMAIN (2)...(300): Homoserine O-succinyltransferase
  misc_feature (1)..(314): Xaa is any amino acid
MPIKIPKELPAYNALHREGVFVMTHDRAERQDIRPLKVGIVNLMPTTVTTEIQLLRLLGNSPLQVDLTFLRMGSHEPKNAPQGHLDKFYINSEDIIATDTRFDGLIITGAPVETLPFEEVDYWDELARVIDYSEKNVFSTLHICWGAQAGLYRRYNIPKKQLDKKLFGIFPHAVNEQYHTLFRGFDDEFLAPQSRHTTCDRDAIAAESRLVIQSETEETGVFIATARDAREIYVTGHLEYDPLTLDAEYRRDLARGLSIEPPKNYYPDNDPSKAPVVRWRAHANLFFDNWLNYVYQETPFDLNKLGEGDIEWII

SEQ ID NO: 30839 - DNA, 633 bp, Unknown
  Obtained from environmental sample
  misc_feature (1)..(633): n is a, c, g, or t
gtgaacctgatctgtcagtccattgttataaattcacctaaccccgaaatatttaacggctatcatacgcttattcttgacagtcccgagtataacgcgttttccagccctggagggcatatttttatcaccaaagggctggtagagttaaccgttaacgaggacatgctggccgcggtcatagcccatgagcttgcccatataatgctgaagcacagtattaatattatcaacacaatgaaattcaatgatgatatgtcggctataggggatcgggcatcagctttcgcaggcggaagttctgcggcggctcagaggctcctggtttttcgcgattcagttggagcgatgatggataccctaataaaaaacggctattcccaggaacaggaactggaggctgatcaggaagcgataattcttcttgcggcatcaggctataatcctatggctattatggacgttttaaaggtactgcaaagcaaagaaaattcccaacgttcagggtttaacacaacccatcccagtacaagtgagcgcatcgccaatgtaggaatatggattggaaaccgccagacacgggataacagctcgcttagggctgacagattcagaaaaataatggagaaatga

SEQ ID NO: 30840 - protein, 210 aa, Unknown
  Obtained from environmental sample
  DOMAIN (4)...(189): Peptidase family M48
  misc_feature (1)..(210): Xaa is any amino acid
MNLICQSIVINSPNPEIFNGYHTLILDSPEYNAFSSPGGHIFITKGLVELTVNEDMLAAVIAHELAHIMLKHSINIINTMKFNDDMSAIGDRASAFAGGSSAAAQRLLVFRDSVGAMMDTLIKNGYSQEQELEADQEAIILLAASGYNPMAIMDVLKVLQSKENSQRSGFNTTHPSTSERIANVGIWIGNRQTRDNSSLRADRFRKIMEK

SEQ ID NO: 30841 - DNA, 762 bp, Unknown
  Obtained from environmental sample
  misc_feature (1)..(762): n is a, c, g, or t
ttgttcggggaaacaggcggaaaggattttatttttgcccataactccgccgacctgaatgcccttacctccgccctgatacgcggcgcttttgaataccaggggcagaaatgttccgcgctttcccgcgcctttatacctcagagcatctggcctgagcttaagcaaaaattgctggcagccacagcccaactgaaagtcggtgatgtttgcgacttcagtaattttatgggagctgttattgataaaaattcttttacgcagcttaaaaattatattgatgaagctaaaacgtcaaaagacgcagagcttctttgcggcggatatgacgacagcgtcggttattttgtttatccgacaataatactggcaaaaacaaaagaatacaaaactatgctgcaggaattattcggccccatattgacgctctatatttacggcgatgacgaacttgaagatatgcttgagtactgcgacagttccacgccctatgctttgacaggggcgatttttgcccaggatcgcctggctattgtggcaatggaaaaaaaactgcgtaacgcagccggtaatttttacatcaacgacaaacccaccggcgctgtggttgggcagcagccttttgggggcgcaagggcgtccggtaccaacgacaaagccggaagcgcgttgaacctttaccgctggatgagtctgcgctcggtgaaagaaaatttagatccggctacagatattacctatccctttatggctgctgaataa

SEQ ID NO: 30842 - protein, 253 aa, Unknown
  Obtained from environmental sample
  DOMAIN (1)...(235): Aldehyde dehydrogenase family
  misc_feature (1)..(253): Xaa is any amino acid
MFGETGGKDFIFAHNSADLNALTSALIRGAFEYQGQKCSALSRAFIPQSIWPELKQKLLAATAQLKVGDVCDFSNFMGAVIDKNSFTQLKNYIDEAKTSKDAELLCGGYDDSVGYFVYPTIILAKTKEYKTMLQELFGPILTLYIYGDDELEDMLEYCDSSTPYALTGAIFAQDRLAIVAMEKKLRNAAGNFYINDKPTGAVVGQQPFGGARASGTNDKAGSALNLYRWMSLRSVKENLDPATDITYPFMAAE

SEQ ID NO: 30843 - DNA, 1770 bp, Unknown
  Obtained from environmental sample
  misc_feature (1)..(1770): n is a, c, g, or t
ttggccgaggctggcaaactcgccggcgtgaacaccctttcggtggggattttcgcgtggtcagcccttgaaccgcaagaaggcgtgtaccgttttgactggcttgatgaaataatggatatgatggcggaaaacggcatagccgccgtccttgcgacgccgtccggagcgcgccccgcgtggatggctcagaaatacccggaagtattgcgggtaaacggataccgccaaaaaaacctctacggggagcggcacaatcactgtatgtcttcccccgtttaccgtgaaaaaaccgcggcaatcaacacccgtcttgccgaacggtatcaagaacatcccgcgctggccgtctggcatatctccaatgaatactcaggcgaatgccattgccctttatgtcaggaaaatttccggagctaccttaaaaaacgctttggcagtctggacgccctgaacgaggcgtggtggaacagcttttggagccatacctatacggactggtcacaggtggaaagccccggccccttgggcgaagtcaatgtccacggccttaatctggaatggaaacgtttttgtacggaacagattgtcgatttttatctgaatgaaacggctccgctcaaaaaaattacgcccaatatcccgtgtaccactaatctgatgtcgggcgaatccggcgtagataatttccgtcttgcccgggcgctggatgttgattcctgggacagctaccctcaatggaccggcacggaaaaagatattgaaaccggcgcgttgttttcgttttaccacgacatanaccgttcggccaaaggcaggccgtttatgctgatggagtcttccccgtcggcgacaaactggcggcctgttgccaagctgcaccggcccaatgtgcacatgctccagtcaatgcaggctgttgcccacggcgccgatacggtgcagtactttcagttccgcaagggccggggttccgccgagaaattccacggcgcggttgtggatcatgaaggcagcgaaaacaccagggtcttccgcgacgcggcggaagtggggaagcgccttgccggtatggacgcaatagtaggaacgggaacgcccgctgaaacggccgttgtatacgattggcaaaaccgctgggcgcttgatgatgtaagaggttttttgcaggacaaaaccggttattataatactgttatacagcattacggaattttctggcaaaagggcgtgccggcagacataatcgattcctcgcttattgccaaaccgggttaccttgacaaataccgcttgcttgttgcccccatgctgtacatgctcaggccgggcttgcctgaggcaatcgccggttttgtccggcgcggcggcacattcgttgccacctatatcaccggcgaggttgacgagaacgatctgtgctttaccggcggctttcccggcccgctccgcgataccctgggcgtttggtgcgaggaagttgacgcgctgtaccctgaagaccgcaacagcctgatctggaacggcaaaagctacggggcatttgatctgtgcgagcttatccatgccgagggtgctgaggttctgggaacctacggtatcgatttttatgcggggcggctggcgcttacggtgaaaaaaaccggcaagggcagggcgtattttatcgccgcccgtaccggcgaagattttctgagtgatttttacccgcaggttatcgcccaagccgggattaaacgttcccttgaagcggaactacccaaggcgtaa

SEQ ID NO: 30844 - protein, 589 aa, Unknown
  Obtained from environmental sample
  DOMAIN (368)...(579): Beta-galactosidase trimerisation domain
  misc_feature (1)..(589): Xaa is any amino acid
MAEAGKLAGVNTLSVGIFAWSALEPQEGVYRFDWLDEIMDMMAENGIAAVLATPSGARPAWMAQKYPEVLRVNGYRQKNLYGERHNHCMSSPVYREKTAAINTRLAERYQEHPALAVWHISNEYSGECHCPLCQENFRSYLKKRFGSLDALNEAWWNSFWSHTYTDWSQVESPGPLGEVNVHGLNLEWKRFCTEQIVDFYLNETAPLKKITPNIPCTTNLMSGESGVDNFRLARALDVDSWDSYPQWTGTEKDIETGALFSFYHDIXRSAKGRPFMLMESSPSATNWRPVAKLHRPNVHMLQSMQAVAHGADTVQYFQFRKGRGSAEKFHGAVVDHEGSENTRVFRDAAEVGKRLAGMDAIVGTGTPAETAVVYDWQNRWALDDVRGFLQDKTGYYNTVIQHYGIFWQKGVPADIIDSSLIAKPGYLDKYRLLVAPMLYMLRPGLPEAIAGFVRRGGTFVATYITGEVDENDLCFTGGFPGPLRDTLGVWCEEVDALYPEDRNSLIWNGKSYGAFDLCELIHAEGAEVLGTYGIDFYAGRLALTVKKTGKGRAYFIAARTGEDFLSDFYPQVIAQAGIKRSLEAELPKA

SEQ ID NO: 30845 - DNA, 1269 bp, Unknown
  Obtained from environmental sample
  misc_feature (1)..(1269): n is a, c, g, or t
atgaaattaaaaacgctccttatagggatggcgcctgccgttttagtctccatcctgtgcgttttcggcctgtttgacagactggaaaatcaagtttacgatctgttcctccgtttccgtcccaaccgcaaaccagcgcaggacataacattcgttgacgtcgacgacaacgctattgcgtataacggggttttcccctggcccagatccgtaatagccgacggccttttgcggttgaaggaatacggcgcaagggcggtcgtcttcgatattgaatttatcgacaaggggccccagggggtggactccgtttacctgaaccagggcctgacggcggactttgaccggagttttacggaaattaacgcaaggacgcgggaattattgaatgccatccagtccaacaggataaaccggaatgacattaacaggcatgcccaggaactgtccggcattatcagcggcgaaaaagacaagttgttgtccagggccaggaatatagccagggataatgaccagtaccttatcgacgcgtcgcggttattcggcagaagctgggtcaccctgaacctccgctcgctgccattgtccggggaacaggccgaacggcggcaaatggcggaaaaaagattttcacatccggtattggaatcgcctaacaccaacaagacacaatacgcggacatcctgccgccgcttccgggctttgccctttccgcggcgggagcgggttttaccaatgtggaagtggacaaggacggcataaggcggcgtattgaccttgcccagaacattcagggccactggtatctgcagcttgcgctctcacccctggttgactatctgggaaacccttccatagagatggacaaccgcagaatgttcctgagaaaggcaaaaatgccaaaccaggcgaaaaaagacatcaaaatccccctggacggaaagggcaggatgctgcttgactggccgaaaacggattttgctgacagctacagccatgtttccttctatgatttctccctgatggaagaacttgagcttgaactcgaacaatatacgcggcttttcggcgatacggacatagatttcttttcccctcttgaacattccctcgcgaggatacctttgcttgtcatggaccttgaaaaactctttggcgtgattcatccggcgcgggccgacgctctgaagaattgttccgatgaatcattcaaaacctatgtggattgccgccggataagccgcggcctgatgcgggaattctga

SEQ ID NO: 30846 - protein, 422 aa, Unknown
  Obtained from environmental sample
  SIGNAL (1)...(23)
  DOMAIN (23)...(379): CHASE2 domain
  misc_feature (1)..(422): Xaa is any amino acid
MKLKTLLIGMAPAVLVSILCVFGLFDRLENQVYDLFLRFRPNRKPAQDITFVDVDDNAIAYNGVFPWPRSVIADGLLRLKEYGARAVVFDIEFIDKGPQGVDSVYLNQGLTADFDRSFTEINARTRELLNAIQSNRINRNDINRHAQELSGIISGEKDKLLSRARNIARDNDQYLIDASRLFGRSWVTLNLRSLPLSGEQAERRQMAEKRFSHPVLESPNTNKTQYADILPPLPGFALSAAGAGFTNVEVDKDGIRRRIDLAQNIQGHWYLQLALSPLVDYLGNPSIEMDNRRMFLRKAKMPNQAKKDIKIPLDGKGRMLLDWPKTDFADSYSHVSFYDFSLMEELELELEQYTRLFGDTDIDFFSPLEHSLARIPLLVMDLEKLFGVIHPARADALKNCSDESFKTYVDCRRISRGLMREF

SEQ ID NO: 30847 - DNA, 633 bp, Unknown
  Obtained from environmental sample
  misc_feature (1)..(633): n is a, c, g, or t
gtgttagaggcggacaattttgccgaaaataaaaattgcctgtttttaacaaacgtttaccgcatccaaatttttttaaaaaagggggggattaaaatgcacgccaaaataaaaacggcaacagttttgctttgctgcatctgtttggttagcggattgtttttaaccggttctaaagcttttgccgatgagccgcaaagaaaaaagatcgctgtaatggattttataaacggctatcgggagttacaaacagacggcattaccaatttgttcgtgggagagctggtaaaaaacaaaacttttgatgttatggagcgtcaaagattgcaagacgtcttgaaagagcagcatttagaaacgcagcttagcacagaaggcgcgatgaaacttggcaaaattatcggacttgattttttggtttacggcacggtagctagtattgaagcgaatacgaaaaatatttcaataccacgtgttggtgaatacgctgaaagaaaagtaacagttactttgtcaatgaaatttgttgatgctgtcaccggtcaaattatgtttatggaagatgcgtcaaacagcgccacagccaaagtaacgcaaactaaagacatcggggtgggtaaaaccaggttctga

SEQ ID NO: 30848 - protein, 210 aa, Unknown
  Obtained from environmental sample
  misc_feature (1)..(210): Xaa is any amino acid
MLEADNFAENKNCLFLTNVYRIQIFLKKGGIKMHAKIKTATVLLCCICLVSGLFLTGSKAFADEPQRKKIAVMDFINGYRELQTDGITNLFVGELVKNKTFDVMERQRLQDVLKEQHLETQLSTEGAMKLGKIIGLDFLVYGTVASIEANTKNISIPRVGEYAERKVTVTLSMKFVDAVTGQIMFMEDASNSATAKVTQTKDIGVGKTRF

SEQ ID NO: 30849 - DNA, 534 bp, Unknown
  Obtained from environmental sample
  misc_feature (1)..(534): n is a, c, g, or t
ttgacggaaattttggaaaaagtagtcagcgaaggcggcgcggccaaagccaaagtgtccggctaccattttgccggaaaaacaggtactgccgaaaaaataaaaaagagcggttacggctatgaagcaggacggtatatcgcgtcgtttgctggttttggcccagtggaaaacccgcagtttgcagcggtaatcgttttagatgaaccagacggtcaatactacggcgggcaaattgccgctccggtctttagcgagattatgtcgcaaatcatgatttactcaaatgtccaaagaaaagaaaaaacggcagccgaaagtaacggtcaaagaccgctgctgccgccgcaaaacggcaagacgcaagttccaaatctatatggagaatccatcaaatcagtcagagaaacgcttaaaaaacaagaccttaaatttatcccgcaaggagacggcattgcggtcatgcaaagcgttacgccttatgaagaagttgacgttcaaacagaggttatcgtgtattttgaacaaagataa

SEQ ID NO: 30850 - protein, 177 aa, Unknown
  Obtained from environmental sample
  DOMAIN (121)...(176): PASTA domain
  misc_feature (1)..(177): Xaa is any amino acid
MTEILEKVVSEGGAAKAKVSGYHFAGKTGTAEKIKKSGYGYEAGRYIASFAGFGPVENPQFAAVIVLDEPDGQYYGGQIAAPVFSEIMSQIMIYSNVQRKEKTAAESNGQRPLLPPQNGKTQVPNLYGESIKSVRETLKKQDLKFIPQGDGIAVMQSVTPYEEVDVQTEVIVYFEQR

SEQ ID NO: 30851 - DNA, 321 bp, Unknown
  Obtained from environmental sample
  misc_feature (1)..(321): n is a, c, g, or t
gtgagcatccaaaatgcgcaaaccatgcncgatgggttgcgggcgccttctttaggcgatttgacttttaaatttattcgggaatttgtcgatgacatggttacggtaactgaagaggaaattattgcggcgatgcattatttgtggacaaggcagaanatagtcgttgagccttcgggtgcagtaccgctcgcgccggttttgtttaaaaaaattcctggtatgacggacaatcgggttggcgtaattttaagcggcggcaatgtggacgttatcgaagccggagagttgttcaaaaaaatgaaatccgcggataattaa

SEQ ID NO: 30852 - protein, 106 aa, Unknown
  Obtained from environmental sample
  misc_feature (1)..(106): Xaa is any amino acid
MSIQNAQTMXDGLRAPSLGDLTFKFIREFVDDMVTVTEEEIIAAMHYLWTRQXIVVEPSGAVPLAPVLFKKIPGMTDNRVGVILSGGNVDVIEAGELFKKMKSADN

SEQ ID NO: 30853 - DNA, 627 bp, Unknown
  Obtained from environmental sample
  misc_feature (1)..(627): n is a, c, g, or t
atggcagccgtctatgcggaagtatgtcagattgtagttagcgcttcttccggaatcaggtctgttgcggatcttaaaggcaaaagtgtgtcggttggggacgtaggaagcggcaccgagattaatgcccggcatatacttgatgcttatggccttgcctatagcgacatcacagtacagaaccttggtgtaggcccatccgctgacgcccttagggacaacaagatcgacgccttctttttcaccagcggcgctcctgctgcgggtattaccgatcttgcttctgccaaagatattgtacttttggaaattgacgacgcccatgtcactcagcttagagccaagtatccgtcctatactcagtatgcgatacctgcagctacctacaggggacagaatgccgctgtaaaaacagttgcgataaaagcgactttcattgtttcttccaagcttccagaaaatacagtttacaccattaccaaggctttatttgaaagcaaggctcagattgaactggcccatgttaaaggcaaagaacttgccctttcatacgccgtggatggtattccggttgatttccaccctggcgcgttaaagtattacaaagaagttggtgctataaagtaa

SEQ ID NO: 30854 - protein, 208 aa, Unknown
  Obtained from environmental sample
  misc_feature (1)..(208): Xaa is any amino acid
MAAVYAEVCQIVVSASSGIRSVADLKGKSVSVGDVGSGTEINARHILDAYGLAYSDITVQNLGVGPSADALRDNKIDAFFFTSGAPAAGITDLASAKDIVLLEIDDAHVTQLRAKYPSYTQYAIPAATYRGQNAAVKTVAIKATFIVSSKLPENTVYTITKALFESKAQIELAHVKGKELALSYAVDGIPVDFHPGALKYYKEVGAIK

SEQ ID NO: 30855 - DNA, 861 bp, Unknown
  Obtained from environmental sample
  misc_feature (1)..(861): n is a, c, g, or t
ttgagggcctcggcttctaccggcggacaaatcatgcctcccatcatgggggccgccgcctttcttatggcggaattaaccggtaccccatacgctacgattgcggtagccgccattttgcccgctgtgctttactttacaggaattttcctgatggtgcattttgaagcgaagaaactgggcttaaaggggcttccgaaagaatcgataccgcatttcgggcggctaataattacaaagggctttttgtttattccgataattgctcttgttggtatgatgacattaggctttacgccggctttctccgcctgtttcggtattctcgcggctttcctggttagttttatcagaaaggaaacccgctttaccggagcgactctggtggaagccctcgcaggcggctcccgcaacaccataggcgtagccgtggcatgcgccatggcgggtatcattgtcggtattgtaaccctgacggggattgggcaaacccttatcggcgcgctgataggcgttgtaaacaaccccttctttctttccaccggtacaagccttttggtggctttgtttattacgatgattgcctgtctaattttaggaatgggagtccccacaaccgccaactacgtaatcatggctacaattactgccccaatggttttacgaacaggaagggaactgggaattgttgtgccattgatagcggcccacatgtttgtcttttacttcgggattatcgcggacatcaccccgcctgtagccctggcggcttacgcaggttcggctatcgcgaagagcaaccccatcaagaccggtcttacggccagcaggcttgccatcactcgtgccaatctgtactga

SEQ ID NO: 30856 - protein, 286 aa, Unknown
  Obtained from environmental sample
  DOMAIN (1)...(286): DctM-like transporters
  misc_feature (1)..(286): Xaa is any amino acid
MRASASTGGQIMPPIMGAAAFLMAELTGTPYATIAVAAILPAVLYFTGIFLMVHFEAKKLGLKGLPKESIPHFGRLIITKGFLFIPIIALVGMMTLGFTPAFSACFGILAAFLVSFIRKETRFTGATLVEALAGGSRNTIGVAVACAMAGIIVGIVTLTGIGQTLIGALIGVVNNPFFLSTGTSLLVALFITMIACLILGMGVPTTANYVIMATITAPMVLRTGRELGIVVPLIAAHMFVFYFGIIADITPPVALAAYAGSAIAKSNPIKTGLTASRLAITRANLY

SEQ ID NO: 30857 - DNA, 801 bp, Unknown
  Obtained from environmental sample
  misc_feature (1)..(801): n is a, c, g, or t
gtgatccactttgacattgatcccgcagaggtgggcaagaacattgaaacccacgcgtgggtggtgggaaatttaaaagacacccttaaaagccttttgtcaaaacttcccccgcgccttaaaaccgaatgggacggagagattgacaaatggaaaacccatctgccccagacttacacccatgaggttacctttgcgaagaacgcgctccacccgcgttttattatcgaagaaaccgcgaaacaactcggcccagaaacaatcgccgtcaccgacgtgggccagcatcagatgtggacggcgcagtttttccccgccgagaagccgagatcattcatcagctcgggggggcttggaactatgggctttggccttggcgcagcctgcggcgcgaaagtggcgaaccctgaaaaacccgtggcgcttttcaccggtgacggcagtttcaggatgaactgcgccgagatggcgaccctaagcaacaataaaattccgcttttaataattatttttaacaacggagttctgggtatggtaaggcagtggcagagtttcttttacgaaggccgttattcgcagacaactctgggggcgtatcccgactttttaaaactctgcgacgcctacggtataaaaggtttccgcgccggcaacagggaatctttcaggaaggccctccacgccgccgccgaagaactgtccgccggaagggccgctctaatcgaagccgacatagaccgcgatgaaaacgtattaccgatggtcccgtccggaaaacccatagacgaacaaattctgtga

SEQ ID NO: 30858 - protein, 266 aa, Unknown
  Obtained from environmental sample
  DOMAIN (92)...(243): Thiamine pyrophosphate enzyme, C-terminal TPP binding domain
  misc_feature (1)..(266): Xaa is any amino acid
MIHFDIDPAEVGKNIETHAWVVGNLKDTLKSLLSKLPPRLKTEWDGEIDKWKTHLPQTYTHEVTFAKNALHPRFIIEETAKQLGPETIAVTDVGQHQMWTAQFFPAEKPRSFISSGGLGTMGFGLGAACGAKVANPEKPVALFTGDGSFRMNCAEMATLSNNKIPLLIIIFNNGVLGMVRQWQSFFYEGRYSQTTLGAYPDFLKLCDAYGIKGFRAGNRESFRKALHAAAEELSAGRAALIEADIDRDENVLPMVPSGKPIDEQIL

SEQ ID NO: 30859 - DNA, 876 bp, Unknown
  Obtained from environmental sample
  misc_feature (1)..(876): n is a, c, g, or t
gtgattcaaatgaaagcgtatatagatatagttcaaaaaattcttaatagcggctatcgtaaaacaaaccgtaccggggttgacgcccttactatcgccggggcgatgtttgagcatgatatggcggaggggtttcctttgctgactacaaaaaaagtgcctttccggttggttgcgtctgaattggaattttttattcgcggcattacagacaaagagtggcttaaggagcggaataaccatatctgggacgagtggtgcagttctgacgcggttgcttatggtaatgatgagcagacgaaggcaaagatgatgaatgagcgcgagcttggtcccatatacggatggcagtggcgcaattttggcgcgaagtatacggcgcatgatgttcccgcgcaggggcagggagttgatcaactgaaagcgcttgtacaaactcttaaaacagatactgataacagacgcatgattgtaagcgcgtggaatccaatcgaccttccgcgtatggcgttgcccccgtgccattatgcatttcaggtaacggtaattgacggtaaagtgaaccttctttggaatcagcgttccgtagatgtcgctctgggactgccttttaatattgccagttacggatgtcttcttcacctgcttgcgaaagaagctgggcttggcgagggcaaactgatcggctttttaggtgatacgcacatttatgttaatcatatcgaagggattcgcacacagatagggcgcgttccaaaaactttgccgcgaataaagacggatgcatttacttctatttttgactggcattacaccgacacggttatcgaagggtacgatccccatccggcgataaaatttgacattgccgtttag

SEQ ID NO: 30860 - protein, 291 aa, Unknown
  Obtained from environmental sample
  DOMAIN (2)...(291): Thymidylate synthase
  misc_feature (1)..(291): Xaa is any amino acid
MIQMKAYIDIVQKILNSGYRKTNRTGVDALTIAGAMFEHDMAEGFPLLTTKKVPFRLVASELEFFIRGITDKEWLKERNNHIWDEWCSSDAVAYGNDEQTKAKMMNERELGPIYGWQWRNFGAKYTAHDVPAQGQGVDQLKALVQTLKTDTDNRRMIVSAWNPIDLPRMALPPCHYAFQVTVIDGKVNLLWNQRSVDVALGLPFNIASYGCLLHLLAKEAGLGEGKLIGFLGDTHIYVNHIEGIRTQIGRVPKTLPRIKTDAFTSIFDWHYTDTVIEGYDPHPAIKFDIAV

SEQ ID NO: 30861 - DNA, 483 bp, Unknown
  Obtained from environmental sample
  misc_feature (1)..(483): n is a, c, g, or t
atggaaattatcatcattgccgctatggcggaaaatcgtgtaatcggcaaaaacaacgcgctgccctggtcgctgaaagcggatatggcccatttcaaagaattgaccaccggctggccctgtatcatgggcagaaaaacctgggaatccctgccgaagcgcccgctgccggggcggcccaatatcatcatttcgcggtcgctccccgcggatgccgcgccgcaagcggctgtgttttcttcactgcaggaggctgttcagcattgcgcggactatcaaaaaatttttatctgcggcggcgcgtcaatttaccgcgaggcgctgacgctggcgcataaaattgaactgacggtgatacatcaacaatacgaaggcgatgctttttttccggaaattgatccggcacagtggataaaaaccggcgcagttgattttgaagggttttcgtttgttagttatgagaaactgtacaaaaactcataa

SEQ ID NO: 30862 - protein, 160 aa, Unknown
  Obtained from environmental sample
  DOMAIN (2)...(155): Dihydrofolate reductase
  misc_feature (1)..(160): Xaa is any amino acid
MEIIIIAAMAENRVIGKNNALPWSLKADMAHFKELTTGWPCIMGRKTWESLPKRPLPGRPNIIISRSLPADAAPQAAVFSSLQEAVQHCADYQKIFICGGASIYREALTLAHKIELTVIHQQYEGDAFFPEIDPAQWIKTGAVDFEGFSFVSYEKLYKNS

SEQ ID NO: 30863 - DNA, 624 bp, Unknown
  Obtained from environmental sample
  misc_feature (1)..(624): n is a, c, g, or t
atggaggatatactggatgtttacaccggaaaatatgatgaaaaccgcgttttgatatgcatggatgaagttccccggcagttgattggcgaaacacggaagccggttctggcggggcgcggcaagaccgcccgttatgatacagagtacaaacgcaatggcacgtgtgtaatttttatgtttaccgcccccttgcaaaactggagaagggcggaggtgacggagcgtcggacaagtcttgattgggcgcggcagattaaaaaactgataacggttgattttccccatgctaaaaaaattgttctggttatggataatctcaatattcatgccatagcctctctgtataaagcatttcctcctgaagaagcaagatattatcgtaatatacttgaaattcatttcactccgaaacatggcagttggcttaacatggcagaaatagaaatcaatatacttgtgaaccacggcctttcaaaacgggttccattcatgaagcagatgataaaagaagtcaccgcgtggaacaaagcccggaatcaggaggcaagtaaaatcaattggcggttttcaacagaagatgcgaggattaaacttaaacgactttatccactatttgaatag

SEQ ID NO: 30864 - protein, 207 aa, Unknown
  Obtained from environmental sample
  misc_feature (1)..(207): Xaa is any amino acid
MEDILDVYTGKYDENRVLICMDEVPRQLIGETRKPVLAGRGKTARYDTEYKRNGTCVIFMFTAPLQNWRRAEVTERRTSLDWARQIKKLITVDFPHAKKIVLVMDNLNIHAIASLYKAFPPEEARYYRNILEIHFTPKHGSWLNMAEIEINILVNHGLSKRVPFMKQMIKEVTAWNKARNQEASKINWRFSTEDARIKLKRLYPLFE

SEQ ID NO: 30865 - DNA, 615 bp, Unknown
  Obtained from environmental sample
  misc_feature (1)..(615): n is a, c, g, or t
ttgccggagggaatcttctcaagtataaacgtttatagacttcatcgagtactagtagaggacgattacttaccctatctgtacctttcaaattctcatgacggatccgcctgtctgcaagtctttttgaccggaataagggttgtgtgcaataacacccttcaggcagcattaaggacatcgaagcggaaaatctcaatttgccatctttccattatggaacaaaggaaggaggaagcaattaagacaatgggagcggcttcaaaatacttccatgaccttgagatattcgcttctcaattagccggaaagaaggtaaacatcagtaaagtccttgacaggctgtttcccgcgtccagagatatgtcaaatcgccagcttaaatccaataaagaggtaaaggacacaatcctgaatcttctaaagaacaaagacgatcttcagaacatcaaagggactgcatggggagtatacaacgcgattggcgattatcgctcaaacgcagagccgatccggagaactaaacatagtaataaaaatcatgtatatgctgttttgaatactcatgctcgcgccggacaacttcttcaccatccagtgcatattcccggttag

SEQ ID NO: 30866 - protein, 204 aa, Unknown
  Obtained from environmental sample
  misc_feature (1)..(204): Xaa is any amino acid
MPEGIFSSINVYRLHRVLVEDDYLPYLYLSNSHDGSACLQVFLTGIRVVCNNTLQAALRTSKRKISICHLSIMEQRKEEAIKTMGAASKYFHDLEIFASQLAGKKVNISKVLDRLFPASRDMSNRQLKSNKEVKDTILNLLKNKDDLQNIKGTAWGVYNAIGDYRSNAEPIRRTKHSNKNHVYAVLNTHARAGQLLHHPVHIPG

SEQ ID NO: 30867 - DNA, 900 bp, Unknown
  Obtained from environmental sample
  misc_feature (1)..(900): n is a, c, g, or t
gtgctcctgatgtacatacagtgcaactattgtctgcgcagtttcgactgcatgaatgaaagcagaccgggtgtgtcgtcaaagatacttgcgccgcatgaagcgtttgatcgatataaaatattaaaacaaaccttgaccaatttaacggtagtgggaatagcgggacccggcgacgctttggcgaattttgaggaaacctgcgagactctccgccttattcgagagtacgatccaaacgttacattttgcatcgctacaaacggacttatgctgccgcagtatgtcggcgaattaaaggcgctcggcgtaagccatgttacggtaacggtaaacgcagttgatcccaaaatcggcgcaaagatttacaagcatattcattttatgggtgaaacttttacgggaatagaaggggcgtcaatcttgatcgccaaccagcttgccggaattaaaatgctgaaagacaacggtattgtctgtaaggtgaattgcgtaacattgaaaggcatcaacgacagccatatttatgacgtaacaaaaaaggcggcggagcttggagcgtttataacaaatattatgcctcatatccccgttaaaggttccgctttcgaggaacttgagcgaatgaccaacaaagaaattgaaactttgcgtacacagtgcggagcgaatatcaaacagatgactcattgcaaacaatgccgctccgacgcggcggggacgctgacggaagatatatcgcttgattttagggagacagcgcctatggctacagaaaaaacagaaacacgcagatttgccgttgcgacaaaaacaggagcgattgttgatttgcatttcggtcacgctcaggaattttatatttacgagagcgacggcgaacaggtaaagtttatttga

SEQ ID NO: 30868 - protein, 299 aa, Unknown
  Obtained from environmental sample
  DOMAIN (4)...(182): Radical SAM superfamily
  misc_feature (1)..(299): Xaa is any amino acid
MLLMYIQCNYCLRSFDCMNESRPGVSSKILAPHEAFDRYKILKQTLTNLTVVGIAGPGDALANFEETCETLRLIREYDPNVTFCIATNGLMLPQYVGELKALGVSHVTVTVNAVDPKIGAKIYKHIHFMGETFTGIEGASILIANQLAGIKMLKDNGIVCKVNCVTLKGINDSHIYDVTKKAAELGAFITNIMPHIPVKGSAFEELERMTNKEIETLRTQCGANIKQMTHCKQCRSDAAGTLTEDISLDFRETAPMATEKTETRRFAVATKTGAIVDLHFGHAQEFYIYESDGEQVKFI

SEQ ID NO: 30869 - DNA, 585 bp, Unknown
  Obtained from environmental sample
  misc_feature (1)..(585): n is a, c, g, or t
ttgttcccgtcggatatagaacacgccgccgattgcaaacccgacataatacatataagcgtgcctgtttccgatacgcacatatattcaaaactgaaaaaagataaagattgggtcattaaccaactgtacgcttgtttggacttgatcaaaaaatataacatcccgctgtccgtcggctttgaagacgcttttcgcagtgatcctgtctttttgcggactgtcgcgaaaattttgctggatttcggcgcaaaaagaattcgcctgtccgacacagtcggcatagcgacgccttccgttatcagaaatgtttttacggaattatcatcgcatttgcagggaaaggcggagttcggttttcacgcccacaatgatttaggcatggcagtcgccaacacggtagaagcggcaaagtgcggctgtctgtatacagatgtaaccgtatacggaataggggagcgggcgggaaactgcgacttggcgaaacttgtcgccgcaagttccaatgtttttgattgggggataacgcccgaaggagcgcttaaacttcaaagggatatttttagtatcatatctcggcgataa

SEQ ID NO: 30870 - protein, 194 aa, Unknown
  Obtained from environmental sample
  DOMAIN (2)...(193): HMGL-like
  misc_feature (1)..(194): Xaa is any amino acid
MFPSDIEHAADCKPDIIHISVPVSDTHIYSKLKKDKDWVINQLYACLDLIKKYNIPLSVGFEDAFRSDPVFLRTVAKILLDFGAKRIRLSDTVGIATPSVIRNVFTELSSHLQGKAEFGFHAHNDLGMAVANTVEAAKCGCLYTDVTVYGIGERAGNCDLAKLVAASSNVFDWGITPEGALKLQRDIFSIISRR

SEQ ID NO: 30871 - DNA, 390 bp, Unknown
  Obtained from environmental sample
  misc_feature (1)..(390): n is a, c, g, or t
ttggcgggcgggcaggctataggcatgaggtctatgggtatctacgagcttgggaccgactatataaagtacgcgaagtggctggggttgaaggaagggaaggttttggcctacctcttccgcaacgccatgttgccgcagatcacggggctggcgttgagtttgggcactatgatagggggcgcgctcatcaccgagatgatcttctcctatcccgggctcggcatggccatgctcacggctattcagaacaacgactatccgatgattcaagggtgtacgctgattgttaccgtgtcggtgctcatagccaactttacggttgacatactgatcgggtttcttgatcccagagtcaaagccggccttcagatgggtaagggggtttaa

SEQ ID NO: 30872 - protein, 129 aa, Unknown
  Obtained from environmental sample
  DOMAIN (1)...(121): Binding-protein-dependent transport system inner membrane component
  misc_feature (1)..(129): Xaa is any amino acid
MAGGQAIGMRSMGIYELGTDYIKYAKWLGLKEGKVLAYLFRNAMLPQITGLALSLGTMIGGALITEMIFSYPGLGMAMLTAIQNNDYPMIQGCTLIVTVSVLIANFTVDILIGFLDPRVKAGLQMGKGV

SEQ ID NO: 30873 - DNA, 426 bp, Unknown
  Obtained from environmental sample
  misc_feature (1)..(426): n is a, c, g, or t
atgaaactgctgaaaaatttgttgaagtctccgatgtttgttattggcgcgtcgctctttttagtgacgttgcttatcgcgcttgtaggcccgctcttctacaagataacgatggccagcgtgggcgcccagtacgacgcgccctccgccaagtttgtcttgggtatggacgacttggggcgcgactacgtttcgctcctgcttttgggactcaggtcgtcgctcttcgtgggctttttggcgggggtcatcgccaccaccataggtacccttataggcatctacggcggttttaagggcggcgttgtggacgatatactcaacatggtcacgaacttgttcgtcgtcataccctcgttcgtggtgcttatccttataagcgccagtttcagcgagggggcggtcgctaacacttatagggggtga

SEQ ID NO: 30874 - protein, 141 aa, Unknown
  Obtained from environmental sample
  SIGNAL (1)...(29)
  misc_feature (1)..(141): Xaa is any amino acid
MKLLKNLLKSPMFVIGASLFLVTLLIALVGPLFYKITMASVGAQYDAPSAKFVLGMDDLGRDYVSLLLLGLRSSLFVGFLAGVIATTIGTLIGIYGGFKGGVVDDILNMVTNLFVVIPSFVVLILISASFSEGAVANTYRG

SEQ ID NO: 30875 - DNA, 414 bp, Unknown
  Obtained from environmental sample
  misc_feature (1)..(414): n is a, c, g, or t
gtgattatcggcatgacgacgtggacgtggagcgcccgcgcagtgagggcccagtcggcggcgctcaagagcaaagaccacatatcgctggccaagctcaacggcgacaacaccctgcgcgtgcttttggtgcacatcttaccgtacatattctcgtacgtgttcatggtgttcattttgcaggtgtcgtcgggcatactctccgaggcggccatctctatgatcggcctcgggcctatggacacggtgtcgctcgggactattctgaaccaggcgaagaacacgggcgcgctcggcgacggaatatggtgggcgttcattcccgccactgtcgtcatcacgttgatcgtattcgcgctgtaccttatcaatacctccatggagggtgtcttcaacccccgcctgcgcaagtag

SEQ ID NO: 30876 - protein, 137 aa, Unknown
  Obtained from environmental sample
  misc_feature (1)..(137): Xaa is any amino acid
MIIGMTTWTWSARAVRAQSAALKSKDHISLAKLNGDNTLRVLLVHILPYIFSYVFMVFILQVSSGILSEAAISMIGLGPMDTVSLGTILNQAKNTGALGDGIWWAFIPATVVITLIVFALYLINTSMEGVFNPRLRK

SEQ ID NO: 30877 - DNA, 363 bp, Unknown
  Obtained from environmental sample
  misc_feature (1)..(363): n is a, c, g, or t
atggctatatttgaggtagataaactgagtctgcactatctgacccgcttcggtcagaagatacacgccgttaccgacgtatctttcacgatggagcagggggagatactggggatcgccggcgagtcgggttgcggcaagtctacgcttgtgaacgggctgatggggctcttcattccgcccctctaccccacgagcggcgacgtgcgcgtgggcggcgagtcgctcatgaaccgcactccggaggacgtccgcgcgaacatactttcgcgtaaggtctccatgataccgcagggcgcgttcaacgcgctcaaccccacgcgcaaggtcaaggacatcgccgcggacctcggccgaatctga

SEQ ID NO: 30878 - protein, 120 aa, Unknown
  Obtained from environmental sample
  misc_feature (1)..(120): Xaa is any amino acid
MAIFEVDKLSLHYLTRFGQKIHAVTDVSFTMEQGEILGIAGESGCGKSTLVNGLMGLFIPPLYPTSGDVRVGGESLMNRTPEDVRANILSRKVSMIPQGAFNALNPTRKVKDIAADLGRI

SEQ ID NO: 30879 - DNA, 918 bp, Unknown
  Obtained from environmental sample
  misc_feature (1)..(918): n is a, c, g, or t
atggaattagttaaagcaggtgaggcagaaatagtgtcgaattgcaatgcagaaccaccgccgccgccttccagcagtagctctgtcgcactcccgccaccacctagctcttcctctacaccaccaccacccagcagtagttctagtcccagtggcggtccttgcgttttcacggcaacatcacagcaggcgttttgccaatgggacacaggatgctatctcattgatacgcgatacagcgaaccagctgggcaaacttgccaattttacgtagataactgctcaacaaatgggcaactatttgtaaatgttactaaccctggcgaaggtctaaagtgtgctaacaccggtggtatcgcgtataacaacgctggaaccttcaccgattctagaggaggaggcaaaacttacaaatgggtaaagataggtactcaaacctggatggcggaaaatttgaattatgaagtcagtggtagtaaatgccctaatgaaactgctgctaattgcgcaacacacggcagacagtacaactggacaacagctatggcaggttctgctagtacaacattaaatccaagcaaagttcaaggcatttgccctactggttggcacttgccaagcagtgccgaatggacaacattgcagaattatgtcgggacactagctggaacaaggttaaaggcaaagagtgggtggaataacagtggcaacggcactgataattttggttttctcgcgatgccaagtggatatattgaatatggcactattaatgacgtaggcaaggattttggtagtagaggtgcgtggtggacagctacgcagtataacgcccgctatgcttataataggtcaatgagcagtgatggtacttccatttacgtattagggagcagagagttatggattactcaatga

SEQ ID NO: 30880 - protein, 305 aa, Unknown
  Obtained from environmental sample
  misc_feature (1)..(305): Xaa is any amino acid
MELVKAGEAEIVSNCNAEPPPPPSSSSSVALPPPPSSSSTPPPPSSSSSPSGGPCVFTATSQQAFCQWDTGCYLIDTRYSEPAGQTCQFYVDNCSTNGQLFVNVTNPGEGLKCANTGGIAYNNAGTFTDSRGGGKTYKWVKIGTQTWMAENLNYEVSGSKCPNETAANCATHGRQYNWTTAMAGSASTTLNPSKVQGICPTGWHLPSSAEWTTLQNYVGTLAGTRLKAKSGWNNSGNGTDNFGFLAMPSGYIEYGTINDVGKDFGSRGAWWTATQYNARYAYNRSMSSDGTSIYVLGSRELWITQ

SEQ ID NO: 30881 - DNA, 384 bp, Unknown
  Obtained from environmental sample
  misc_feature (1)..(384): n is a, c, g, or t
atgaaaattttattggatatgaatatgtcacctcaatgggttgatgtattgattggtaaaggcatacctgctactcattggtctagcgtgggtttgtctagtgctagtgatatggaaattatgaattttgcgaaagaaaacgattttattgttttaacgcacgatttagattttggagcaattctctttgttacaaatgggcaaaagcccagcgttgttcaactgcggattaatgatatttaccccgaaatagattcagattatttgatttctgctttgaacactgttaaagcagagcttgaacaaggagctttgctaataatagatacgaaaaaaactcgtattagaattttaccgctagggaatgattatgaaattatctaa

SEQ ID NO: 30882 - protein, 127 aa, Unknown
  Obtained from environmental sample
  misc_feature (1)..(127): Xaa is any amino acid
MKILLDMNMSPQWVDVLIGKGIPATHWSSVGLSSASDMEIMNFAKENDFIVLTHDLDFGAILFVTNGQKPSVVQLRINDIYPEIDSDYLISALNTVKAELEQGALLIIDTKKTRIRILPLGNDYEII

SEQ ID NO: 30883 - DNA, 735 bp, Unknown
  Obtained from environmental sample
  misc_feature (1)..(735): n is a, c, g, or t
gtgcttttcggcgtttgtagcgcggtggttgaccaagttgaggcgggtgatttctacaacataaagaaagtttactcgataaacatagcctattttaacctaaacgccaagcgcgaatacttattttccggcgatataaacacgtttaaaggcgtccactacaaagacgaacaaatcccgtttgagcgggctgtctctcctaagtcaaagaaaatggttgacattcatcctgaatattaccttatcttgccgagaatgttcgatgaaaagatgcgcagcaggttcgacgagtgggtatacgtcctgaagaaatccgccgtccgcgacgacttcaaggctgccggaataaaggaggccaaagcgaagttagactatatccgaatgacgccggagcaaagaaaggtatactttaagtacatggacaaccgcagaggtgccgacagcgcgatccaaacggcggagggcaaaggcgaacttagaggcatacggaaaggcagacaggaaggtctacagaaaggcctacagaaaggcctacaggaaggcctacagaaaggcctacagaaaggcagacaagaaggcttacagaaaggcctacaaaaaggcctacagaaaggtcaggaattggaacgcgccaaactcataaaaagcctgtacgaaaacggcttaaccgttgcaaaaatcgtaaaaagcacaaaactttccgaaatcgccgtcaagcggattttaggcttgtag

SEQ ID NO: 30884 - protein, 244 aa, Unknown
  Obtained from environmental sample
  misc_feature (1)..(244): Xaa is any amino acid
MLFGVCSAVVDQVEAGDFYNIKKVYSINIAYFNLNAKREYLFSGDINTFKGVHYKDEQIPFERAVSPKSKKMVDIHPEYYLILPRMFDEKMRSRFDEWVYVLKKSAVRDDFKAAGIKEAKAKLDYIRMTPEQRKVYFKYMDNRRGADSAIQTAEGKGELRGIRKGRQEGLQKGLQKGLQEGLQKGLQKGRQEGLQKGLQKGLQKGQELERAKLIKSLYENGLTVAKIVKSTKLSEIAVKRILGL

SEQ ID NO: 30885 - DNA, 627 bp, Unknown
  Obtained from environmental sample
  misc_feature (1)..(627): n is a, c, g, or t
ttggcggacggcgggggcggttattatattaaacggtatcgccttaaccctaaccgtaaggaacgacctatgacgaccgcagaacccgccgaatcagccttcggcgtgaacaaactcatactcggcgacaacttggacgtgctcaaaacgctgccggacggatatgtcaacctcatatacctcgacccgccgttcttcagcaacaagaactacgaggtgatttggggcgacagcggggaaatacggagttttcaggacaggtgggcgggcggtatcgaccactacatcgcttggctttatgagcgtgtggagcagatgcatagggttttgaaaaagacggggagtatttatttgcattgcgattggcacgccgatgcttatatccgtgtgcttatcttagataagatattcggggagaaaaatttcggaaatgagattatttggtgttacaagagatggtctatcggagataaaatcttttgcaggaatcacgatagcattttcttttactccaaatccgatgattatacggttccatcaattattggcaccccgtgcgaccaccacattgaaaaggttcggagatcaaactatagtggtctggcttttgatgactcggggcaatag

SEQ ID NO: 30886 - protein, 208 aa, Unknown
  Obtained from environmental sample
  DOMAIN (56)...(204): DNA methylase
  misc_feature (1)..(208): Xaa is any amino acid
MADGGGGYYIKRYRLNPNRKERPMTTAEPAESAFGVNKLILGDNLDVLKTLPDGYVNLIYLDPPFFSNKNYEVIWGDSGEIRSFQDRWAGGIDHYIAWLYERVEQMHRVLKKTGSIYLHCDWHADAYIRVLILDKIFGEKNFGNEIIWCYKRWSIGDKIFCRNHDSIFFYSKSDDYTVPSIIGTPCDHHIEKVRRSNYSGLAFDDSGQ

SEQ ID NO: 30887 - DNA, 465 bp, Unknown
  Obtained from environmental sample
  misc_feature (1)..(465): n is a, c, g, or t
atgattatcagggacagctaccttcacgcgattgataataaatggcttgatcatcttgaaaatatggaagcgctgcgcgaggctgtttacctgcgccattacgcccagaaaaaccccttgacggaatacaaggtggaaggcttccagatttttgacagaatggttgacgacatacgccaggagatagcgtcgcgcctgcaccttgtgaggattcaagtcggtcccccgggcggcagcagcggcgcgagccgtcccggcaggacaataacctctcagtcggcgagccacagcagtatggcctctttcggcggcgccgctcccggagccaaaagctcaggctctcctatgggcggcgcgagcagtcccgacggcgcgaccgttatacgcagccagcccaaggtaggccgcaacgatccctgcccctgcggcagcggccggaaatacaaacactgtcacgggaagtaa

SEQ ID NO: 30888 - protein, 154 aa, Unknown
  Obtained from environmental sample
  DOMAIN (2)...(71): SecA Wing and Scaffold domain
  misc_feature (1)..(154): Xaa is any amino acid
MIIRDSYLHAIDNKWLDHLENMEALREAVYLRHYAQKNPLTEYKVEGFQIFDRMVDDIRQEIASRLHLVRIQVGPPGGSSGASRPGRTITSQSASHSSMASFGGAAPGAKSSGSPMGGASSPDGATVIRSQPKVGRNDPCPCGSGRKYKHCHGK

SEQ ID NO: 30889 - DNA, 519 bp, Unknown
  Obtained from environmental sample
  misc_feature (1)..(519): n is a, c, g, or t
gtggatcagattggccgagagagttttttaccgatgataaaggaattaatcagacaaattaccaatgccgaacctgaggaagttatctataacatggaatatatggataaaacaaaaggcgttatggtaaaagaaaagcttaattactttcaattcagagatgaaatggacaaaaaatccaaaattcttgccagttttgtccggggccctgcatataacaagctgactgcaatgacagaagagcaaattatcggctaccttgataaaaatatcagggatgttcaaagtcttcataaaactatgaacgcgcttgatgattttttcaaggcaaacgcagttaaagaagaccgtgaaaaactaaagggaattaagcctgaactgtcggcgcttaaaaacataatagttaaggctaaccagttaagatacgagtacagcgctcaaaaagaagaagaagatcaaatgaaacgtcttggaatcggtcattcagcagagcctgtagtgcttccggctgctcattaa

SEQ ID NO: 30890 - protein, 172 aa, Unknown
  Obtained from environmental sample
  misc_feature (1)..(172): Xaa is any amino acid
MDQIGRESFLPMIKELIRQITNAEPEEVIYNMEYMDKTKGVMVKEKLNYFQFRDEMDKKSKILASFVRGPAYNKLTAMTEEQIIGYLDKNIRDVQSLHKTMNALDDFFKANAVKEDREKLKGIKPELSALKNIIVKANQLRYEYSAQKEEEDQMKRLGIGHSAEPVVLPAAH

SEQ ID NO: 30891 - DNA, 1002 bp, Unknown
  Obtained from environmental sample
  misc_feature (1)..(1002): n is a, c, g, or t
atgggtaaaaaattatttgcttatttaaaattgaaaccggttttagcgctaataatttcaattcttatttttaccggaattgctttattgacagacggcaaattggccggttttatccagatacatttttataatccttcagttgtaaatttatatgtaaaagaaaatgccaaagacgcggaacttgtccaaaattatatatcttaccttaaaaataaattcgcccttacattggaagaactggcagttcgtcgaagttttaatttcaaccaatctcccgcagatatttttgaacgttcaaggatatacggaatattgatggaatcgacagtggggcttcaatctgtgcagtttgtggacagtaacggaataaggattcattattcaacttctccgcgcgatataatgagccagaatcaaaactcgacggcttatcgtaactataacgaaaacccggcatccttatcttatgaaattgtcggagttgaagatgtcgcaaacgtcaaacttacaatggacgatcaaaatgacagaattattttttcatttcctttcagggattcaatggacgttttccacgggactgcgcttttttccgtatctatcagaacatttgccgaaagacttatcgaaacgggtcggttaaaaataagcgacaatatttccctgataaatgagccgtcgggaattcttttggggagtcccgaaacgtcaaagagcgttattttcagcagggttgcggaaatttggaagaagggcattcaaggtcatataacccttgacgctgaagattccggcgtggctttttcccttatttcgacaaaaacagatcagaatttgttttttggacgtttggttgacagtaatttattttcaatttccgcgcagatgaaatttattttacaggtttccatctttttaacatttttccttgcgttctttttcctgctgaatctaaaacccagccacgcggcaattgtacggaatcgcataacgcgctga

SEQ ID NO: 30892 - protein, 333 aa, Unknown
  Obtained from environmental sample
  SIGNAL (1)...(28)
  misc_feature (1)..(333): Xaa is any amino acid
MGKKLFAYLKLKPVLALIISILIFTGIALLTDGKLAGFIQIHFYNPSVVNLYVKENAKDAELVQNYISYLKNKFALTLEELAVRRSFNFNQSPADIFERSRIYGILMESTVGLQSVQFVDSNGIRIHYSTSPRDIMSQNQNSTAYRNYNENPASLSYEIVGVEDVANVKLTMDDQNDRIIFSFPFRDSMDVFHGTALFSVSIRTFAERLIETGRLKISDNISLINEPSGILLGSPETSKSVIFSRVAEIWKKGIQGHITLDAEDSGVAFSLISTKTDQNLFFGRLVDSNLFSISAQMKFILQVSIFLTFFLAFFFLLNLKPSHAAIVRNRITR

SEQ ID NO: 30893 - DNA, 414 bp, Unknown
  Obtained from environmental sample
  misc_feature (1)..(414): n is a, c, g, or t
ttgatgatatatgtatttgatgcttgcgcccttattgcctatctgaataatgaagctggcagtgataatatctatgatttactcaaaaaagcaatagacggcgaatgtgaaatttacatgaatattgttaatcttcttgaagttcattacgctaatatccgcaatcttggaaaagaacaggcggcagtaatactcgaaaaggtattttattctcctatacaaatagtctctgatgtttctgacactgtctttcaacaatctgctcatttgaaagcgtcttataaatgttctctcgcagacgcaatcggtattgctaccgccattgatctttcaggtatttttgttactgccgatcatcacgaacttgaaattatcgcaagcaaagaaacgcttaattttttctggtttcgctga

SEQ ID NO: 30894 - protein, 137 aa, Unknown
  Obtained from environmental sample
  DOMAIN (4)...(131): PIN domain
  misc_feature (1)..(137): Xaa is any amino acid
MMIYVFDACALIAYLNNEAGSDNIYDLLKKAIDGECEIYMNIVNLLEVHYANIRNLGKEQAAVILEKVFYSPIQIVSDVSDTVFQQSAHLKASYKCSLADAIGIATAIDLSGIFVTADHHELEIIASKETLNFFWFR

SEQ ID NO: 30895 - DNA, 456 bp, Unknown
  Obtained from environmental sample
  misc_feature (1)..(456): n is a, c, g, or t
atgagcgcggacttaacagcctgtgcaggcaggggacagacatcccagcggctctggacggcagtggggccatggccgtcgcgcaaggctcccttgcggaaaggcaatccgacgacgaatcccaagccgactccacgccgattggccaatatcagcgcctccggcgtcatgcggcgcggggtgctgcataccgagaacatcagcgtgcaaaggggcgccatcaccgcaagcggcaatgcccgcatcaacctggttgactggacgctcgactgccgcctgaacgtctccaccagaaccgtttccaatgtgccggtcatctatgcgggaagtctcgacgcgcccgaacgttcgatcaacccgctgcgagctgtggcgggcactatcgggaagttgagcaacggcgtgttcggcctggtgggggatgtgctcttcgcgccgatcagactgctgcgctga

SEQ ID NO: 30896 - protein, 151 aa, Unknown
  Obtained from environmental sample
  misc_feature (1)..(151): Xaa is any amino acid
MSADLTACAGRGQTSQRLWTAVGPWPSRKAPLRKGNPTTNPKPTPRRLANISASGVMRRGVLHTENISVQRGAITASGNARINLVDWTLDCRLNVSTRTVSNVPVIYAGSLDAPERSINPLRAVAGTIGKLSNGVFGLVGDVLFAPIRLLR

SEQ ID NO: 30897 - DNA, 606 bp, Unknown
  Obtained from environmental sample
  misc_feature (1)..(606): n is a, c, g, or t
atgaaaaaccgcggcggcttgnatggcagttacgaggaagcggtaaagtccatgcgccacttcttcatggaaatgctctaccagttggcagacggtttctccgtcaacacaggatacttcaccgtacaccccaacatcggcggcacattcaaaaaccccaccgaagcccacaaccacaaggatcaccccatagacttccgctttcaggccctcgccaaactccgcgccctgaccaaagacatcgacgtggaattggaaggcatagccgaaacctccgcctacatcgacatgttcatcgatcaggaaaacgagtttataaacacccagtacgcgccggaaaacatgtttgccatccacggccataaaatcaaggtagtcggggcaatagacgccggcgtatacttcgtgccagtagaggccccccaggacgccgtccaagcggagcgtatcgcggaaaacacccccagtcgcatcaccggaatcgcgccctccacaggccacgccaaaaacagaatcgaaatccacacctggtattccggctcgggcaatacccacctcaaagcctcccgcgttataaccagcccctttattttggaagaagtgtaa

SEQ ID NO: 30898 - protein, 201 aa, Unknown
  Obtained from environmental sample
  misc_feature (1)..(201): Xaa is any amino acid
MKNRGGLXGSYEEAVKSMRHFFMEMLYQLADGFSVNTGYFTVHPNIGGTFKNPTEAHNHKDHPIDFRFQALAKLRALTKDIDVELEGIAETSAYIDMFIDQENEFINTQYAPENMFAIHGHKIKVVGAIDAGVYFVPVEAPQDAVQAERIAENTPSRITGIAPSTGHAKNRIEIHTWYSGSGNTHLKASRVITSPFILEEV

SEQ ID NO: 30899 - DNA, 321 bp, Unknown
  Obtained from environmental sample
  misc_feature (1)..(321): n is a, c, g, or t
ttgtctattttacgtatcggaatgatagtttttggaattttatttatttctataggttcaggaatgtatttcaatacccatgtaggcgtttcgccctatgatggtatcgggcttataattacaagaaaattagggcatcaaaacatgtaccgctgggtcaggattgcaacagatttgctctgtgtaggcatgggattcctgatggggaatttacccggagtgggaaccgttattatggcattttttaccggacctttattctcgttttttcgcaatagaatattggtatggggtaaaaaactaaaaattatcacttggtaa

SEQ ID NO: 30900 - protein, 106 aa, Unknown
  Obtained from environmental sample
  SIGNAL (1)...(28)
  DOMAIN (5)...(87): Uncharacterized BCR, YitT family COG1284
  misc_feature (1)..(106): Xaa is any amino acid
MSILRIGMIVFGILFISIGSGMYFNTHVGVSPYDGIGLIITRKLGHQNMYRWVRIATDLLCVGMGFLMGNLPGVGTVIMAFFTGPLFSFFRNRILVWGKKLKIITW

SEQ ID NO: 30901 - DNA, 687 bp, Unknown
  Obtained from environmental sample
  misc_feature (1)..(687): n is a, c, g, or t
gtgaaagaccatatggggtgcagccgttttttcgatcgttatgcgacatggaaggcccaggcggggaatgacgtggtgatggcgcgggatcgggagccggcgaaggaactgttcgttgattggatgggggacacccttgaatgcgtccgggacagcgagacgggaaaactgctgaaggcgcacttctttgtggcggcggtagtggattcaggctaccttgtggtactggcctacccgaatgagaagagcgagaactggatacacgcgcatgtggaaacgttcaaccggcttggcgggctgccccaggtcgtagtgccggataattgcaagaccgcggtcagcaaggcaaactattacgacccccagttaaacaaggcgtactacgaccttgcgctgtattataacatcgcggttatccccgcgcgggtccgccggccacaggataaaagtttggtggaaggcagcatagggtggctcgaaacctggcttctccaatggctgaaaggcggcggaccttcaccccggcagttttcaagcttcgccgagattaacgcggccataaaaacccgccttgcggaactggtgaagcggccgttccagaaaagggccggaagccgggaaagcgtgttcctggaacttgaccgccccgccctgcgcccgctgccgaacgcccctcggccgatctga

SEQ ID NO: 30902 - protein, 228 aa, Unknown
  Obtained from environmental sample
  DOMAIN (29)...(211): Integrase core domain
  misc_feature (1)..(228): Xaa is any amino acid
MKDHMGCSRFFDRYATWKAQAGNDVVMARDREPAKELFVDWMGDTLECVRDSETGKLLKAHFFVAAVVDSGYLVVLAYPNEKSENWIHAHVETFNRLGGLPQVVVPDNCKTAVSKANYYDPQLNKAYYDLALYYNIAVIPARVRRPQDKSLVEGSIGWLETWLLQWLKGGGPSPRQFSSFAEINAAIKTRLAELVKRPFQKRAGSRESVFLELDRPALRPLPNAPRPI

SEQ ID NO: 30903 - DNA, 465 bp, Unknown
  Obtained from environmental sample
  misc_feature (1)..(465): n is a, c, g, or t
atgccaattttcaggcaaaaaaacatccaaaattgggtgtttaacttccaacggatagtgatcaacaccatccaatatgatgttaaacacccaacgttgggtgatcaacacccaacgtttgccatcaaacacccaacgttggaagtcaaacacccaacgttgggtgatcaacatccaacgtttgggatcaaacacccaacgtttgccatcaaacacccaacgttgggtgatcaacatccaatgttagacctcaaacacccaatgttggggggcaaatgggtaatccgacgacacttgaccagtgaatccgaaaacatccgaccagaaaatccaataacatccgaccgtgaaatccggaaacatctgaccaagcaatccggcttatccggacaacggatccggtcacaaaagaccgatgaatccgataacctgtggccagagaatccggaaacacccgaccggtaa

SEQ ID NO: 30904 - protein, 154 aa, Unknown
  Obtained from environmental sample
  misc_feature (1)..(154): Xaa is any amino acid
MPIFRQKNIQNWVFNFQRIVINTIQYDVKHPTLGDQHPTFAIKHPTLEVKHPTLGDQHPTFGIKHPTFAIKHPTLGDQHPMLDLKHPMLGGKWVIRRHLTSESENIRPENPITSDREIRKHLTKQSGLSGQRIRSQKTDESDNLWPENPETPDR

SEQ ID NO: 30905 - DNA, 1161 bp, Unknown
  Obtained from environmental sample
  misc_feature (1)..(1161): n is a, c, g, or t
gtgcggatttcagaggagagtaaagacaccctcgcgcttctttcgtttctggtaaaccacagggacgaagttgccttccgtagaatggtaaacaaaccgagccgaggtgtgggtcttgccacagttgagcgtattgtcgaagaagccgcgaaggaagagcacaacgggaacctggcttttgcggcccaaagccttgcaaatcatctttcagccaaagcgcgagccggtgtagatgcttttctgaaagccattaaagccggaaaggccgccctctcacccagccaggaaaattacgatgattctgaggcatcagggccagccgccgaaaacccgctggccgcaagcggaacgaaaaactttattccaccaagcgccggaactttaagggcaggagtcgggctttccgcctgtgttataaaccttgtaaacaaaagcggaatagccgaataccatttaaccagggacgagctcaccggaaaccagcggctcggcaacctacaggaagtagcaaacgcggccagcctttacgaagcgtcagaggcgggacttttggaatttctggaacacatagagctggatcgttcaatagaagacgcctcagacggcggtgaaaacgcggtaacgcttatcaccctgcacaacaccaaggggcttgaattccgccgcgtgatcatgacaggcgttgaacagggaattttcccaagggaagacaaaagcggcgaagaccttgaagaagaaaggcggcttttttacgttggcgcgacaagagccatggacgagctttacctttgctcctgcgctttcaggcggatgttcggcaggactttaccaatgaagccgtcgctctttttaagcgaagcagacctaaatgggcttagaataatcggctccaggccgccaggcttcgggaaaaaggcgtttcaaaacagctccgttccggctgggtttcgcaacgccggcaaaaagcccacagtttcctctgatggccgctggactttgggggacagactattccatagcgatcacggctacggctcggtcacgcagattcgtgaaggcgaagacggccctgtggtaaaagtttattttgaaaccggccacgaaaagagctttttaagccttcatcaaagctcgcattacacaaaaataaaggatgactaa

SEQ ID NO: 30906 - protein, 386 aa, Unknown
  Obtained from environmental sample
  misc_feature (1)..(386): Xaa is any amino acid
MRISEESKDTLALLSFLVNHRDEVAFRRMVNKPSRGVGLATVERIVEEAAKEEHNGNLAFAAQSLANHLSAKARAGVDAFLKAIKAGKAALSPSQENYDDSEASGPAAENPLAASGTKNFIPPSAGTLRAGVGLSACVINLVNKSGIAEYHLTRDELTGNQRLGNLQEVANAASLYEASEAGLLEFLEHIELDRSIEDASDGGENAVTLITLHNTKGLEFRRVIMTGVEQGIFPREDKSGEDLEEERRLFYVGATRAMDELYLCSCAFRRMFGRTLPMKPSLFLSEADLNGLRIIGSRPPGFGKKAFQNSSVPAGFRNAGKKPTVSSDGRWTLGDRLFHSDHGYGSVTQIREGEDGPVVKVYFETGHEKSFLSLHQSSHYTKIKDD

SEQ ID NO: 30907 - DNA, 312 bp, Unknown
  Obtained from environmental sample
  misc_feature (1)..(312): n is a, c, g, or t
atgactaaaatggctgatcataatgaagagcttttgcgcctgctgcccatggtgcttcgggccagggattttcacctctataccgagggagggaaaaggctcgtcgatctatggctccaggggggtagggcggttcttggtcacaagccgccagggtttttgctggaacttaaaaacgccgcagaacgtgggctttttagcaccttcccccacccattggaaaggcgacttacaaaagccctcactgtgtttttccccgaccgctcattccgctattataacgatcctctctcagtgtttcacgccccttag

SEQ ID NO: 30908 - protein, 103 aa, Unknown
  Obtained from environmental sample
  misc_feature (1)..(103): Xaa is any amino acid
MTKMADHNEELLRLLPMVLRARDFHLYTEGGKRLVDLWLQGGRAVLGHKPPGFLLELKNAAERGLFSTFPHPLERRLTKALTVFFPDRSFRYYNDPLSVFHAP

SEQ ID NO: 30909 - DNA, 498 bp, Unknown
  Obtained from environmental sample
  misc_feature (1)..(498): n is a, c, g, or t
atgtttatagacataatagttttcgcgttgctcggcgttttcttgacactgggtgttatgcaaggcttcatagttagtgcgctttatttggcggcttggattattggtataatatctgcatggcttttttctggagcatttggcattatgctaagatccaatatagaaggcttggctcccctagtggctttatgccttggcgcattcatagcttttatgctcccctttttgctaattcgcatagcggctgcggtggcaagttttttcataaaaaaatcatcacctttaacaatggtaaatcgcatattaggtggagtttttggcatattgaagggagctgcggtagctgcaattatattaaccattgtccattttttgccagcacaaggcagcttaaagcaagccagagaaaaatctttttcttattcaatatacaaagtcattccttttgccggtttgtggaaagaatttaaaacagaacaggaaattaaaatatga

SEQ ID NO: 30910 - protein, 165 aa, Unknown
  Obtained from environmental sample
  SIGNAL (1)...(27)
  DOMAIN (2)...(160): Colicin V production protein
  misc_feature (1)..(165): Xaa is any amino acid
MFIDIIVFALLGVFLTLGVMQGFIVSALYLAAWIIGIISAWLFSGAFGIMLRSNIEGLAPLVALCLGAFIAFMLPFLLIRIAAAVASFFIKKSSPLTMVNRILGGVFGILKGAAVAAIILTIVHFLPAQGSLKQAREKSFSYSIYKVIPFAGLWKEFKTEQEIKI

SEQ ID NO: 30911 - DNA, 771 bp, Unknown
  Obtained from environmental sample
  misc_feature (1)..(771): n is a, c, g, or t
ttgaagctttcgacgttcgcagccccaaagtcacaaaagaggctgtatccctatataaaagcgctcccgggcggttaccggaacttggagttcgggtcgcaggataaaatgtacggcgagctggatttggataggcagggcgggtgcgtgagggacgtagaccactgctattttaaggacggcggcttagccgtgctatttggcaacatcgctaagcgcggttgcatagtcaagaccgccggcgtcgatgaatcgatcttcaaattcagcggaacggccaagatttacaactcccaggaggccgcctgcgacggaatcctcggcggggagatcaaggcgggcgacgtggtcgtaatttgctacgagggcccaaggggcggccccggtatgcaggaaatgctctatcccacctcatacataaaatcaatccacttaggaaaagagtgcgcccttatcaccgacgggcgcttctccggcggaacgtccggactctccatcgggcacatatcgccggaagcggcgagcggcggggaggttgccttaatcaggaccggcgacattattgatattaacattccggagcgtaccataaatgtgcgggtagacgccgctgaactggagaagcggcgtgccgaggagttagcgaagggcaaggaagcgtttaaaccggcgggccgtaaccgcgttatatctccggcgcttagggcctacagcctctttgccgcgtcggcggacgagggggcggtgagggtgctgccggagggggtttga

SEQ ID NO: 30912 - protein, 256 aa, Unknown
  Obtained from environmental sample
  DOMAIN (1)...(251): Dehydratase family
  misc_feature (1)..(256): Xaa is any amino acid
MKLSTFAAPKSQKRLYPYIKALPGGYRNLEFGSQDKMYGELDLDRQGGCVRDVDHCYFKDGGLAVLFGNIAKRGCIVKTAGVDESIFKFSGTAKIYNSQEAACDGILGGEIKAGDVVVICYEGPRGGPGMQEMLYPTSYIKSIHLGKECALITDGRFSGGTSGLSIGHISPEAASGGEVALIRTGDIIDINIPERTINVRVDAAELEKRRAEELAKGKEAFKPAGRNRVISPALRAYSLFAASADEGAVRVLPEGV

SEQ ID NO: 30913 - DNA, 717 bp, Unknown
  Obtained from environmental sample
  misc_feature (1)..(717): n is a, c, g, or t
atgatcagatggccgagctgccgcaatcgacgtcataaaggtaaggagagcgcagacgaagcgttgcgcaccgccaacgacctaaaacgcgaaaacgaggcgctcaacgcgaagattacggagtttgacaaccgcctgattctcctatccgaggaggtgtcaaacgtttccacggccaagatagaggagcttgaaacgcgtttggcgctcctcaccgaggcctacaaagagatgttcgttaagctgcagggtatagagattgcgatacgccccgtgcccaagccggccccgccgccgcccaacaggtctaccttcaccacaacgtcggacgggctaattctggcgtcgccggagtacgagatgttccaaaccggtctgcgcctcttcaacaatcgcagttacgaaaagtctctgtccatgttcatagaatgcctagccaagtttcccgatggcgagtaccgcgatagggtgcagtactggataggggagtgcaactaccagctaaaacggatggatcaggcgattgaggcctacaagaaggtgttcacttaccaaaactccaccaaggccgacgccgctcaattccagatagcgctggcgtatcagaagatggggcagacggagaaggcgaagtcggaattcaggaggctggttgagaggtatccggccagtagctacgtggagagggcgaagaagtatatttctgaacttaaatga

SEQ ID NO: 30914 - protein, 238 aa, Unknown
  Obtained from environmental sample
  DOMAIN (191)...(224): Tetratricopeptide repeat
  misc_feature (1)..(238): Xaa is any amino acid
MIRWPSCRNRRHKGKESADEALRTANDLKRENEALNAKITEFDNRLILLSEEVSNVSTAKIEELETRLALLTEAYKEMFVKLQGIEIAIRPVPKPAPPPPNRSTFTTTSDGLILASPEYEMFQTGLRLFNNRSYEKSLSMFIECLAKFPDGEYRDRVQYWIGECNYQLKRMDQAIEAYKKVFTYQNSTKADAAQFQIALAYQKMGQTEKAKSEFRRLVERYPASSYVERAKKYISELK

SEQ ID NO: 30915 - DNA, 519 bp, Unknown
  Obtained from environmental sample
  misc_feature (1)..(519): n is a, c, g, or t
atgaaactgcttgtcttctatccccagcctgtcgaagaactggatatcgtaaaaaacagcccgcctttatcttcagtttcagctaacaagggcgcggcgcttaatcctgtgctgaacagggaaaaacttaatcttttgcgtaacgcggcggattccgtccacattgacgaagaaataagcaaatacatagtgtctgttgtaaccgccacgcgccccgcgtcaacaaggcaggctccggcagatccagcgcaaaggacggaaaccgtaaaaacagacgcggaaagcgtgtaccgttatgtgtcattcggggcgtctccccgggcttccatcgcgctttaccggtgcagccgtattctcgccatgtttgagggacataactttgtaagccctgaggacgttaaaacggcagtctttccggtgttacgtcacaggattgtgctttcttatgaagcggaagcggaaggcatggacgcggacgcggtcataacaagaatattaagccatgtccccgttccgtaa

SEQ ID NO: 30916 - protein, 172 aa, Unknown
  Obtained from environmental sample
  misc_feature (1)..(172): Xaa is any amino acid
MKLLVFYPQPVEELDIVKNSPPLSSVSANKGAALNPVLNREKLNLLRNAADSVHIDEEISKYIVSVVTATRPASTRQAPADPAQRTETVKTDAESVYRYVSFGASPRASIALYRCSRILAMFEGHNFVSPEDVKTAVFPVLRHRIVLSYEAEAEGMDADAVITRILSHVPVP

SEQ ID NO: 30917 - DNA, 957 bp, Unknown
  Obtained from environmental sample
  misc_feature (1)..(957): n is a, c, g, or t
atggaaacaagcgatttactgcggactattatcaaccttccccttttttcaagaagtcttgccgatgaaatgctcgcgggaaatttcagctctatctttaagggacagggaatggaatttgacgaagcgcggcattatgagcttggcgacgatataagatcgatagactggaatgcaagcgcgcgctttggcgtcccgtttgtaaaaatgttccgcgaagaaagagagttaacaattttaattttactggacgtttccccgtctatgcataccaaaaacaccgttcgcatgaacgatgcccgctgcagcggaagcatcaccccttatgagcagggactcatctgcgcggcgttaatcgctttttccgccgaacacacggatcagcagttaggcgcatttttatttgacagcaacatagaaaaaatcttcccgccgcataaaggacgcaaacatataatgtccatgataatggccgccctgcggtatcagaagcaaattaatccgcgcagggacaaacacggcagcaacatagccgatgcactcgccggcgcccagcgtcttttaaaaagacgctcgcttatcattgttatttccgactttttcagcgttaactgggagcatgaaatggcaagccttggccgcaaacacgacgttatcgccttgcgtgtaattgatcctcccgatcttccgtggaaaggattgataacgcttgaagaccccgaaacaggagcgcatctggaagcgccggcgggaatggattcttttaaagaaagctggctgcaatggcacaaagagcgttccggcctttgggaaaacctttgcaaacgcgcaggagcgtcttttctggaacttacaaccgaagaagacgcgccttcttccctgttaaaatttttcggctcgcgcggattcccggcgcatggattgggcaggcatgaggggcgcaagtacaaaaaatga

SEQ ID NO: 30918 - protein, 318 aa, Unknown
  Obtained from environmental sample
  misc_feature (1)..(318): Xaa is any amino acid
METSDLLRTIINLPLFSRSLADEMLAGNFSSIFKGQGMEFDEARHYELGDDIRSIDWNASARFGVPFVKMFREERELTILILLDVSPSMHTKNTVRMNDARCSGSITPYEQGLICAALIAFSAEHTDQQLGAFLFDSNIEKIFPPHKGRKHIMSMIMAALRYQKQINPRRDKHGSNIADALAGAQRLLKRRSLIIVISDFFSVNWEHEMASLGRKHDVIALRVIDPPDLPWKGLITLEDPETGAHLEAPAGMDSFKESWLQWHKERSGLWENLCKRAGASFLELTTEEDAPSSLLKFFGSRGFPAHGLGRHEGRKYKK

SEQ ID NO: 30919 - DNA, 960 bp, Unknown
  Obtained from environmental sample
  misc_feature (1)..(960): n is a, c, g, or t
ttggttcaaaaggacgggcgttataattccttggcgctacaaaaccgcccccgatgttttggatcccgcgctttttacgtcccggcccgttttgacaggcaggtagtagtcgcgatgcctgacataaaggagcgtgaggctattttgcagattcacgccgctaaaataccgcttgaaaaagacattgaccttacacgcatcgccagagcaacgccaggaatgagcggcgctgatatcgccaatcttgtaaatgaagcggcgttgtttgccgcccgtaaggataaacctgaagtgcaaatggcggattttgaagaagcgagggacaaggtgctgatgggcgttgcccgtaaaactcttgtcatatcggataaagaacgcaggatgactgccatccatgaagccggacatgccctgcttcattatttcctgaaaaacgcggatcccctgcacaaggtaacgattgttccgcacggcagagcactgggtatggccctttccctgcccgaagaagacagttacagccggtcaaaaggctggatagaggatcgaatctctatctgttacggtggctggcttgcggaaaaacttttcttcgaagaaactacgacaggaaccaagaacgatattcaacaggctactgaaatggcgcgtaacatggtatgcgaatggggcatggctgaagaactcggtcctgtggcctacggtcaggaagatgagccgattttccttggaaaggaaattgcgagacacaaggattattctgaagacactgcgcagcgtatagataaggcggttacgaagactcttgaacgcgcaagaaataacgcttgtaaaattttagaaagccgtaaaacggaactggaaaaacttgcggacgccctgcttgcgcgcgagacattaatagacgacgaagtcagggaaatcttgggtcttggccctaaagggagctctgaattatga

SEQ ID NO: 30920 - protein, 319 aa, Unknown
  Obtained from environmental sample
  DOMAIN (98)...(308): Peptidase family M41
  misc_feature (1)..(319): Xaa is any amino acid
MVQKDGRYNSLALQNRPRCFGSRAFYVPARFDRQVVVAMPDIKEREAILQIHAAKIPLEKDIDLTRIARATPGMSGADIANLVNEAALFAARKDKPEVQMADFEEARDKVLMGVARKTLVISDKERRMTAIHEAGHALLHYFLKNADPLHKVTIVPHGRALGMALSLPEEDSYSRSKGWIEDRISICYGGWLAEKLFFEETTTGTKNDIQQATEMARNMVCEWGMAEELGPVAYGQEDEPIFLGKEIARHKDYSEDTAQRIDKAVTKTLERARNNACKILESRKTELEKLADALLARETLIDDEVREILGLGPKGSSEL

SEQ ID NO: 30921 - DNA, 582 bp, Unknown
  Obtained from environmental sample
  misc_feature (1)..(582): n is a, c, g, or t
ttgtgttacaaacgccacttgcggcgcgtgccttggaatgtccaacggcgtacttgcagaaggcgaggtttgcgcttccactaccaaccgcaatttttacggacgaatgggctccggcggcatggttcacctcatgagtcccgcgtccgccgcggcggcggctttagcgggcatgattaccgcaaggaggccggcatgaaaatatttggcggagaagtcttatttcttgatcgaaacgatattaacaccgatgaaattatcccggcaaagtatttaaccgaggacacaagaatagcgttaaagccccatcttcttgaagacttaaaattaaaaggctttaatccaacgaaggacattgcgggaaagggagctgtacttgcacgggcaaacttcggctgcggctcatcgcgggaacacgctccgtgggcgcttgaagtgaacggcatcaacattgtcatagcagaaagttttgcccgtatcttcagacagaatatgtacaactgcggcatgatcgcctgcgaactttccgccgcagccctggacgaactgttcaaggaattcgccaacatcaaaacaacttga

SEQ ID NO: 30922 - protein, 193 aa, Unknown
  Obtained from environmental sample
  DOMAIN (66)...(178): Aconitase C-terminal domain
  misc_feature (1)..(193): Xaa is any amino acid
MCYKRHLRRVPWNVQRRTCRRRGLRFHYQPQFLRTNGLRRHGSPHESRVRRGGGFSGHDYRKEAGMKIFGGEVLFLDRNDINTDEIIPAKYLTEDTRIALKPHLLEDLKLKGFNPTKDIAGKGAVLARANFGCGSSREHAPWALEVNGINIVIAESFARIFRQNMYNCGMIACELSAAALDELFKEFANIKTT

SEQ ID NO: 30923 - DNA, 1131 bp, Unknown
  Obtained from environmental sample
  misc_feature (1)..(1131): n is a, c, g, or t
gtgatagatcatgtatcgccggcaaaggactcgcaaactgcgcagcagggaaaaacattgcgggactgggttcggcggcacaacattaaagacttttttgacattgggcgcaatggtgtctgtcacgctatttttccggaaaagggatttgtccgccccggatttacgattataatgggcgacagccacacctgtacccacggcgcgttcggcgcttttgccgcgggagtcggaaccaccgatcttgaggtgggtatactgaaaggcgtctgcgccttcggcaagcctgaaactttgcggatcaatctgcttggagaactgccgtccggcgtttttcccaaagacgtaatcctcgctgtcatttcaaaaataagcgtctccggcgcttcgggaaaagttatggaattgcgcgggcctgtaatttccgccatgagtatggaaggcagaatgacaatctgtaacatggcagtagaagcgggagctaccagcggcgtatgtatgcccgatataaccaccgtaaattacctgtggccgtttatcgggccggacgctagcgccgcaggcgatggtgataaaacttattcaagcaaagaagaagctcttaaagatttttcaaaatgggcaagcgatgatgacgcggattattcgggcgttatcgatattgactgctcaaaactggagccgcttgcgacaaccggctacaagcccgatgaagtaaaacctgtgcgggaacttgcgggaacaaaaatcgatcaggtttacatcggctcctgcaccaacggcagaatcgaagaccttcgcgccgccgcagatgtactgtgtggcaaaaaaatcgcagactcggtacgcgcgataatagcgcccgctaccacagacatttacgctcaggctctcaaggaagggctgatacagactttccttgacgccggctgttgtgttacaaacgccacttgcggcgcgtgccttggaatgtccaacggcgtacttgcagaaggcgaggtttgcgcttccactaccaaccgcaatttttacggacgaatgggctccggcggcatggttcacctcatgagtcccgcgtccgccgcggcggcggctttagcgggcatgattaccgcaaggaggccggcatga

SEQ ID NO: 30924 - protein, 376 aa, Unknown
  Obtained from environmental sample
  DOMAIN (1)...(368): Aconitase family (aconitate hydratase)
  misc_feature (1)..(376): Xaa is any amino acid
MIDHVSPAKDSQTAQQGKTLRDWVRRHNIKDFFDIGRNGVCHAIFPEKGFVRPGFTIIMGDSHTCTHGAFGAFAAGVGTTDLEVGILKGVCAFGKPETLRINLLGELPSGVFPKDVILAVISKISVSGASGKVMELRGPVISAMSMEGRMTICNMAVEAGATSGVCMPDITTVNYLWPFIGPDASAAGDGDKTYSSKEEALKDFSKWASDDDADYSGVIDIDCSKLEPLATTGYKPDEVKPVRELAGTKIDQVYIGSCTNGRIEDLRAAADVLCGKKIADSVRAIIAPATTDIYAQALKEGLIQTFLDAGCCVTNATCGACLGMSNGVLAEGEVCASTTNRNFYGRMGSGGMVHLMSPASAAAAALAGMITARRPA

SEQ ID NO: 30925 - DNA, 426 bp, Unknown
  Obtained from environmental sample
  misc_feature (1)..(426): n is a, c, g, or t
atgttcggtccggcgggacggacgtatgtatacttcatatacggaatgtaccactgcctgaacatagtcagcggcaaagagggcgagggcgaagccgtgctgatccgcgccttagagcctatagagggcatagagctaatgcaaaaacggcgtaagacggataagattgaaaatctatgcaacggcccggggaaactgacgcaggctttcggcatcaccaagaaacaaaacgatatgagtttaattgacggcggggacgacgatttacggatactcaacggagaaaaaattaaagacatggaaatagcgaccgccacccgcataggcttggccaaggggcagggagatgatttgatactgcggttttatatcaaggggaatagatttgtgtcgaaggttaataaaccccgccggttatctccatag

SEQ ID NO: 30926 - protein, 141 aa, Unknown
  Obtained from environmental sample
  DOMAIN (1)...(129): Methylpurine-DNA glycosylase (MPG)
  misc_feature (1)..(141): Xaa is any amino acid
MFGPAGRTYVYFIYGMYHCLNIVSGKEGEGEAVLIRALEPIEGIELMQKRRKTDKIENLCNGPGKLTQAFGITKKQNDMSLIDGGDDDLRILNGEKIKDMEIATATRIGLAKGQGDDLILRFYIKGNRFVSKVNKPRRLSP

SEQ ID NO: 30927 - DNA, 315 bp, Unknown
  Obtained from environmental sample
  misc_feature (1)..(315): n is a, c, g, or t
ttgaaagcgcagggaattacagcagacttatataacctgcgttttttgaaacctgtcgatgaaaactatttggctgatttaatgaacacttataaacttgtaatgttcttggaagaaggaatgagagaaggcggcttcggagaatacgcagcggctctcgcgcgaagacggggctgtacggcaaaaacggaaattatcgccgtggaaagcgttttgtttgaagaggacagagcgttaggcgaaagggaagaactgcttgcggaaaacgggttggacggaaagtcgatagcgaagaatgtgttggggagattgtag

SEQ ID NO: 30928 - protein, 104 aa, Unknown
  Obtained from environmental sample
  DOMAIN (1)...(96): Transketolase, C-terminal domain
  misc_feature (1)..(104): Xaa is any amino acid
MKAQGITADLYNLRFLKPVDENYLADLMNTYKLVMFLEEGMREGGFGEYAAALARRRGCTAKTEIIAVESVLFEEDRALGEREELLAENGLDGKSIAKNVLGRL

SEQ ID NO: 30929 - DNA, 483 bp, Unknown
  Obtained from environmental sample
  misc_feature (1)..(483): n is a, c, g, or t
ttgataggtactcaaacatggatgacggagaaccttaactatgatgtaaacgttagtaaatgctatggaaacttaacagaaaactgcgacaaatacggtagattatatacttggaatgcggcatactcggcgtgccctgaaggatggcatttgccaagcaatgctgaatggaatgcattgataatagcggttggcggcacctcaacagcgggaaccaaattgaaagccaactccgatttgtggtccacaaatacaggcacagacgatttcggtttttctgccttgcctggcggtagtagctatgccggtagcagcttctcaaatgccggtgcctacggcgtttggtggacttctacggggaacggtaccgactgggctcacgtctggagaatggaaagtaacaacccgaaggcggaaagtagtagcatgggttacagggggcgaggcgacttggaaagtgttcgttgcctaaaggacaactaa

SEQ ID NO: 30930 - protein, 160 aa, Unknown
  Obtained from environmental sample
  misc_feature (1)..(160): Xaa is any amino acid
MIGTQTWMTENLNYDVNVSKCYGNLTENCDKYGRLYTWNAAYSACPEGWHLPSNAEWNALIIAVGGTSTAGTKLKANSDLWSTNTGTDDFGFSALPGGSSYAGSSFSNAGAYGVWWTSTGNGTDWAHVWRMESNNPKAESSSMGYRGRGDLESVRCLKDN

SEQ ID NO: 30931 - DNA, 369 bp, Unknown
  Obtained from environmental sample
  misc_feature (1)..(369): n is a, c, g, or t
ttgccccagcggttggcatttgcccagcaagcggaatgggaagtattggaggcaacggttggcggtgcaaaaacagcaggcaagtatcttaaatctgctagcggttggaatgaaggtgttgaaggaaaatctggcaacggcacagacaatttcggcttttccgccctgccgggcggcttcaacacttgtcccgatggttgcggtttttacgaggtcggtggacgtggtgtctggtggagtgccactgagaacaatagcgacggtgcctatgacaaggaaatgagctatctcggcgagaatatcagcatattcacaagcgacggcagcgataagagcgatatgttcagtgtccgttgcatcaaggattaa

SEQ ID NO: 30932 - protein, 122 aa, Unknown
  Obtained from environmental sample
  misc_feature (1)..(122): Xaa is any amino acid
MPQRLAFAQQAEWEVLEATVGGAKTAGKYLKSASGWNEGVEGKSGNGTDNFGFSALPGGFNTCPDGCGFYEVGGRGVWWSATENNSDGAYDKEMSYLGENISIFTSDGSDKSDMFSVRCIKD

SEQ ID NO: 30933 - DNA, 660 bp, Unknown
  Obtained from environmental sample
  misc_feature (1)..(660): n is a, c, g, or t
gtgtccgttgcatcaaggattaaccaaacctcaacaaaggagaacaaaacaatgaaaagcatcaccaaaatcacggcaaccctagccctcgccacaaccctcacactcaccgcttgcgatgaaaaagaagcagcgaaaactactacccaaccagcagcagcaaaaccagcagaaaacgctggtggaggtactgcggaaattcccaaagccaatgtcaatgtgcttctatggcctagaatgtctgctgacaaattcggctgtatgctggaaaaaactttcaattacaaagacaaacgcttcaactgctcacttaaaggatatgaaaacaaaggagacccttgcaataacacagacgagtattatgaaaagggtcctgaaattcctgataatttggttaagaatgtacatccgtggctgtctagtataggattggaatgggaaggcggcaatttgcggaatgtttcttttatattcggtcgcaaacttacagaggaacaaatgcgaaaagcgttagatttgcctccgcaaggaagtccagatccagataatataatgagaataggtgaaccgaatatttttggaggatctactgatgtcagttatttggatctaactggatttgaacatatgggagcaggagaagttgattgcggagattag

SEQ ID NO: 30934 - protein, 219 aa, Unknown
  Obtained from environmental sample
  misc_feature (1)..(219): Xaa is any amino acid
MSVASRINQTSTKENKTMKSITKITATLALATTLTLTACDEKEAAKTTTQPAAAKPAENAGGGTAEIPKANVNVLLWPRMSADKFGCMLEKTFNYKDKRFNCSLKGYENKGDPCNNTDEYYEKGPEIPDNLVKNVHPWLSSIGLEWEGGNLRNVSFIFGRKLTEEQMRKALDLPPQGSPDPDNIMRIGEPNIFGGSTDVSYLDLTGFEHMGAGEVDCGD

SEQ ID NO: 30935 - DNA, 645 bp, Unknown
  Obtained from environmental sample
  misc_feature (1)..(645): n is a, c, g, or t
atgggtcaggtagtgttatcagccagaaacaggcagaacaagggatcagcagaagccaggaaaatccgccgctcgggccgaattccagccgtgttgtatgggcgttctggaaaagcaatttccattgatttggacgctctcgaattttccaatggtataaaaaatatttccgaaagtaccattgttaaagtgcaagtggacggaaagtcctatgacgcctttgttaaggacacgcagagaaatattattgacggaaacatccttcacgttgatttttatgaagtagaaagcggcattgctttgagggccagagtttccatcaaccttaaaggaaacgccatcggcgtcagggagggaggcgttctggaatttcccctccatgaaatcgaagtggagtgcctgcccaaagatcttcccgaaaggattgaaattgatatctcgactcttggcctcaaccagtccatccacgtacgggacatacctctggccgatacaatcaggctcatctcggcctcggatcaggttgtcgctctggtgaagtacgccaaggagcaggctacggcggccccggcggaaggggaagcagcagccggtacggcagcggcaaccccggaagccgccaaggcccaggacaaagacaagtaa

SEQ ID NO: 30936 - protein, 214 aa, Unknown
  Obtained from environmental sample
  DOMAIN (6)...(92): Ribosomal L25p family
  misc_feature (1)..(214): Xaa is any amino acid
MGQVVLSARNRQNKGSAEARKIRRSGRIPAVLYGRSGKAISIDLDALEFSNGIKNISESTIVKVQVDGKSYDAFVKDTQRNIIDGNILHVDFYEVESGIALRARVSINLKGNAIGVREGGVLEFPLHEIEVECLPKDLPERIEIDISTLGLNQSIHVRDIPLADTIRLISASDQVVALVKYAKEQATAAPAEGEAAAGTAAATPEAAKAQDKDK

SEQ ID NO: 30937 - DNA, 717 bp, Unknown
  Obtained from environmental sample
  misc_feature (1)..(717): n is a, c, g, or t
atggcagaattaagagcgggcgacacccttgaaaccaccatcgggttcaagaaggtaacggtaaaaaggcccaagagcaagaaaccgggcgaaggcgacgaattgggcgacggaggccagggctgggtctacctcgtggactacggcgacaaaccaatggccctcaaatggtataagcccggagtgctgaaaaaccccggcaagttctacgccaatctgcagaacaacatcaagaaaggagcgcccacaaagtcgttcctgtggcccctcgatttggtcaagaagggggacgatttcggttacgtcatggaactgcggccccccgactacaaggacttttcccatatccttttgggcagggaactcgaaggcggccagatagtcaaactgaagtggccgggcatctcgcccaaagtttaccgccgccttaaacatcaccgccggattccgcgccctccacgccaaagagtacagctatcaggacttgaacgacggcaacttcttcatcaacctcagcgaccccgccaaactgggcgacgtgctaatctgcgacaacgacaacgtgtccgagttcggctacgcatcgggaatagccggaaaagcaaggtacatggctcccgaagtcgtgctgggcaatgccgaccccaatcccaagaccgataccttttccctcgccatagtgctgttcatgctctttgtaaccaaccacccccttga

SEQ ID NO: 30938 - protein, 238 aa, Unknown
  Obtained from environmental sample
  misc_feature (1)..(238): Xaa is any amino acid
MAELRAGDTLETTIGFKKVTVKRPKSKKPGEGDELGDGGQGWVYLVDYGDKPMALKWYKPGVLKNPGKFYANLQNNIKKGAPTKSFLWPLDLVKKGDDFGYVMELRPPDYKDFSHILLGRELEGGQIVKLKWPGISPKVYRRLKHHRRIPRPPRQRVQLSGLERRQLLHQPQRPRQTGRRANLRQRQRVRVRLRIGNSRKSKVHGSRSRAGQCRPQSQDRYLFPRHSAVHALCNQPPP

SEQ ID NO: 30939 - DNA, 309 bp, Unknown
  Obtained from environmental sample
  misc_feature (1)..(309): n is a, c, g, or t
atgaatatttttgaatcaataatgttggtttgtttcggctttgcgtggccgctttccatatataaatcatttgtttcaaaaaaaacgtcgggtaaaagcctgttattcctgttggtattgcaaataggttatgtagccggcgttttatttaaatttaccgagtatcgggataatttaaaaataaacccggacgcggctatcagcgttaacttgtatctatacattctcaattttataatgataacaatagatgaattgttatttctaagaaatcgtaaaatagaggcaatgcagacacggggcgtttga

SEQ ID NO: 30940 - protein, 102 aa, Unknown
  Obtained from environmental sample
  misc_feature (1)..(102): Xaa is any amino acid
MNIFESIMLVCFGFAWPLSIYKSFVSKKTSGKSLLFLLVLQIGYVAGVLFKFTEYRDNLKINPDAAISVNLYLYILNFIMITIDELLFLRNRKIEAMQTRGV

SEQ ID NO: 30941 - DNA, 690 bp, Unknown
  Obtained from environmental sample
  misc_feature (1)..(690): n is a, c, g, or t
ttgacaccatggcgtatactttttatttttgcgaaaaatcgatacaatataagcaaggaggaaaatatgcggacaaaaacacctgtaaataaaacaaaaaaaacctctaaaaaggctgttcgaaagatagctaaaaaaacgcccagaataattacattggacgatttaaaaaaagctcaggaagaggcatgggcagcccacaaggaaaccgaggaatcctttaaaagatttcaagaagaaactcggaaagccataaaagaaacccaaaaaaacatcggcggtcttaacaatacattgggctctcttgtcgaacatctattaacccccggtctgccaaaaaaattcaagaaattaggttattcttttaaccgcatagctacttataaatttgcggaaggcgtctacgctcaaattgacggtatgcttgaaaacggcgaacaagctgttgcggtagaagtaaaaacaacattaaggcagatggacatagacgaccacctttcacgcatggaaaaaatacgaaaatacgccgatgaacacggcgataaaagacaattcatgggcgctatggcggctacgataacggatgaaaatacaagaaattatgccttgaataaagggctttttcttatcgaaccttcaggtgaagatgtcaaagttacaaagccggaagggaaagttaaggtttggtga

SEQ ID NO: 30942 - protein, 229 aa, Unknown
  Obtained from environmental sample
  misc_feature (1)..(229): Xaa is any amino acid
MTPWRILFIFAKNRYNISKEENMRTKTPVNKTKKTSKKAVRKIAKKTPRIITLDDLKKAQEEAWAAHKETEESFKRFQEETRKAIKETQKNIGGLNNTLGSLVEHLLTPGLPKKFKKLGYSFNRIATYKFAEGVYAQIDGMLENGEQAVAVEVKTTLRQMDIDDHLSRMEKIRKYADEHGDKRQFMGAMAATITDENTRNYALNKGLFLIEPSGEDVKVTKPEGKVKVW

SEQ ID NO: 30943 - DNA, 753 bp, Unknown
  Obtained from environmental sample
  misc_feature (1)..(753): n is a, c, g, or t
atgaaagaatttggaattacctacgcggaagctgaagggctagttttgggtcttctggtactcaaactttctcttgaacaaacgggagccgcaagtatcgctgttcctcttgttacaatccgcgacggctatcttgtcgatctggtctccggcgttgattcctctttgcaggatgaattcttttcgcagattatcgcttccgcccttaaccttgggcgtaaataccattttgacgaggcgcacggcaaacttgtcgccaaccattgcatgacattatttgacgcgcttataaaagaacacggtatgaacaggcggcataaaataatgctggagacagccgctattttgcacgatgtcggcgcttacataaaagagtcgggacatcagaagcatggtcagtatattgtcgccaattcggaaattttcgggcttcatcaggacgagcttgaaataatcgccaacgtaatcaactgtcatcgcggggaaccgcccgctcattctgatcttgagtttatgacactccagcgagaggagcgcgttcttgttcttaaaatggcttccattttaagagtcgcggacgctctggatcgcggacatactcagcaagtaaaaaaaattactgtggaacgccgctcggaaacagtagtcgttcatgtggataaagtttatgatctttcccttgagcttatgggtattgaagaaaagggcggattgtttcaagatgtatttggatataaagtcatattaaactag

SEQ ID NO: 30944 - protein, 250 aa, Unknown
  Obtained from environmental sample
  DOMAIN (85)...(198): HD domain
  misc_feature (1)..(250): Xaa is any amino acid
MKEFGITYAEAEGLVLGLLVLKLSLEQTGAASIAVPLVTIRDGYLVDLVSGVDSSLQDEFFSQIIASALNLGRKYHFDEAHGKLVANHCMTLFDALIKEHGMNRRHKIMLETAAILHDVGAYIKESGHQKHGQYIVANSEIFGLHQDELEIIANVINCHRGEPPAHSDLEFMTLQREERVLVLKMASILRVADALDRGHTQQVKKITVERRSETVVVHVDKVYDLSLELMGIEEKGGLFQDVFGYKVILN

SEQ ID NO: 30945 - DNA, 999 bp, Unknown
  Obtained from environmental sample
  misc_feature (1)..(999): n is a, c, g, or t
atgacagatcggccgagttatatcgtcgccggacacggcgtcgttttgaacgagccgtccgtcgtcgccgtcatggaaaatcgtcttttggggcgtaaggaaatcctggccatcggggcagaggcgaaacaaatgcttgggcggacgcccgggacgatttcggcaatccggccgctgcgcgacggcgtcatcgcggactttgagattgcggaagagatgattaagtatttcataaggaaggttcacaagaatttcgcgcttgccgcgccgattataatcatctgcgtgccgtcgtgcgcgacccaggtggaacgccgggcgattcaagaggcggcggacagcgccggcgcaaggaaggtttatattgtggaggaatcgacggcggccgcggtgggcgccgggcttccgatcgacaggcccgtggggtcgatggttttggacatcggcggcggcacgacggaggtcgcggtcatggcgcttggcggcgtggtttataccaacgcggtgcgcgtcgcgggcgaccagatggatttggacataatcgactatgtaaggaagaacaagaatcttcttataggcgagacgacggccgaagagataaaaaagaagataggctgcgcgatcgcgcccaaggataaaaaggaagaattgtcgatgagcatcaagggccgcgaccttttgaccggcgtcccgcgcgagacgattatcaccgagacccaggtcgcgacggcgctttcccagacgacgaacaagataatagacacggtgaaacaggcgttggaacttacgccgccggaactgtcggccgacatagtggatttcggaatcgcgatgacgggcggcgggtcgatgctgcgcagccttgacctcgcaatcagaaacgcgaccaatcttccggccttcctggtcgacgaccccatgtcctgcgtcgcgcgcggctgcggcaaaatgcttatcgatatcgaaaaatcaaagcacgtccttcaaacgatgtattaa

SEQ ID NO: 30946 - protein, 332 aa, Unknown
  Obtained from environmental sample
  DOMAIN (143)...(314): Cell division protein FtsA
  misc_feature (1)..(332): Xaa is any amino acid
MTDRPSYIVAGHGVVLNEPSVVAVMENRLLGRKEILAIGAEAKQMLGRTPGTISAIRPLRDGVIADFEIAEEMIKYFIRKVHKNFALAAPIIIICVPSCATQVERRAIQEAADSAGARKVYIVEESTAAAVGAGLPIDRPVGSMVLDIGGGTTEVAVMALGGVVYTNAVRVAGDQMDLDIIDYVRKNKNLLIGETTAEEIKKKIGCAIAPKDKKEELSMSIKGRDLLTGVPRETIITETQVATALSQTTNKIIDTVKQALELTPPELSADIVDFGIAMTGGGSMLRSLDLAIRNATNLPAFLVDDPMSCVARGCGKMLIDIEKSKHVLQTMY

SEQ ID NO: 30947 - DNA, 360 bp, Unknown
  Obtained from environmental sample
  misc_feature (1)..(360): n is a, c, g, or t
ttgacctcgcaatcagaaacgcgaccaatcttccggccttcctggtcgacgaccccatgtcctgcgtcgcgcgcggctgcggcaaaatgcttatcgatatcgaaaaatcaaagcacgtccttcaaacgatgtattaacggttatgagttattagttatgagttccgagtcaaataaattatccttcgaagacgcatacaagcagttgagcgagctggtaaagaaaatggaatcgggcgctctgcctttggccgactcggacgcggcgtacgagcaggccgtcaaacttaaaacatactgcgaacagatgctgaaagccgcggaaatgaaaattgaacaactggatccaagcgcaggttaa

SEQ ID NO: 30948 - protein, 119 aa, Unknown
  Obtained from environmental sample
  DOMAIN (60)...(119): Exonuclease VII small subunit
  misc_feature (1)..(119): Xaa is any amino acid
MTSQSETRPIFRPSWSTTPCPASRAAAAKCLSISKNQSTSFKRCINGYELLVMSSESNKLSFEDAYKQLSELVKKMESGALPLADSDAAYEQAVKLKTYCEQMLKAAEMKIEQLDPSAG

SEQ ID NO: 30949 - DNA, 306 bp, Unknown
  Obtained from environmental sample
  misc_feature (1)..(306): n is a, c, g, or t
atgaaagataataagttaacccccataatgcagcagtacctggacttgaaggccgaaaatcccggcgcggttcttttgtttcgtttgggcgacttttacgaatcttttttcggcgacgccattcaggtatccaaggccttggatatcgtcctgacccagcgcggaaccgacgagcgcggcgtcgatatccccatgtgcgggattccgtggcatgcggccgacaactatttcgcccgcctggtgcggcagggcttttccgtcgcaatcgccgagcagatggaaacgcctgaagaggcccaagtctaa

SEQ ID NO: 30950 - protein, 101 aa, Unknown
  Obtained from environmental sample
  DOMAIN (7)...(101): MutS domain I
  misc_feature (1)..(101): Xaa is any amino acid
MKDNKLTPIMQQYLDLKAENPGAVLLFRLGDFYESFFGDAIQVSKALDIVLTQRGTDERGVDIPMCGIPWHAADNYFARLVRQGFSVAIAEQMETPEEAQV

SEQ ID NO: 30951 - DNA, 522 bp, Unknown
  Obtained from environmental sample
  misc_feature (1)..(522): n is a, c, g, or t
gtggctaccccctggggcgagcggtatgccagaaacggctcgtctgatcttgaaaacgaggacttnttagagacaaaagaaggctacccggttatgggtgaaaacggccctatcagggttaaagcaaacaattttcaggttgataaagaaggaaggatatgggtaaacgccgcttatcctgatgatcctgatgtgtttgtaggcagggaatccaaccaatgggaagatatggaattgctcgatacacttaaaattgtcaatttcgatctagaccgctatctggaaaaacagggaagcagtctttaccgcgaaactgaaacttccggacccgcgatggtaatacccctggacgagcgcccgaaagttttacagggctttgttgaagcttcaaatgttaaccctgtagtagagatggttcatatgatcgaagtgaaccgcgcttacgaagcgaatcaaaaaataatccagacccacgaagcaatgctgggtactttaataaatcaagtagccaaattcggctga

SEQ ID NO: 30952 - protein, 173 aa, Unknown
  Obtained from environmental sample
  DOMAIN (130)...(168): Domain of unknown function (DUF1078)
  misc_feature (1)..(173): Xaa is any amino acid
MATPWGERYARNGSSDLENEDXLETKEGYPVMGENGPIRVKANNFQVDKEGRIWVNAAYPDDPDVFVGRESNQWEDMELLDTLKIVNFDLDRYLEKQGSSLYRETETSGPAMVIPLDERPKVLQGFVEASNVNPVVEMVHMIEVNRAYEANQKIIQTHEAMLGTLINQVAKFG

SEQ ID NO: 30953 - DNA, 768 bp, Unknown
  Obtained from environmental sample
  misc_feature (1)..(768): n is a, c, g, or t
ttgggcgcggcgtcggattgggccgccgtctctgcaggcagcctgaacacagtggcactgaagaaggacggtagcctgtgggcatggggcgcgacttttgagatgggtgctatcagcaccccagagcgctttgggcgggactccagctgggtctccgtctcggcttacgatcgaaacacggtggcgctgaagtcggacggcagcctctgggtcttcgtggaccgcaagacacccctcgtccgccttgggacggactccgattggtcctacgtctggagcggaatggcactcaaagccgatggcagtctctggacctatagtttgcataactggactattcgggaagtccctgtccgcctcggggcggactcagactgggtctccgcctcgggcatggttgcgatgaagtcggacggcagcctctgggtatggggggaagacgggacaaacaccccaatccccgtggcccagaactgggtcgcggtctcggttggcgatgcccacactgtggctctgaagccggacggcagcctctgggcatgggggaacaatgagtacggtcagatcggcgactccacccgggaaaaccggaaacagcccgtccgcgtgggcgcggccaccgactgggcggctgtctcggcaggctattcccacacggtggcgctgaagaaggacggcagcctctgggcctggggatacaatggcatgggtcagtggggtctcggcgacaccgtaaaccgattggttcncactaggctgggcacgtaa

SEQ ID NO: 30954 - protein, 255 aa, Unknown
  Obtained from environmental sample
  DOMAIN (175)...(222): Regulator of chromosome condensation (RCC1)
  misc_feature (1)..(255): Xaa is any amino acid
MGAASDWAAVSAGSLNTVALKKDGSLWAWGATFEMGAISTPERFGRDSSWVSVSAYDRNTVALKSDGSLWVFVDRKTPLVRLGTDSDWSYVWSGMALKADGSLWTYSLHNWTIREVPVRLGADSDWVSASGMVAMKSDGSLWVWGEDGTNTPIPVAQNWVAVSVGDAHTVALKPDGSLWAWGNNEYGQIGDSTRENRKQPVRVGAATDWAAVSAGYSHTVALKKDGSLWAWGYNGMGQWGLGDTVNRLVXTRLGT

SEQ ID NO: 30955 - DNA, 723 bp, Unknown
  Obtained from environmental sample
  misc_feature (1)..(723): n is a, c, g, or t
atgttaacaacgcgggacgagtcgccgcgatttttatttatcggcctgatttttaagggggcagttttggcgaaaatttgcttatgtctgaccgcaaaaacaatacaaaaagatttggagatactcgacaaataccgcaagtataccgaccttgcggaattgcgcgtggactgccttgatcccgatgagcgcctgcacatacgccgctttccggaacttgccgaattgcctgttatccttacaataagacgcgattcggacggaggttattttaccggcggtgagggagcgagagtaaaattactcgcgcgcggacttgcctttgcggaggccgacagaagaaaaaatttcgcgtatgtggacattgaagaagacattgaagtgcaaagccttgaagaagcggcaagaactttcggaacaaaaatcatacgctcgtatcacaatgttgaaggaattattgataacatacccgcaaaagttaattccatgcggcggatcggggatgagattattaaaatggcgttaaaaaccaataccacaagcgatgttgcccgcgtttaccgcgccgccaaagaatgtacgattcaggataaaataattgtctgcatggggcagtacggtttttactcgcgtatactttgcgaaaaattcggttcttttatgacttattcaagcgcgttatctgaaaatgtgttcccggatccgcgggcctcggccatctga

SEQ ID NO: 30956 - protein, 240 aa, Unknown
  Obtained from environmental sample
  DOMAIN (26)...(239): Type I 3-dehydroquinase
  misc_feature (1)..(240): Xaa is any amino acid
MLTTRDESPRFLFIGLIFKGAVLAKICLCLTAKTIQKDLEILDKYRKYTDLAELRVDCLDPDERLHIRRFPELAELPVILTIRRDSDGGYFTGGEGARVKLLARGLAFAEADRRKNFAYVDIEEDIEVQSLEEAARTFGTKIIRSYHNVEGIIDNIPAKVNSMRRIGDEIIKMALKTNTTSDVARVYRAAKECTIQDKIIVCMGQYGFYSRILCEKFGSFMTYSSALSENVFPDPRASAI

SEQ ID NO: 30957 - DNA, 999 bp, Unknown
  Obtained from environmental sample
  misc_feature (1)..(999): n is a, c, g, or t
atggattctaatttagatatttccgaagtacctaaagagcttgttaattacataaagaactgctctaaattcataatcgcaggtcacaaagagccggatgtagattgtataagcagccagcttgttttgcgcagcgctcttttgcgaatgggaaaaacagcgatggtttgttcctccggtccttttaaaagggcggaaataaaggaatatttagatcaattttccactatccttccggaaacaagcagaaaagatacaaaagtaataatagttgattgctcgggaaaagaaagaacaggcgatcttagcgaaactcttaatgaattcccctgcgcggtaatagatcaccatgccgccggaactcatcagccgtcaacaaacgaggcgccggtttatatcgattcaaacgcgcctgcttgcgcggtattgatatacaaagtaattatcgcccttggacttgagttaaccgaggaagaagcgtctttacttctctttggaatttgcacagattcaggttttttcaggcatctaacggaaaaaaacgcgcaagtgtttgaattaacggcaaaattgatctcacgcggcgcaagccccaagaaaacattttataaaatgaacggcggaaaaagccttagttccagaatattattgggaaatattttatcaagaacagagtcccactatgacggcaaacttttactcagttatgagacattaagcgaatccgaaactttcgggcttgaaggcagagattccgacagtttaaatcaaatgcttttatcggtggagaatgccgaggttgttgtaataatacgccaggagttggtcgacaattgtactgtgagtttaagatcgatagataaagtcgacgtagcgcaaatagccgcgtcctttggcggaggcggacataaaaacgcgtcggggctctctatgaaaggagagatttcatttgtaaaagataaaatattagaagcatttaacaagattttccataattaa

SEQ ID NO: 30958 - protein, 332 aa, Unknown
  Obtained from environmental sample
  DOMAIN (265)...(328): DHHA1 domain
  misc_feature (1)..(332): Xaa is any amino acid
MDSNLDISEVPKELVNYIKNCSKFIIAGHKEPDVDCISSQLVLRSALLRMGKTAMVCSSGPFKRAEIKEYLDQFSTILPETSRKDTKVIIVDCSGKERTGDLSETLNEFPCAVIDHHAAGTHQPSTNEAPVYIDSNAPACAVLIYKVIIALGLELTEEEASLLLFGICTDSGFFRHLTEKNAQVFELTAKLISRGASPKKTFYKMNGGKSLSSRILLGNILSRTESHYDGKLLLSYETLSESETFGLEGRDSDSLNQMLLSVENAEVVVIIRQELVDNCTVSLRSIDKVDVAQIAASFGGGGHKNASGLSMKGEISFVKDKILEAFNKIFHN

SEQ ID NO: 30959 - DNA, 591 bp, Unknown
  Obtained from environmental sample
  misc_feature (1)..(591): n is a, c, g, or t
ttgaggtgcgagagaatcagacagaatgctttttcgggttgctacggacttaccgcaataaatgttgacgcaggtaatggctcttatacatcagagagcggcgtactatataacaaagataaaactactctaatccaatatccggcaatgaaaacaggaaccatgtataccatacctgacagcgttaccagcattgggaataacgctttttacgcttgcaaccgccttaccagcgtaaccataccggacactgttacgagcattgggaattctgttttttctaattgcagaaaccttaccagcgtaaacatacctaacagcgttaccagtattgggatcgccgcttttcaagtttgtaccagacttaccagcgtaaccatacctgccggcgttaccggcattagggactatactttttccgtttgcgacagccttaccagtgtaacctttcaaggcacgattacatcggctaatttttccagcactagtcccttcaaaggtgacttgcggacaaagtaccttgcagggggcccaggaacgtatactacaaccgcgccggtgggcgatagttcggtgtgggagaaagaataa

SEQ ID NO: 30960 - protein, 196 aa, Unknown
  Obtained from environmental sample
  misc_feature (1)..(196): Xaa is any amino acid
MRCERIRQNAFSGCYGLTAINVDAGNGSYTSESGVLYNKDKTTLIQYPAMKTGTMYTIPDSVTSIGNNAFYACNRLTSVTIPDTVTSIGNSVFSNCRNLTSVNIPNSVTSIGIAAFQVCTRLTSVTIPAGVTGIRDYTFSVCDSLTSVTFQGTITSANFSSTSPFKGDLRTKYLAGGPGTYTTTAPVGDSSVWEKE

SEQ ID NO: 30961 - DNA, 1608 bp, Unknown
  Obtained from environmental sample
  misc_feature (1)..(1608): n is a, c, g, or t
gtggggcttcgcggcgtccttcagcatttggcggcggatcacggctataagcggatcgccttcatcggcgggccggagagcaacgtggaggctaaggagcgctacgccgtttaccaagatgtgctaagagagtacgggctgccctttgaccccaacctcgtggcggtgggcgatttcaccaagtactccggcgtacgcgccgtgggcgattttttggacgtgcgcggcgtggagtttcgggcgctggccgccgcgaacgacgagatggccctaagcgcgatggaggagttgcagaggcgcgggtacagaattccggaggacatcgccgtcgtggggttcgacaacgtggagagtacccacttctcctcgcccacgctcaccacggtcgcccagcccatatacgagcaggcgtacaaagcggtggagctcgcatttgatctcataaaaggggaaccgccggtcacggtgtcgctgcccacgagtatggtgctgcgcgagagttgcgggtgcttctcacgctccgtcacctcggtctccgcccaaggcggcgccgtcggggcggccacggttagctcggacgacgagaacacggcaaagatagagaccctgttgcaaaaggcgctcagctatgccgtggagggcaagctcgacgacgcggcggatttggagatactcaaagagatgaacgaggtggtcggcgccgttgagaaccaccgccagatgaacctgcgcctatggcagaataccctgacaaacttcagggccaaagtcggcataaagactcacagcttagataccgtggtcagcatcgaagacttctttcacaaaatgcgcatgttgctcttggagacatacttcaaaaacgattcaaggcgctggagcatctacataaacgacatagtcgggttgcgcgacgtgctgagccagctgatacgcgacgtcaacaaccccaacgaagcgctgcgttcaatagtcccaaatatccgcgacatggggatatccgacttctacgtctttctccactacgcgatcgagaggcacagcataaacaccgactggtacttctccggcgaactctacttagcggtgaccgacgacaagcgccgtccggagtccgtggagataagggggcagagcgtgcaagtggcgtcgcttttggagcgcaacctctacccaaaagaccgccgctacaccttcgtggtctcggcgctcttctacatggacgagcaccttggcttcgtagtctgcgaacccgacttcgtggatatccacctcatagagtccctaatggtggagataagctgttctctgaagctcataaacttgatacaggcgagacgcacaatagagcggcagctgcagagcgcgctggaggagctggagaagtacaacgagcagctctccaacatatccgagaccgacgagatgacaaaactcctgaaccgccgcggcttcatggcccacgcccggcacatgctcggaatggcgcgccgtatgaagaaggacggactcttattcttcgccgacctcgacggcctgaaagggataaacgacacctacggccacgaggagggcgacaacgcgatcacggtagtctcggttatttga

SEQ ID NO: 30962 - protein, 535 aa, Unknown
  Obtained from environmental sample
  misc_feature (1)..(535): Xaa is any amino acid
MGLRGVLQHLAADHGYKRIAFIGGPESNVEAKERYAVYQDVLREYGLPFDPNLVAVGDFTKYSGVRAVGDFLDVRGVEFRALAAANDEMALSAMEELQRRGYRIPEDIAVVGFDNVESTHFSSPTLTTVAQPIYEQAYKAVELAFDLIKGEPPVTVSLPTSMVLRESCGCFSRSVTSVSAQGGAVGAATVSSDDENTAKIETLLQKALSYAVEGKLDDAADLEILKEMNEVVGAVENHRQMNLRLWQNTLTNFRAKVGIKTHSLDTVVSIEDFFHKMRMLLLETYFKNDSRRWSIYINDIVGLRDVLSQLIRDVNNPNEALRSIVPNIRDMGISDFYVFLHYAIERHSINTDWYFSGELYLAVTDDKRRPESVEIRGQSVQVASLLERNLYPKDRRYTFVVSALFYMDEHLGFVVCEPDFVDIHLIESLMVEISCSLKLINLIQARRTIERQLQSALEELEKYNEQLSNISETDEMTKLLNRRGFMAHARHMLGMARRMKKDGLLFFADLDGLKGINDTYGHEEGDNAITVVSVI

SEQ ID NO: 30963 - DNA, 360 bp, Unknown
  Obtained from environmental sample
  misc_feature (1)..(360): n is a, c, g, or t
atgtcaagagcagttgacggttccaaaagaaagaaccatcgaaaaaaaatattaaaactggcaaaaggttattggggaagacgcagtaccaactataaaacggcaaaagacgccgtcgccaaatctttaacttacgcgtaccgcgacagaaaagacagaaaagcgcaattccgcaaattgtggattgtaagaattaacgcggcttgcagggaaaacggactttcctattcgcggcttatcgccggtcttaacaaagcgggcataattatcgaccgtaaagcgcttgcgtggctcgcgtcggaagatacagccgcgttcaaggctgtcgccgaaaaagccaaagcggcgcttggagcgtaa

SEQ ID NO: 30964 - protein, 119 aa, Unknown
  Obtained from environmental sample
  DOMAIN (2)...(109): Ribosomal protein L20
  misc_feature (1)..(119): Xaa is any amino acid
MSRAVDGSKRKNHRKKILKLAKGYWGRRSTNYKTAKDAVAKSLTYAYRDRKDRKAQFRKLWIVRINAACRENGLSYSRLIAGLNKAGIIIDRKALAWLASEDTAAFKAVAEKAKAALGA

SEQ ID NO: 30965 - DNA, 942 bp, Unknown
  Obtained from environmental sample
  misc_feature (1)..(942): n is a, c, g, or t
atggccgagttttgcggactatgtaaaacatatttcagcccatcgggcggcaggcctcacaggacgcttttcttgctatttgaaggcgaaaatccatgcgaaaagctattgaacgtatgcggccacctttatacacagcatgtggaagtatatgcccttgccggcgagacaatccgggacacatattcggatttaatttttaacaacggcgatccaaacgacgtgcgttattttgaacccgcggttcttactcccaggaaacaggaagaggcaaatagggatttgcggcttatcgcggattttcttgaaggaaaagaaaatattgttcagaatgtgattcatccggacccttcaaaaattgaaagaacgcttgtaatcataaagcccgataactggacgcataattcatcgcgtccgggagcgattatagacatgttttcacgcaccggccttcgtattataggcgtaaaaatacatcatttttcattatcagaagcgcttgatttttacgggcctgtggaaaatgagcttaaagaaaaactggctgatacatttggaacaagggcaaaagaacttttagaaaaagaattcgcgtttaaattagatcaaaaaatgataaatattcttaatacggattttggatttcaatgcgcaaaaaaccaattccataatattatagaatttatgtccggtaaacgtcccggaacttattcagacgaagaaataaaaaaacatggacaagtaaaatgcatgatcttggtttatgaaggtgaaaacgctattcaaaaaatacgcgatgttttaggttcaacggatccgacaaaagccacgaatggcacagttcgcagagaattcggcagtcatgtaatggttaacacggcgcacgcttcggattccaaagaaagtatgagcgggagcagaagattgtcagataaatcataa

SEQ ID NO: 30966 - protein, 313 aa, Unknown
  Obtained from environmental sample
  DOMAIN (121)...(309): Nucleoside diphosphate kinase
  misc_feature (1)..(313): Xaa is any amino acid
MAEFCGLCKTYFSPSGGRPHRTLFLLFEGENPCEKLLNVCGHLYTQHVEVYALAGETIRDTYSDLIFNNGDPNDVRYFEPAVLTPRKQEEANRDLRLIADFLEGKENIVQNVIHPDPSKIERTLVIIKPDNWTHNSSRPGAIIDMFSRTGLRIIGVKIHHFSLSEALDFYGPVENELKEKLADTFGTRAKELLEKEFAFKLDQKMINILNTDFGFQCAKNQFHNIIEFMSGKRPGTYSDEEIKKHGQVKCMILVYEGENAIQKIRDVLGSTDPTKATNGTVRREFGSHVMVNTAHASDSKESMSGSRRLSDKS

SEQ ID NO: 30967 - DNA, 705 bp, Unknown
  Obtained from environmental sample
  misc_feature (1)..(705): n is a, c, g, or t
atggaagaatgtgatattgaaggcgccaggattgaaggagggcgatttggggcaaatacttccatgcttgggaaaatggcgatggaaaggggaattatgcttgaaggcgaagaagcaactgttgctcttacggcgatttatgcggatacagggcggtttatttacgagagcgtaacgcgggacgattatgaagtttcagcgtggcttttggatatgggggcttccttaagcctggtgaaatcgtttctggaaactgtcagagaggacaagcagattgcggttcttaacaggctcaggccggaaacttattcgatacagggcaatgtgatcctacttagctatctagagcttgaggaaaatgtgtccggacttgctgcggttgtggaaaagataatggatgttcaaaatcctgacgcgtattttgcgattttcttcataccccgtgataagacaatactgctcattgccagaagccagaagaaagctatcgatcttcacgccctgctttctgtttatggaggcggagggcaccagcttgcggcttcagccaaaattacgggtagagacgggcaggagttttttagcgagttctgtaattttttaaattataacatggaacctgccgccgatgttatggatattatgacaaagaatgtgtttacaatccatgaaactaccagccttaggaagcttcaatgtttttag

SEQ ID NO: 30968 - protein, 234 aa, Unknown
  Obtained from environmental sample
  DOMAIN (139)...(203): DHHA1 domain
  misc_feature (1)..(234): Xaa is any amino acid
MEECDIEGARIEGGRFGANTSMLGKMAMERGIMLEGEEATVALTAIYADTGRFIYESVTRDDYEVSAWLLDMGASLSLVKSFLETVREDKQIAVLNRLRPETYSIQGNVILLSYLELEENVSGLAAVVEKIMDVQNPDAYFAIFFIPRDKTILLIARSQKKAIDLHALLSVYGGGGHQLAASAKITGRDGQEFFSEFCNFLNYNMEPAADVMDIMTKNVFTIHETTSLRKLQCF

SEQ ID NO: 30969 - DNA, 648 bp, Unknown
  Obtained from environmental sample
  misc_feature (1)..(648): n is a, c, g, or t
atgggtttttgggcggtaacgctaaggttattacagggttttcagaccacatttcttatttttgggctgacgctcctgttcgcgttaccgctcggacttttaatttcatttggttccatgtccaggattcacccgcttaaatatattgtcaaaatttttgtatggatgatccggggcgtgccgctcatgctccagatatttatcgtgttttatgttcccggctttgtctttggcgcgccaatatcgtcgcggatcaacgcggcgattatcgccttttccattaactacgcctgctatttcagcaaaatattccggggcgggatagaaagtatttcccacagccagtacgaagcgggacaggttttggggatgacaaagtcccaggtgttttttcgcgtcgtgttgctccaggtgataaagcgaatcaccgcccccatgtcaaacgaaatcatcactctggtaaaggataccgcgctggcccgcgtgataatggtagtcgaggtaataaaagtcgccgagacttttgccgcgacgagggcgatgatctggcccctgttttataccggagcgttttatttgttgtttgtgggaatcctcactttgttgtttggatatattgaaaaacgattgagttatttcagggcataa

SEQ ID NO: 30970 - protein, 215 aa, Unknown
  Obtained from environmental sample
  DOMAIN (10)...(212): Binding-protein-dependent transport system inner membrane component
  misc_feature (1)..(215): Xaa is any amino acid
MGFWAVTLRLLQGFQTTFLIFGLTLLFALPLGLLISFGSMSRIHPLKYIVKIFVWMIRGVPLMLQIFIVFYVPGFVFGAPISSRINAAIIAFSINYACYFSKIFRGGIESISHSQYEAGQVLGMTKSQVFFRVVLLQVIKRITAPMSNEIITLVKDTALARVIMVVEVIKVAETFAATRAMIWPLFYTGAFYLLFVGILTLLFGYIEKRLSYFRA

SEQ ID NO: 30971 - DNA, 747 bp, Unknown
  Obtained from environmental sample
  misc_feature (1)..(747): n is a, c, g, or t
atggccgagacggctgtaaaagatgccgcgaagcttgtttgcggggtaacagattttgaacccatgaacttccgggatgcaagcggcaagtggattggttttgacaccgaacttgcccagcttgtcggccagaagttgaaaatgccggttgattttgtggaaattgagtgggcaaataaatacaacgagctgaattccggaaccatcagttgtatttggaacggcttcacggccaatgcttccgaagcggatggcaccggccggaaagatttagttgactttagctatagttatttccttaaccagcagtgtgttgtgatcaaagccgaaagaaagggcgagttcaggtacgacagggatcttacaggtaaaacagtggcggcggaaaccggatcggcgggcgaaagcgccgcgaaggaacttgtcggtgatgccggaaaaatagtcggaaccgccgcgcaggtcaataccttcattgaagttaaatccggcgcggtcgattgcgcggtggtcgatatccttttggcgcagaggcttgcgggttcgggggattattccgatttaactatttcggatattatgctggattacgaagtgtatgccgttggctttaagaagggagacgctttgagggataaagtcaataaagcccttaaagaactgtacgacgagggaaagatgaaggaactcgcgaaaaaataccatattgaggattcgcttgttctgaatacaaacttcaatggataa

SEQ ID NO: 30972 - protein, 248 aa, Unknown
  Obtained from environmental sample
  DOMAIN (12)...(238): Bacterial extracellular solute-binding proteins, family 3
  misc_feature (1)..(248): Xaa is any amino acid
MAETAVKDAAKLVCGVTDFEPMNFRDASGKWIGFDTELAQLVGQKLKMPVDFVEIEWANKYNELNSGTISCIWNGFTANASEADGTGRKDLVDFSYSYFLNQQCVVIKAERKGEFRYDRDLTGKTVAAETGSAGESAAKELVGDAGKIVGTAAQVNTFIEVKSGAVDCAVVDILLAQRLAGSGDYSDLTISDIMLDYEVYAVGFKKGDALRDKVNKALKELYDEGKMKELAKKYHIEDSLVLNTNFNG

SEQ ID NO: 30973 - DNA, 885 bp, Unknown
  Obtained from environmental sample
  misc_feature (1)..(885): n is a, c, g, or t
gtggcgcccgccggcaagcgtcctaacttcacggcggtaacctttatggcgataggcgtgtcccgcgggccgtacggtccggaggagagcgagatttgggtgaacgagcttatcgcgacgggcgggcgggtgctctccggtttcgcggcgcgggtcaacatcgccacgcagtgggcggattttctgactttgggcgccgggataaacttcacggggggcgatttcaaaatgatgaccgacgaggcgataggcggcgcggacaggagcgagttaagcgccaacgtcaacgcggtgatgaagctggacaaattcttgcccgatgattggggcgtatccatacccgtgggcggctcggtatccggcgccttatcgcggcccacggttaagccgcagagcgacatccgcctgcttaacgacaacggcgacccggacggattcctcgacatggcggacgacgccttcagaatgatgctgggcggcgaacagggcggcagccggactagggcgcagcgctttgagacattctcgtcaacgcgcaacgcctacacctcgttcgagaagacgagcgagtccaaaaatccctttatagactttacgctcgacaggataaagaccgacatcagctacaaccaaacggcaagctacacgggcaaggggcctcacgagcaccccgacagcgccgactacataaagacggacacgaccgtcacctacacgggcgccctgcgctacgacctaagcccgcgcgacccgccctcctggacgagctatatgccgttcgacgggatatcgtggatgccggagctatacaagaagtacacgctgaacctgctgccctccgccataaacttcgacttggcggagctgcagcctcggcctatctga

SEQ ID NO: 30974 - protein, 294 aa, Unknown
  Obtained from environmental sample
  misc_feature (1)..(294): Xaa is any amino acid
MAPAGKRPNFTAVTFMAIGVSRGPYGPEESEIWVNELIATGGRVLSGFAARVNIATQWADFLTLGAGINFTGGDFKMMTDEAIGGADRSELSANVNAVMKLDKFLPDDWGVSIPVGGSVSGALSRPTVKPQSDIRLLNDNGDPDGFLDMADDAFRMMLGGEQGGSRTRAQRFETFSSTRNAYTSFEKTSESKNPFIDFTLDRIKTDISYNQTASYTGKGPHEHPDSADYIKTDTTVTYTGALRYDLSPRDPPSWTSYMPFDGISWMPELYKKYTLNLLPSAINFDLAELQPRPI

SEQ ID NO: 30975 - DNA, 486 bp, Unknown
  Obtained from environmental sample
  misc_feature (1)..(486): n is a, c, g, or t
gtgctgataaacgttatcaatgaatgtattgaaattaagccgaaagacggttccggcagaccggacggattaccggatgccgcgtttaattttaaggatttttcaatattggtcgcggaagacgttgaaattaacagggaaattctctccacggttctggaagaaaccgggatttctattgattttgcacagaacggatcaagcgcggtctccatgttccagatgcacccggacaaatacaaccttattttaatggacgttaacatgcccgaaatggacggatatgaggcgacacaggcaatacgcgcgctggaaatgccgcaggcaaaagatgtctgcattatagcgatgacagctaacgtcttccgcgaagatatcgaaaaatgtttagcggcgggaatgaacgatcatataggaaaaccaattgccccggaaacattacatgaaaagcttaacaaatacctcgctaaaggaataagcgggtaa

SEQ ID NO: 30976 - protein, 161 aa, Unknown
  Obtained from environmental sample
  DOMAIN (34)...(152): Response regulator receiver domain
  misc_feature (1)..(161): Xaa is any amino acid
MLINVINECIEIKPKDGSGRPDGLPDAAFNFKDFSILVAEDVEINREILSTVLEETGISIDFAQNGSSAVSMFQMHPDKYNLILMDVNMPEMDGYEATQAIRALEMPQAKDVCIIAMTANVFREDIEKCLAAGMNDHIGKPIAPETLHEKLNKYLAKGISG

SEQ ID NO: 30977 - DNA, 333 bp, Unknown
  Obtained from environmental sample
  misc_feature (1)..(333): n is a, c, g, or t
ttgacggttaccccttacgtcgccggcgaaggaaaaatcatgctgacgcttaacgcgagcaaagaggacttcacaaccgaggtcggctcgccccccgccataagcacgcaaagcgccaaaacgaacgtccttgtcaataacggagagaccttggtcatagcgggtctcacgcaaaacgaaaagggaaacgcaagcaacggcataccgttcctgaaggacataccgattttgggatatttatttaaacattccgataagaggcacgaaaaaacggatttaataatattcgtcacgccgcatatcattcactcggagataggcggggcgaaataa

SEQ ID NO: 30978 - protein, 110 aa, Unknown
  Obtained from environmental sample
  DOMAIN (1)...(103): Bacterial type II and III secretion system protein
  misc_feature (1)..(110): Xaa is any amino acid
MTVTPYVAGEGKIMLTLNASKEDFTTEVGSPPAISTQSAKTNVLVNNGETLVIAGLTQNEKGNASNGIPFLKDIPILGYLFKHSDKRHEKTDLIIFVTPHIIHSEIGGAK

SEQ ID NO: 30979 - DNA, 936 bp, Unknown
  Obtained from environmental sample
  misc_feature (1)..(936): n is a, c, g, or t
ttgaaagaggtcggcgccgtaaagaggcgcgacttgccggacgcgtgcccgacgggtgtcttaagcgagctgtacccaaaggccggcgagcaccgcatatttgacggctttacaacattcagccaaaacgacccgccgaatttcaaagtggctgcggtcaagaaggccatcagcgagaacaggccggtcgtggtggcgatgtctgtttacgagtcttttatgcgtcagggcaaaggcgtatggaacggttttactaccaccgccgaggccggcggccacgcgatgtgcgttgtcggctacaacgacggtttgtacggcggggcgttcgagatcatgaacagttggggggacgactggggagacatgggttttgtgtgggtgaggtacagcgacttcgggaagcacgcctggtacggccacgacatctacataaggaagaagataccgccacctccaccgcctcagccgcaacccgcacctcagccgcaacccgcgcctcagccgcaacccgcgcctcagccgcaaccggcgcctcagccgcaacccgcgcctcagccgcagcccgcgcctcagccgcaacccgcgcctcagccgcagcccgcgcctcagccgcaacccgcgcctcagccgcaacccgcgcctcagccgcaaccggcgcctcagccgcaaccggcgcttgtgcacttgtccggagcgttgcagttcaagctctccaacggagaagcgatgccggtttctctgcaaaacaagggaggggtgcctacatataagatgaaggaggagtacattgccggcacccgtttccgcatatacctttcaaacaacagccccgcgtacgtttacgtggtgggttcggatttgaacaacgaggtctccatgatatacccgcacaacgagcgcacgagcgcggccttgttctacagagccacgatatag

SEQ ID NO: 30980 - protein, 311 aa, Unknown
  Obtained from environmental sample
  misc_feature (1)..(311): Xaa is any amino acid
MKEVGAVKRRDLPDACPTGVLSELYPKAGEHRIFDGFTTFSQNDPPNFKVAAVKKAISENRPVVVAMSVYESFMRQGKGVWNGFTTTAEAGGHAMCVVGYNDGLYGGAFEIMNSWGDDWGDMGFVWVRYSDFGKHAWYGHDIYIRKKIPPPPPPQPQPAPQPQPAPQPQPAPQPQPAPQPQPAPQPQPAPQPQPAPQPQPAPQPQPAPQPQPAPQPQPAPQPQPALVHLSGALQFKLSNGEAMPVSLQNKGGVPTYKMKEEYIAGTRFRIYLSNNSPAYVYVVGSDLNNEVSMIYPHNERTSAALFYRATI

SEQ ID NO: 30981 - DNA, 684 bp, Unknown
  Obtained from environmental sample
  misc_feature (1)..(684): n is a, c, g, or t
ttgcagagaaaccggcatcgcttctccgttggagagcttgaactgcaacgctccggacaagtgcacaagcgccggttgcggctgaggcgccggttgcggctgaggcgcgggttgcggctgaggcgcgggttgcggctgaggcgcgggctgcggctgaggcgcgggttgcggctgaggcgcgggctgcggctgaggcgcgggttgcggctgaggcgccggttgcggctgaggcgcgggttgcggctgaggcgcgggttgcggctgaggtgcgggttgcggctgaggcggtggaggtggcggtatcttcttccttatgtagatgtcgtggccgtaccaggcgtgcttcccgaagtcgctgtacctcacccacacaaaacccatgtctccccagtcgtccccccaactgttcatgatctcgaacgccccgccgtacaaaccgtcgttgtagccgacaacgcacatcgcgtggccgccggcctcggcggtggtagtaaaaccgttccatacgcctttgccctgacgcataaaagactcgtaaacagacatcgccaccacgaccggcctgttctcgctgatggccttcttgaccgcagccactttgaaattcggcgggtcgttttggctgaatgttgtaaagccgtcaaatatgcggtgctcgccggcctttgggtacagctcgcttaa

SEQ ID NO: 30982 - protein, 227 aa, Unknown
  Obtained from environmental sample
  misc_feature (1)..(227): Xaa is any amino acid
MQRNRHRFSVGELELQRSGQVHKRRLRLRRRLRLRRGLRLRRGLRLRRGLRLRRGLRLRRGLRLRRGLRLRRRLRLRRGLRLRRGLRLRCGLRLRRWRWRYLLPYVDVVAVPGVLPEVAVPHPHKTHVSPVVPPTVHDLERPAVQTVVVADNAHRVAAGLGGGSKTVPYAFALTHKRLVNRHRHHDRPVLADGLLDRSHFEIRRVVLAECCKAVKYAVLAGLWVQLA

SEQ ID NO: 30983 - DNA, 531 bp, Unknown
  Obtained from environmental sample
  misc_feature (1)..(531): n is a, c, g, or t
atggaacggttttactaccaccgccgaggccggcggccacgcgatgtgcgttgtcggctacaacgacggtttgtacggcggggcgttcgagatcatgaacagttggggggacgactggggagacatgggttttgtgtgggtgaggtacagcgacttcgggaagcacgcctggtacggccacgacatctacataaggaagaagataccgccacctccaccgcctcagccgcaacccgcacctcagccgcaacccgcgcctcagccgcaacccgcgcctcagccgcaaccggcgcctcagccgcaacccgcgcctcagccgcagcccgcgcctcagccgcaacccgcgcctcagccgcagcccgcgcctcagccgcaacccgcgcctcagccgcaacccgcgcctcagccgcaaccggcgcctcagccgcaaccggcgcttgtgcacttgtccggagcgttgcagttcaagctctccaacggagaagcgatgccggtttctctgcaaaacaagggaggggtgcctacatataa

SEQ ID NO: 30984 - protein, 176 aa, Unknown
  Obtained from environmental sample
  misc_feature (1)..(176): Xaa is any amino acid
MERFYYHRRGRRPRDVRCRLQRRFVRRGVRDHEQLGGRLGRHGFCVGEVQRLREARLVRPRHLHKEEDTATSTASAATRTSAATRASAATRASAATGASAATRASAAARASAATRASAAARASAATRASAATRASAATGASAATGACALVRSVAVQALQRRSDAGFSAKQGRGAYI

SEQ ID NO: 30985 - DNA, 342 bp, Unknown
  Obtained from environmental sample
  misc_feature (1)..(342): n is a, c, g, or t
atgagcgccgaggatcgcgctttccttcgcgagagggtagtcgccagggtggaaagcgaaaaccaggaacgggggtatctgtctaccctgcggagcatgagcgtcttttttttatttaatggaaggaaaatttcccgcaggataaaaaaatatccggggaagatagctatactgtggggcgagaaggacagggttttacctgttgaaaaatccgcccttttccggggcctgcgccctgacgcgaagatgactttaatctccggcgcgggacaccttccccaccaggaaaaacacgaagaaacaacggcgcaaatgctggagtttcttcatccggccacataa

SEQ ID NO: 30986 - protein, 113 aa, Unknown
  Obtained from environmental sample
  misc_feature (1)..(113): Xaa is any amino acid
MSAEDRAFLRERVVARVESENQERGYLSTLRSMSVFFLFNGRKISRRIKKYPGKIAILWGEKDRVLPVEKSALFRGLRPDAKMTLISGAGHLPHQEKHEETTAQMLEFLHPAT

SEQ ID NO: 30987 - DNA, 642 bp, Unknown
  Obtained from environmental sample
  misc_feature (1)..(642): n is a, c, g, or t
atgagtacggcaaaatcactgcgaaaccggaagcttggccctagagtcgtacgggccttaaaagagcgtttttttgacgcatggtattttgacgagccttccgaagccatggctaaaattctgtccctcatccccacagggcacgtcgtctcatggggcggttcccttaccctgcttgagttaggcgtaaccgagcgcgtggccattgagggctataaggtcatcgaccgggacaaggcaacggacaggcaggaacggttcgagcttatgaggcaggcgttgttatgcgacacttatctcaccggctgcaacgcgatcagcgaggacggccagcttgtaaacatagacggctttggcaaccgcgtggcggcgatgacattcggccccaggcaggtaatcgtcgtcgccggcatgaacaaagtcgccaaaaccgtggatgacgcccttgtccgcgccaggaccgtcgccgcccccgccaacacccagcgtttccaggacagtaaagccccctgcaatgaaaccggaacctgcgccgactgtaaatccccggactctatttgcagttttttcgtaacaacccgtctctgcaaacccgccggaaggattaaggttatactggtggggcaggatttaggtctatag

SEQ ID NO: 30988 - protein, 213 aa, Unknown
  Obtained from environmental sample
  DOMAIN (1)...(213): Protein of unknown function (DUF1121)
  misc_feature (1)..(213): Xaa is any amino acid
MSTAKSLRNRKLGPRVVRALKERFFDAWYFDEPSEAMAKILSLIPTGHVVSWGGSLTLLELGVTERVAIEGYKVIDRDKATDRQERFELMRQALLCDTYLTGCNAISEDGQLVNIDGFGNRVAAMTFGPRQVIVVAGMNKVAKTVDDALVRARTVAAPANTQRFQDSKAPCNETGTCADCKSPDSICSFFVTTRLCKPAGRIKVILVGQDLGL

SEQ ID NO: 30989 - DNA, 789 bp, Unknown
  Obtained from environmental sample
  misc_feature (1)..(789): n is a, c, g, or t
atgcccaaaaaactgccgaagtttgccccgctcactttggattctacgttcaagaaagcatttgctaacgagcaaagcacggaactgcttttgttcctgctcaatactttcctcgctaagaagctgaaaagccctatcaaagaggttatcaacattaaccacgaactgtttggaaaaacgaggttcaatagagatgctgtatttgatgtttattgcagagatgccgcaggtacaaggtttgtcgtggaagttcaggttaaaggacaggaatatttcataaagcgaactttcttttatctttgcataattgtatgcagtctcgcagtaaaaggaaaagagtatgatttcaatattcccaagctctattccattagcttcttggagtttgagcttgattttggggagggctgcacggaggtgatccagtatttgtccctgagaaacgacaatcatcccgaagtcagttacgatatcctgcaaatgatctatgtcattttgcctaggttcaagaaaaaagagagcgagtgcaaaacgattatggataagattattttctctctcaaaaacggtcataagctcaaaggtgtttccaagagcttcaaggagaaagagcttttgcagattttcgaggtggcaagaatttctaatttcactgagagggaactcaaacagtatgaggcagctatgatgaacagacacgaccagaaagcgatacttgcttatgccaagaaagagggcgttatggaaaccgctaagaatatgtttgcaaaagagattttcttttgctga

SEQ ID NO: 30990 - protein, 262 aa, Unknown
  Obtained from environmental sample
  misc_feature (1)..(262): Xaa is any amino acid
MPKKLPKFAPLTLDSTFKKAFANEQSTELLLFLLNTFLAKKLKSPIKEVININHELFGKTRFNRDAVFDVYCRDAAGTRFVVEVQVKGQEYFIKRTFFYLCIIVCSLAVKGKEYDFNIPKLYSISFLEFELDFGEGCTEVIQYLSLRNDNHPEVSYDILQMIYVILPRFKKKESECKTIMDKIIFSLKNGHKLKGVSKSFKEKELLQIFEVARISNFTERELKQYEAAMMNRHDQKAILAYAKKEGVMETAKNMFAKEIFFC

SEQ ID NO: 30991 - DNA, 315 bp, Unknown
  Obtained from environmental sample
  misc_feature (1)..(315): n is a, c, g, or t
gtgaaatctatatccacccatgtcggcgagcagaccaaggcgagcaacgagatagctaacaatgttgcccaagcgaatgccggagcaaaacgtgtagcttcttccatagctgaggtagccaaaaacagccataacatagcccacaacgccaatgaagccgcaaatggtgcgggaaatatcagccaaagtgtgaatagcatagcccaagatgccaaaaacagtgcccagggggcaaagcaaaccaacgaaaacgcagacgaacttgccagaatagcaaatgatttgaaagatgttttaaatcagttcaaggtgtag

SEQ ID NO: 30992 - protein, 104 aa, Unknown
  Obtained from environmental sample
  misc_feature (1)..(104): Xaa is any amino acid
MKSISTHVGEQTKASNEIANNVAQANAGAKRVASSIAEVAKNSHNIAHNANEAANGAGNISQSVNSIAQDAKNSAQGAKQTNENADELARIANDLKDVLNQFKV

SEQ ID NO: 30993 - DNA, 501 bp, Unknown
  Obtained from environmental sample
  misc_feature (1)..(501): n is a, c, g, or t
ttggtcataaacggcaaaaatggcaacccagccatagtttatcaataccaaaaacacaatatctcgcaaaaaatcatccacgtggactttttgaagatagaagaaaacactcctatcgcagtgcgtgttccggttcgcctctctggcatacccgtaggcgtaaaaaaccaaggcggaaacctttcgcaagagagccgctacctcaaacttctggcaaaaccctcggatattcctgcaaacatagagctagacatttccgaaatgcctaacaacacaacctattatgcagaaaaactggatttgggcaaagtatccctgctgtctccaaaacgcacggttatattcaccatatccaaaggccgcgaagaaaccgaagctgctgccgcgcctgccgctgctgctgccgcaacccctgcacctgccgccgccgctgctgcacctgccgctgctgctgccaaaaaagaagaggcaaagcccaaaaaggatgccaaaaagaaatag

SEQ ID NO: 30994 - protein, 166 aa, Unknown
  Obtained from environmental sample
  misc_feature (1)..(166): Xaa is any amino acid
MVINGKNGNPAIVYQYQKHNISQKIIHVDFLKIEENTPIAVRVPVRLSGIPVGVKNQGGNLSQESRYLKLLAKPSDIPANIELDISEMPNNTTYYAEKLDLGKVSLLSPKRTVIFTISKGREETEAAAAPAAAAAATPAPAAAAAAPAAAAAKKEEAKPKKDAKKK

SEQ ID NO: 30995 - DNA, 792 bp, Unknown
  Obtained from environmental sample
  misc_feature (1)..(792): n is a, c, g, or t
atgcctaatgtagctattcgtgaagacgacattatgataaagctccgcaatttgcgaaagagctttggtaagcaagatgttctgttggatgtgaatctggatattaggcgtggcgaaacaatagtgataatagggcaatccggtggtggaaagtctgttatattaaagcacatgatagggcttttgcagcccgatggcggtgaagtgagcgtggataatgtaacgatttccactcctaaatcttttgacacgcacacaatacgcagaaagatgggaatgctcttccagatgggagcgttgttcgattccatggacacaggcgaaaacatagcctttgccctgcgcgagcaccacccggagctaaccgaaaagcaaattcaagactcggtgaccgaaaagttaaagctgataaacctggtgccggagttccgcaccaaaatgcccaacgaactctccggcggcatgaaaaagcgcgtagcccttgcgagagccatagccctaagccctgaaatacttttatacgacgaacctaccacagggctagacccaataacctccgacgttataaacgatttgattttggatatgcagttaaagctgggcgtgacctcggttgtggtaacccacgacatggcaagcgcgttcaaggtggcagaccgcatagccatgctttacaaagggcgcataattgaggttggaacggtagatgaaataaaaaacaccacaaatccgtttgtaaaacagtttatcacggggcaaagaaatttgcctacaggtactggcacacgttga

SEQ ID NO: 30996 - protein, 263 aa, Unknown
  Obtained from environmental sample
  DOMAIN (38)...(227): ABC transporter
  misc_feature (1)..(263): Xaa is any amino acid
MPNVAIREDDIMIKLRNLRKSFGKQDVLLDVNLDIRRGETIVIIGQSGGGKSVILKHMIGLLQPDGGEVSVDNVTISTPKSFDTHTIRRKMGMLFQMGALFDSMDTGENIAFALREHHPELTEKQIQDSVTEKLKLINLVPEFRTKMPNELSGGMKKRVALARAIALSPEILLYDEPTTGLDPITSDVINDLILDMQLKLGVTSVVVTHDMASAFKVADRIAMLYKGRIIEVGTVDEIKNTTNPFVKQFITGQRNLPTGTGTR

SEQ ID NO: 30997 - DNA, 957 bp, Unknown
  Obtained from environmental sample
  misc_feature (1)..(957): n is a, c, g, or t
ttgcgaattgggtttttaattttatttgcatctacccttgcccttgccgctttttacggcaatcaaagtgggattaaatggaaaagcgcagagacggagcattttttggtacactaccctgtggaatatagggagcgtgcggcaatggcaactggttttgccgagagtgtttacgatacaataactacccgctacaaaattaaattgccaagcaaagtgaatttggttttcaacaacgggcttttcagcaacggcgaagcaaatccggtttacaatatgatgcaaatttggcttacgaattgggattttaaaatccgcggttctcattcttggataagcaatgttgtgacgcacgagttcagccatttggtgagcatacaaaatgcgagcaaaactccgtggccctggattcaaggtttgcaaatttcaaaaagcgattttctcaatgaaaaaaaacaactcgctgtaggagtacacattccatttacaataatgcctctttggtttgcagaaggcaccgctcaatttgagagctacagaatgggttttgaccgttgggacactcaccgcgatatgcttttgcgaatagcatttttggagaacaagattttgccgctggaatttatggaggatttcagcgaacaggctctggaagcggaacttggcccatatacgcaaggctttgacttggtgcgctacattgcggaaacttatggcgaagatgctattcctgaattgtggaaagacatggggaaactttctaactggactttgagcggtgcacttagcggaagatttaaaatcacggaaaaggaactgtataaaaattggaaagagaatagaaaagagcattacgagaaatttcgcagctcaataggcgaaataaaagcaggaaaaaaaataagcgaaggctctttttataacgattttctgtctttgggaaacggcaatctctaa

SEQ ID NO: 30998 - protein, 318 aa, Unknown
  Obtained from environmental sample
  SIGNAL (1)...(16)
  misc_feature (1)..(318): Xaa is any amino acid
MRIGFLILFASTLALAAFYGNQSGIKWKSAETEHFLVHYPVEYRERAAMATGFAESVYDTITTRYKIKLPSKVNLVFNNGLFSNGEANPVYNMMQIWLTNWDFKIRGSHSWISNVVTHEFSHLVSIQNASKTPWPWIQGLQISKSDFLNEKKQLAVGVHIPFTIMPLWFAEGTAQFESYRMGFDRWDTHRDMLLRIAFLENKILPLEFMEDFSEQALEAELGPYTQGFDLVRYIAETYGEDAIPELWKDMGKLSNWTLSGALSGRFKITEKELYKNWKENRKEHYEKFRSSIGEIKAGKKISEGSFYNDFLSLGNGNL

SEQ ID NO: 30999 - DNA, 690 bp, Unknown
  Obtained from environmental sample
  misc_feature (1)..(690): n is a, c, g, or t
gtggaaacaaatattaaaaccgctattaaagaaagatttctcaatgccctgttcttccggcgcgtggcgctgtgccttctgggaaacttcgtgcttgctttcggcgtggccatggcggtgaaagccgatttgggaatcactcctgtcaattcaatcgcctttgtcctgagtaaggttctttccgtagatcacggttttttgaccggcgttatttacgccggttatgtgctgattcaacttttattattgagaagggaattccgcgtcaataacctgctgcaggcgggagccgccataatgtttggctggtttgtctttctctgtaatcatatcctttcgtttccggttcctgatttctatccggttcggctcttgttcctgctcggcggcgtaatcataatcggcctgggtataatgctttacctgagggctaatatcctgcctcagcccgcggaagggctcatactggcgattcagaaaaagaccgggtggaaactgcacaatattaaaatcgctttcgattcttcggttgttgttattgcggcggcgatttccttcatcatcatcaaaaagattgtcggtatcagagaaggaacgctcatctcaatgatcgggataggtaagtgccttggcttttttaccaagcgccttggtggaaagatagacgcccttttcgggcttcccaggtaa

SEQ ID NO: 31000 - protein, 229 aa, Unknown
  Obtained from environmental sample
  misc_feature (1)..(229): Xaa is any amino acid
METNIKTAIKERFLNALFFRRVALCLLGNFVLAFGVAMAVKADLGITPVNSIAFVLSKVLSVDHGFLTGVIYAGYVLIQLLLLRREFRVNNLLQAGAAIMFGWFVFLCNHILSFPVPDFYPVRLLFLLGGVIIIGLGIMLYLRANILPQPAEGLILAIQKKTGWKLHNIKIAFDSSVVVIAAAISFIIIKKIVGIREGTLISMIGIGKCLGFFTKRLGGKIDALFGLPR

SEQ ID NO: 31001 - DNA, 750 bp, Unknown
  Obtained from environmental sample
  misc_feature (1)..(750): n is a, c, g, or t
atgctgtccattgcccccgatgcgccggatatggaggatgtcaaacagaaaacagcgcggattactcccacggtaaaaatcaggaaaccggagtatccgtcagacaaaatggaacggacttatccggctgattgtctgctctttgcngaaggcgaaccgggggatgagttatacgtcattcaggaaggttcggtgaagatcagcaaaatcatgaacaatcaggaagtagtgctggcggtactacgtaaaggggatattttcggcgaaatggccctgttagaggacaagccccgcaccgccaccgccgagacacttgaaaattgcacggtacttgccgtgaaccaggccaactttacgagcttgatcacgacatctccggaactggtagcccgtatgaccacccttatggcggagcggatatggttaatgtaccggcagcttgccaatgccatgatcataaaccctctggaccgcatttatgacgctctgcttatccagcttgaaaaagagcgcgtaccgctcaattcaaatcatccttatatgtgcggtttcagttttaaggaactggcggacatggcgagaattccgcccaaagaacacgatgccttactgcgaaaaatcctcctgaccaaacggatcaatattgtccagaataaacttctcgtaagcgatccctcagacgtgctcaggcagaccgattactaccgccgcgcccagcagcgcagcgccgccgccgcggctaaacagtag

SEQ ID NO: 31002 - protein, 249 aa, Unknown
  Obtained from environmental sample
  DOMAIN (38)...(127): Cyclic nucleotide-binding domain
  misc_feature (1)..(249): Xaa is any amino acid
MLSIAPDAPDMEDVKQKTARITPTVKIRKPEYPSDKMERTYPADCLLFAEGEPGDELYVIQEGSVKISKIMNNQEVVLAVLRKGDIFGEMALLEDKPRTATAETLENCTVLAVNQANFTSLITTSPELVARMTTLMAERIWLMYRQLANAMIINPLDRIYDALLIQLEKERVPLNSNHPYMCGFSFKELADMARIPPKEHDALLRKILLTKRINIVQNKLLVSDPSDVLRQTDYYRRAQQRSAAAAAKQ

SEQ ID NO: 31003 - DNA, 636 bp, Unknown
  Obtained from environmental sample
  misc_feature (1)..(636): n is a, c, g, or t
gtggcgctgtgccttctgggaaacttcgtgcttgctttcggcgtggccatggcggtaaaagccgatttgggaatcacgcctgtcaattcaatcgcctttgtcctgagtaaggttctttccgtagatcacggcttgatgaccggcgtcatatacgccggttatgtgctgcttcaacttttactgttgagaagagaattccgcgtcaataaccttttgcaggcgggagccgccataatgttcggctggtttgtctttctttgtaaccatattctcgcgtttccggttcctgaattctatcccatacggctcttgttcctgctcggcggcgtaatcataatcggcctgggtataatgctttacctgagggctaatatcctgccccagcccgcggaaggactcatactggcgattcaaaaaaagaccgggtggaaactgcacaatattaaagtcgctttcgattcttcggttgttgttatagcggcggcgatttccttcatcgccataaaaaggatcatcggtatcagggaaggaacgctcatctcaatgatcggaataggcaagtgcctgggcttttttaccaaataccttggcggaaagatagacgcccttttcaggcttcccaaacaagacatctga

SEQ ID NO: 31004 - protein, 211 aa, Unknown
  Obtained from environmental sample
  SIGNAL (1)...(18)
  misc_feature (1)..(211): Xaa is any amino acid
MALCLLGNFVLAFGVAMAVKADLGITPVNSIAFVLSKVLSVDHGLMTGVIYAGYVLLQLLLLRREFRVNNLLQAGAAIMFGWFVFLCNHILAFPVPEFYPIRLLFLLGGVIIIGLGIMLYLRANILPQPAEGLILAIQKKTGWKLHNIKVAFDSSVVVIAAAISFIAIKRIIGIREGTLISMIGIGKCLGFFTKYLGGKIDALFRLPKQDI

SEQ ID NO: 31005 - DNA, 777 bp, Unknown
  Obtained from environmental sample
  misc_feature (1)..(777): n is a, c, g, or t
ttggttttgaaggctgaaaagaacggcgagcctgtttatgtgaatggcaagcaagttggtaaaacgccttttagcggttctgtgccgttgtgtgcggtggtggagattgggaaagatagggagatggtgaatgttgagttggagcataatgggagggttgagcatacggtggagggttactatgatagtagagattacaggacaagtaatggaaactttaaagtaacaacagagaaagaaacccttgaacaaagaatagaaagacttaaatctcagaagttgcttaccgattcacgcgatgggaagcaatacaagatagttaagataggcactcaaacttggatggcagagaacctcaactacaacgcaagtggcagtagatgttatgacaattcccctgcctactgccaaacgtatgggagattgtataattgggcaacggctatgaaggcttgccctaaaggctggcatttgccgagtgatatggaatggaaaactttaacaagttatgttggttcaacagaaggcaaatatttaaaagcaacaagcgggtggaacagcaatggcaacggcacggacgattacggcttttccgcccttccgggtggcaacggcggttcggatggctatgtcggcgacttcggctactggtggagtgccagtgagggcaatagcagcagcgcctacctcaggattatgttctgcagcagcgagggcgtactcaggatcgacggtggtaagggcggcttgtttagtgtccgttgcttgcaggactag

SEQ ID NO: 31006 - protein, 258 aa, Unknown
  Obtained from environmental sample
  misc_feature (1)..(258): Xaa is any amino acid
MVLKAEKNGEPVYVNGKQVGKTPFSGSVPLCAVVEIGKDREMVNVELEHNGRVEHTVEGYYDSRDYRTSNGNFKVTTEKETLEQRIERLKSQKLLTDSRDGKQYKIVKIGTQTWMAENLNYNASGSRCYDNSPAYCQTYGRLYNWATAMKACPKGWHLPSDMEWKTLTSYVGSTEGKYLKATSGWNSNGNGTDDYGFSALPGGNGGSDGYVGDFGYWWSASEGNSSSAYLRIMFCSSEGVLRIDGGKGGLFSVRCLQD

SEQ ID NO: 31007 - DNA, 468 bp, Unknown
  Obtained from environmental sample
  misc_feature (1)..(468): n is a, c, g, or t
gtgaaacagtcggggctaacccgactgaccgggggaaaaaaagggagcaagcggcatatgcttgtagacggcataggggtaccccttgccatggtagtaaccggagcaaacaggcatgatgtttcccagcttgaggcgcttttggattctatcgtcatagaaaggcctgacccattcgaacatcctcaaaacctatgccttgacaaagggtattccggcgagccggctttggaagcggttgtattaaggggttttataccccacataaaaagccggggggaggagaaaagcgacaaagaacaaaacccggaatacaaagcccgccgatgggtagttgaagttacccactcgtggatgaataggttccgaaaacttctggtccgatatgagaaattggacaagacatataaagggctgcttatgttatcgtgtgcttttatcgcccttcgtaaggcagaggttatttag

SEQ ID NO: 31008 - protein, 155 aa, Unknown
  Obtained from environmental sample
  DOMAIN (7)...(146): Transposase DDE domain
  misc_feature (1)..(155): Xaa is any amino acid
MKQSGLTRLTGGKKGSKRHMLVDGIGVPLAMVVTGANRHDVSQLEALLDSIVIERPDPFEHPQNLCLDKGYSGEPALEAVVLRGFIPHIKSRGEEKSDKEQNPEYKARRWVVEVTHSWMNRFRKLLVRYEKLDKTYKGLLMLSCAFIALRKAEVI

SEQ ID NO: 31009 - DNA, 753 bp, Unknown
  Obtained from environmental sample
  misc_feature (1)..(753): n is a, c, g, or t
ttggctaaactgccacaagcaggcgtgttgtgcgaagtactgaatccaaatggcacaatggctagaatgcctcaattaaaggctattgcaaaaaaacacaatataacacttgtcactgttcaagagataatagattttcgcctcgccaatgaaattttggttgagcgaattgcacagccttttgtgccaacaaaatttgggagtttcaaagccatagcatacaaagataaaataaacggcgaggaatatgttgcttttgtagcaccgaaggcgttgaaaaatccttgcaatgttcgcatacacagcgaatgtttaaccggagatgttttccactccctaaaatgcgattgcggggcgcagcttgaatattctatgagatatatagctgctcagggcggtgttttaatttatatgcttgggcacgagggcaggggaattgggattgcaaacaagttaaaggcttatgaattgcaagaaaaaggattagatactgttgaagccaacataaaactcggctttaaggcagaccacaggaactatgcttatgccgctcatattttaaaagaactcggaataaaatccgtgaatttgctgacaaataatccccgaaaaatagaggggctagaaatgtgcggaataaaaatcgcaaaaaggattcccattgaaatagagccaaatcccttcaataaaaaatatttaaaggcaaaaaaagaaaaaatgggacataaattactatattcctataatgtttaa

SEQ ID NO: 31010 - protein, 250 aa, Unknown
  Obtained from environmental sample
  DOMAIN (54)...(221): GTP cyclohydrolase II
  misc_feature (1)..(250): Xaa is any amino acid
MAKLPQAGVLCEVLNPNGTMARMPQLKAIAKKHNITLVTVQEIIDFRLANEILVERIAQPFVPTKFGSFKAIAYKDKINGEEYVAFVAPKALKNPCNVRIHSECLTGDVFHSLKCDCGAQLEYSMRYIAAQGGVLIYMLGHEGRGIGIANKLKAYELQEKGLDTVEANIKLGFKADHRNYAYAAHILKELGIKSVNLLTNNPRKIEGLEMCGIKIAKRIPIEIEPNPFNKKYLKAKKEKMGHKLLYSYNV

SEQ ID NO: 31011 - DNA, 885 bp, Unknown
  Obtained from environmental sample
  misc_feature (1)..(885): n is a, c, g, or t
atgagtgcggcggcggttgcgaaagaggattccgctttgaataggtttggcaaagagttggtgtcccttgccgcagagggaaaattagaccccgttatagggcgtgaagaggaaattcgcagagtgattcgcattttggcgcgcaaaacaaaaaataatcctgtgctcgtaggggagccgggcacaggaaaaaccgccattgtagagggcctcgcacatcgcattcacaaaaacgatgtaccagatgctttaaagggcaaaaaaatattttcacttgatttatccgctttaatagcaggagcaaaatatcaaggcgaatttgaagaacgcttaaaagccgttttagacgaattggaacaggagcaagacacgcttttgttcatagatgaaattcacaacatagtgggggcaggaaaaacgcagggcagtatggatttgggcaatatgctgaaacccggacttgctcgcggtgaattgcattgcataggtgcaaccacaacttctgaatatcgcaaatacatagaaaaagatgccgcattggaacgccgctttcaacccgtgccagtcgcggaacccagcccagacgaggctctttccattttgcgtggcataaaagagagctttgatgcccaccacggggttcgcattcaagacaacgccttggtcgccgctgtgcagctttccagccgctatatctcagaccgctttttgcccgacaaagccgtggatttaatagacgaggcggcgagtatggtgaaaacacagctagacaccgttcccgaagccctagacactttgcaaagngcggcagcttcaacttcgcatagaggaaaaagcactggaatggaaaacgatgctgttctcggccgatctgatcattggtaa

SEQ ID NO: 31012 - protein, 294 aa, Unknown
  Obtained from environmental sample
  DOMAIN (53)...(246): ATPase family associated with various cellular activities (AAA)
  misc_feature (1)..(294): Xaa is any amino acid
MSAAAVAKEDSALNRFGKELVSLAAEGKLDPVIGREEEIRRVIRILARKTKNNPVLVGEPGTGKTAIVEGLAHRIHKNDVPDALKGKKIFSLDLSALIAGAKYQGEFEERLKAVLDELEQEQDTLLFIDEIHNIVGAGKTQGSMDLGNMLKPGLARGELHCIGATTTSEYRKYIEKDAALERRFQPVPVAEPSPDEALSILRGIKESFDAHHGVRIQDNALVAAVQLSSRYISDRFLPDKAVDLIDEAASMVKTQLDTVPEALDTLQXAAASTSHRGKSTGMENDAVLGRSDHW

SEQ ID NO: 31013 - DNA, 324 bp, Unknown
  Obtained from environmental sample
  misc_feature (1)..(324): n is a, c, g, or t
atgcgatgtgcgaggccctctacaatggcggtttttcctgtgcccggctcccctacgagcacaggattattttttgttttgcgcgccaaaatgcgaatcactctgcgaatttcctcttcacgccctataacggggtctaattttccctctgcggcaagggacaccaactctttgccaaacctattcaaagcggaatcctctttcgcaaccgccgccgcactcatagggtccgaaaagccagtgcgaaccgcctcggcattgccgagtgcgttttcaaaaaatgaaaacagctgcctatcgcccgatttttcatcaaagaaatag

SEQ ID NO: 31014 - protein, 107 aa, Unknown
  Obtained from environmental sample
  misc_feature (1)..(107): Xaa is any amino acid
MRCARPSTMAVFPVPGSPTSTGLFFVLRAKMRITLRISSSRPITGSNFPSAARDTNSLPNLFKAESSFATAAALIGSEKPVRTASALPSAFSKNENSCLSPDFSSKK

SEQ ID NO: 31015 - DNA, 738 bp, Unknown
  Obtained from environmental sample
  misc_feature (1)..(738): n is a, c, g, or t
gtgtctgcccggcagatgctgaaccagcaggattgcgcccagtggatacaggcaaacaggaaactgggtggcttgtgtaacggcgattccgctatggttgaccaggaaaccggaaacatgggggcatgggcaaagcttaataaccttgaccatgttttcattctctatcacccgaatgcggagcttgcaagccccactaccgacactacctcgtctaccgatccaattcccgaagctgccctcttcggcttaatgctgacaaaaaagccgggcgctgcgacatggaagttcaaagaactggcgagcgttccaacctatgaccttaagcaaggccaagtcacaaatctggaaaagaacaatgtcaattggtacatgacgaccgctgatgtcccgatgacctcaaacggccaagtggccagcggcgaattcatcgatgtaattcacggcgtggattggctcgaagcaagaatacagaaccttgtatttacggcgcttatcggcgttgacaaggttccgttcaccgatgagggagtgcagatggttgtatctccgctcaaggtcgctttggaagaggcaaagaaaaacggcatcttagaatcctacgaaattgagtaccctgcggtggcagatgtttctattaccgataaaggcaagcggtttttaccggatgttaagttcaccggcgtattggctggagcaatccacgctacaaaaatcaatggcgttgtaacgctttaa

SEQ ID NO: 31016 - protein, 245 aa, Unknown
  Obtained from environmental sample
  misc_feature (1)..(245): Xaa is any amino acid
MSARQMLNQQDCAQWIQANRKLGGLCNGDSAMVDQETGNMGAWAKLNNLDHVFILYHPNAELASPTTDTTSSTDPIPEAALFGLMLTKKPGAATWKFKELASVPTYDLKQGQVTNLEKNNVNWYMTTADVPMTSNGQVASGEFIDVIHGVDWLEARIQNLVFTALIGVDKVPFTDEGVQMVVSPLKVALEEAKKNGILESYEIEYPAVADVSITDKGKRFLPDVKFTGVLAGAIHATKINGVVTL

SEQ ID NO: 31017 - DNA, 306 bp, Unknown
  Obtained from environmental sample
  misc_feature (1)..(306): n is a, c, g, or t
gtggtcagaatcggcacgagaggaatacataaaattttcataaccgacagcgatgcccgccatatcaaaaaacaccacggacaaaatgaagataaaaggggacaagtggacataaccccggcggattttgcgctaattccggttattttgaatgagtatgataccgcagagtataccggggaagacaaaacaggcaataagaaacttgaatttaccaagaggatagaagggaaattttaccttgtaagcattgaaaaagggaaaaaccagataggggcaattactctatggaaaaagaaaaaataa

SEQ ID NO: 31018 - protein, 101 aa, Unknown
  Obtained from environmental sample
  misc_feature (1)..(101): Xaa is any amino acid
MVRIGTRGIHKIFITDSDARHIKKHHGQNEDKRGQVDITPADFALIPVILNEYDTAEYTGEDKTGNKKLEFTKRIEGKFYLVSIEKGKNQIGAITLWKKKK

SEQ ID NO: 31019 - DNA, 351 bp, Unknown
  Obtained from environmental sample
  misc_feature (1)..(351): n is a, c, g, or t
atgtcacaagacggcgtattgtataacaaagacatgaccgtattagttatatatccgagcggaaaaaccggcgattttacaataccggatactgttaaaattattggagaatacgcttttacaagtaaatacattacccaaataaccataccggttaatgttacctctattatggctgatgcttttaccggctgcaaagaacttaacatcgtaacctttgaaagttctaataaactgttttccaataaccaaggatacaaagcgttcaatgacaatttggatggtgcatttagtggtataggaacgtataaaagaaacagctttactaaaacatggagcaagcaaccgtaa

SEQ ID NO: 31020 - protein, 116 aa, Unknown
  Obtained from environmental sample
  misc_feature (1)..(116): Xaa is any amino acid
MSQDGVLYNKDMTVLVIYPSGKTGDFTIPDTVKIIGEYAFTSKYITQITIPVNVTSIMADAFTGCKELNIVTFESSNKLFSNNQGYKAFNDNLDGAFSGIGTYKRNSFTKTWSKQP

SEQ ID NO: 31021 - DNA, 333 bp, Unknown
  Obtained from environmental sample
  misc_feature (1)..(333): n is a, c, g, or t
atggagcaagcaaccgtaatgttagaaaatacgcctcttaaataccctattatattagtacatgggattatcatgcatgacaggccaagctttaataaattttggggcaggattcctgaaacaatacaggaaacagggacgaaggtttattttggaaatactgactcatggggcgattttgactcanatgcgaaaattttaaaaacaacgattgatgaagtattggacaaaacaaaaagtgaaaaggtaaatatactcgcccattccaaaggcggacttgattcccgttattttatctggaagtatgattacggagacaagatagcagtttaa

SEQ ID NO: 31022 - protein, 110 aa, Unknown
  Obtained from environmental sample
  misc_feature (1)..(110): Xaa is any amino acid
MEQATVMLENTPLKYPIILVHGIIMHDRPSFNKFWGRIPETIQETGTKVYFGNTDSWGDFDSXAKILKTTIDEVLDKTKSEKVNILAHSKGGLDSRYFIWKYDYGDKIAV

SEQ ID NO: 31023 - DNA, 309 bp, Unknown
  Obtained from environmental sample
  misc_feature (1)..(309): n is a, c, g, or t
atggaaatattcaacggcgaagtattaccggacaacaaggtatactaccaaagtatttattccacaatgaaaaacgcctttgatgatttattgttttttcacacctacaaatatataaaaaaaacaaacggcgataacgacggtcttgtaagcgaacgctccgcaaaatggggcgataacattacaaaaatagaaggcggtatatcccatgcggaaatacttgattacaacatgagaaatatatcggaggtaaatattcttgatatatataaaaatattgtgcagggtttatgtgaaaaagggttttag

SEQ ID NO: 31024 - protein, 102 aa, Unknown
  Obtained from environmental sample
  misc_feature (1)..(102): Xaa is any amino acid
MEIFNGEVLPDNKVYYQSIYSTMKNAFDDLLFFHTYKYIKKTNGDNDGLVSERSAKWGDNITKIEGGISHAEILDYNMRNISEVNILDIYKNIVQGLCEKGF

SEQ ID NO: 31025 - DNA, 696 bp, Unknown
  Obtained from environmental sample
  misc_feature (1)..(696): n is a, c, g, or t
atggccgacttatgggttccttcgttccgtccctatcgggaaaggatccttgagcccgggatcaagctgggatacaaccttccaagctggataggctttgacgaggctactgttccgggggtcgtgtcaattaacagcgggacctctcaggacatatcggttgatccctccaggagttcatcgttgacttacatggaaaaggccggaactgaccaagcccttgactttgttcggtgggtcaggactgaaaggaaccatccgggaatggaggagtgttacctgctcagagtaggcccctatgccctgccccgggatacccggcgcttaattggcgaatatgtctattccaatgatgatgtaattaagggcgggcagttcgatgatgtggtggcagccaagtacggtagcagcgatcccgtaggttctgtacgtaatgcgacatccatcaagcagggcgctccctatccttaccgcagttatcttcccaaaaagatcgacggtcttttggttgcgggccgctgcggttctgcgacccttctgggacactttggcggaaagagtatcggtaatatgatatgtctgggccaggcggccggggttgccgctgccctttgtagcgccaaaggagttcagccccgagcccttgacgtgaagctcattcagaaaaagctttatgagatgggcgtgagtttataa

SEQ ID NO: 31026 - protein, 231 aa, Unknown
  Obtained from environmental sample
  misc_feature (1)..(231): Xaa is any amino acid
MADLWVPSFRPYRERILEPGIKLGYNLPSWIGFDEATVPGVVSINSGTSQDISVDPSRSSSLTYMEKAGTDQALDFVRWVRTERNHPGMEECYLLRVGPYALPRDTRRLIGEYVYSNDDVIKGGQFDDVVAAKYGSSDPVGSVRNATSIKQGAPYPYRSYLPKKIDGLLVAGRCGSATLLGHFGGKSIGNMICLGQAAGVAAALCSAKGVQPRALDVKLIQKKLYEMGVSL

SEQ ID NO: 31027 - DNA, 438 bp, Unknown
  Obtained from environmental sample
  misc_feature (1)..(438): n is a, c, g, or t
gtggtactcctaggcatacaccccaacacccccgcgggccaaagtaaagaggcctataccgcgatgcttatcgccgcgataaagagcaacccgtgcatagacataataacccaccccaacgacccaagctaccccgtcgattacaaactcctagcccgagccgcgaaagccgccggcgtagccttagaactcaacaactccaaagtcctatacgccagggcgaacacacagagcgcggtggacttggcaaccgtctgtagagacgaaggctgcctaatagccgtaaacagcgatacccacgccatacatgagttggggttagacgattctgtgagaccgatcatagagtctttaggatttcccgccgaaagaataattaatagggatgagcggtctacgatggaatttatcgattcgaggcgtgtgaataaaaggtag

SEQ ID NO: 31028 - protein, 145 aa, Unknown
  Obtained from environmental sample
  misc_feature (1)..(145): Xaa is any amino acid
MVLLGIHPNTPAGQSKEAYTAMLIAAIKSNPCIDIITHPNDPSYPVDYKLLARAAKAAGVALELNNSKVLYARANTQSAVDLATVCRDEGCLIAVNSDTHAIHELGLDDSVRPIIESLGFPAERIINRDERSTMEFIDSRRVNKR

SEQ ID NO: 31029 - DNA, 375 bp, Unknown
  Obtained from environmental sample
  misc_feature (1)..(375): n is a, c, g, or t
gtggagttcctatccatgagtttttacggaggaacatacgccgactccgcaatgcgggaagtattcagagtgctttcggatacggaagactacaaaaaagccgatgtcgtgatggtttcggatttcgagatgtcaggaattgacgacgtaatgcaacaaaagatgctcgcggcaaaagagaataaaaccaaatttcacagcctatgtatcggaaacagcggaaatgggaaaatcattgaaatgtttgacaataattggatttatggctcaaactattccagtcaggccataacgctggttaaaaatatcagacataacttgattcaatctcccacccacaataaacaaactcgctcggctgttccgaccgattag

SEQ ID NO: 31030 - protein, 124 aa, Unknown
  Obtained from environmental sample
  misc_feature (1)..(124): Xaa is any amino acid
MEFLSMSFYGGTYADSAMREVFRVLSDTEDYKKADVVMVSDFEMSGIDDVMQQKMLAAKENKTKFHSLCIGNSGNGKIIEMFDNNWIYGSNYSSQAITLVKNIRHNLIQSPTHNKQTRSAVPTD

SEQ ID NO: 31031 - DNA, 570 bp, Unknown
  Obtained from environmental sample
  misc_feature (1)..(570): n is a, c, g, or t
atgcccgatgttctagccgaatttctagctgagtccgaaagcaagggattgcagctttaccctgctcaagaagaagctgttttggagcttttagagggcaaaaacgttattcttgccactccaacaggttctggaaagtctttggtagctagttttttgcaccgccttatgctctcaaaaaatctgcgttcggtttatacctgcccaataaaagccttggtaaatgaaaaatggatggcactctgcaaggagttcggggcgcaaaacgttgggctttccaccggagatgcaaccgttaatcacaatgctcctatcttgtgctgcacagcggagattttggagcaaattgcgcttagagagggagaaaattcaaatataggtgcggtggcaatggacgaattccattattacagcgacaaagaaagaggagtggcgtggcaaattcccttgctcacaatgaagcacactcaattccttttaatatccgcaacccttggcgatacatctttttttgaaaacgagatgacaaaattgaaacggtttgcaaagcgtgtgcataaaaaatgctga

SEQ ID NO: 31032 - protein, 189 aa, Unknown
  Obtained from environmental sample
  DOMAIN (16)...(167): Type III restriction enzyme, res subunit
  misc_feature (1)..(189): Xaa is any amino acid
MPDVLAEFLAESESKGLQLYPAQEEAVLELLEGKNVILATPTGSGKSLVASFLHRLMLSKNLRSVYTCPIKALVNEKWMALCKEFGAQNVGLSTGDATVNHNAPILCCTAEILEQIALREGENSNIGAVAMDEFHYYSDKERGVAWQIPLLTMKHTQFLLISATLGDTSFFENEMTKLKRFAKRVHKKC

SEQ ID NO: 31033 - DNA, 474 bp, Unknown
  Obtained from environmental sample
  misc_feature (1)..(474): n is a, c, g, or t
gtgcaggaacagataaatgaacgctccgtcgcgctgtatatcaaggcgggaaaaattacggggcgcgttttggctcaggctatgcgggcgtttctcaaaaaagcgcgtgaacccactcccccgacgcacggcaaacagtccgtcaaatcgctcaccaagcagggtgcgagcctgacgaacattgaaatatcgggtgaaaacatcggcgacttcaagaaaacagcgcggaaatacaacgtggacttcgcgctgaaacgcgacgattcggaaacgcccccgaagtggctcgtgttcttcaaggcaaaggacgccgacgctctgacggcggcgttcaacgagtacagcaaagtgacgcttaaacggcagaaaagcaaagagcctccgctccttacgctgcttcaaaaggcaaaagagcttgtcgggcagattaccgcgcccgtcaagaaccgccagcacggggagcgtgaattgtga

SEQ ID NO: 31034 - protein, 157 aa, Unknown
  Obtained from environmental sample
  misc_feature (1)..(157): Xaa is any amino acid
MQEQINERSVALYIKAGKITGRVLAQAMRAFLKKAREPTPPTHGKQSVKSLTKQGASLTNIEISGENIGDFKKTARKYNVDFALKRDDSETPPKWLVFFKAKDADALTAAFNEYSKVTLKRQKSKEPPLLTLLQKAKELVGQITAPVKNRQHGEREL

SEQ ID NO: 31035 - DNA, 312 bp, Unknown
  Obtained from environmental sample
  misc_feature (1)..(312): n is a, c, g, or t
atgggaaagaaaggtacagaacggcgtgtttacacgaaggagttcaaggctgaagctgtagcattggccgagaaaaaggaaaaaccagtaagccgtatcgcggtcgatctgggaatcaacgagaatatgctgcgcagatggatgcaggcttctcgggagtcggcaggaagcggcctgcaagcgttcccaggccacggacggccaaaggatgcggagctcgcccgcttgcggaaggagaacaaagcactcagggaggcaaatgaaatcctaaaaaaagcggcggtcatcttcgcacaaggagaaccccagtaa

SEQ ID NO: 31036 - protein, 103 aa, Unknown
  Obtained from environmental sample
  DOMAIN (8)...(90): Transposase
  misc_feature (1)..(103): Xaa is any amino acid
MGKKGTERRVYTKEFKAEAVALAEKKEKPVSRIAVDLGINENMLRRWMQASRESAGSGLQAFPGHGRPKDAELARLRKENKALREANEILKKAAVIFAQGEPQ

SEQ ID NO: 31037 - DNA, 399 bp, Unknown
  Obtained from environmental sample
  misc_feature (1)..(399): n is a, c, g, or t
atggacttgcagtccgagcacgagcgctgcctgaccgagcggattttcaagcggccggtgatcgtccacgactacccaaaggagatcaaggcgttctatatgcggcagaacgacgacggcaagaccgtcggcgcaatggacattctggtcccgggtattggggagcttgtaggcggctcggagcgtgaggatcgcgccgacgtactggcggcgcggatgaaagagtgcggattggacgaggctaagtatgcgtggtatctagacttacgaaaatacggcggcgcaccccattccggctttggtttgggctttgagagattgctgctgttcgtcacaggcctgcaaaatataagggacgtgatcccattccccagatatccggggaatgcggagttttga

SEQ ID NO: 31038 - protein, 132 aa, Unknown
  Obtained from environmental sample
  DOMAIN (5)...(128): tRNA synthetases class II (D, K and N)
  misc_feature (1)..(132): Xaa is any amino acid
MDLQSEHERCLTERIFKRPVIVHDYPKEIKAFYMRQNDDGKTVGAMDILVPGIGELVGGSEREDRADVLAARMKECGLDEAKYAWYLDLRKYGGAPHSGFGLGFERLLLFVTGLQNIRDVIPFPRYPGNAEF

SEQ ID NO: 31039 - DNA, 465 bp, Unknown
  Obtained from environmental sample
  misc_feature (1)..(465): n is a, c, g, or t
ttgctacccgacatagaaatcgcacggcaatccgccgccaatatgctgaagattacggaaattgccgacaaacttggaattccgcaggatgatttggagccctacggccattacaaggcgaagatctccgaggcgctgttcgcgaaggtcgcgaatcgtgaatacggcaagctcattctagtgaccgccatcaacccgacccccgccggtgagggcaagaccacgctctcgataggacttgctcaggctatggcaaaaatcggcaaaaaggcggtcttggcgctccgcgagccttccctcggcccggtcttcggagtcaagggcggcgcggcgggcggtggatactcgcaggttctgcctatggaggaaataaatcttcactttacgggtgacatgcacgcaatcaccgctgccaacaaacctcctctgcgccatactcgacaaccacctattccacgggcataa

SEQ ID NO: 31040 - protein, 154 aa, Unknown
  Obtained from environmental sample
  misc_feature (1)..(154): Xaa is any amino acid
MLPDIEIARQSAANMLKITEIADKLGIPQDDLEPYGHYKAKISEALFAKVANREYGKLILVTAINPTPAGEGKTTLSIGLAQAMAKIGKKAVLALREPSLGPVFGVKGGAAGGGYSQVLPMEEINLHFTGDMHAITAANKPPLRHTRQPPIPRA

SEQ ID NO: 31041 - DNA, 723 bp, Unknown
  Obtained from environmental sample
  misc_feature (1)..(723): n is a, c, g, or t
gtggggatagccgaggaaaaatccaaacaagaggtgcaggaagaggctaagctcacgaaaacaaaggaaatggcggtatttgaggtcgcgaccgttcgcaaggccgagattgagaagaaggcggtggtcgtcaataccgaggcgcagaaagagaccgcaataataaaggccgaaggggagcggcagagcgttattgtgaagtctgagggggatcggcagagtgttatcgtgaggtcggaaggcgagaagatatcagccgagaatatatcgacggcgatcaaggttaagggatttgccgaagccgacgtaattcagaaaaccaagacggcggaagcggagggtatcaaggcgaccaccttggctcaggcggagggtgagaaggctatgcagttggcctccgttaccgcccagaaagagttggcggcggctatcggcgagaatcagggctaccagcagtacctaataacgatccggcaggtggaggcgcagcaggctattggggtcgagcaggcgaagaatataggtcacgcagatataaagatcatatccaacgccggaaccatagaggaggggataagcggggcgacaaagttgttcggctcanaactcgggcagaacatcgccgcgacccttgaggggttggcgcagacggataccggacgcgccatgttggataagattttggcgaagggcgggtcggataagggtgataagaagggctga

SEQ ID NO: 31042 - protein, 240 aa, Unknown
  Obtained from environmental sample
  misc_feature (1)..(240): Xaa is any amino acid
MGIAEEKSKQEVQEEAKLTKTKEMAVFEVATVRKAEIEKKAVVVNTEAQKETAIIKAEGERQSVIVKSEGDRQSVIVRSEGEKISAENISTAIKVKGFAEADVIQKTKTAEAEGIKATTLAQAEGEKAMQLASVTAQKELAAAIGENQGYQQYLITIRQVEAQQAIGVEQAKNIGHADIKIISNAGTIEEGISGATKLFGSXLGQNIAATLEGLAQTDTGRAMLDKILAKGGSDKGDKKG

SEQ ID NO: 31043 - DNA, 825 bp, Unknown
  Obtained from environmental sample
  misc_feature (1)..(825): n is a, c, g, or t
ttgaaaacatcaagctcagggaaccggttcagcatgaaaacntgcggggcggcagttactacaggagggacaataatgttagataactccacactcaaccagcttcatgatatgcgcctttccgctatggcctgttgtttcaaagaacaacaaggccgtaacgatattggctcgctctcatttgaagaacgttttggcatgttagttgaaaccgaatggcttagccgccggaacaaacgctttgaccgtctggttaagcaggcgggtttccgccttcccgcggttcttgaggatattgattatacgggcaagcatgggattgccaaaccggaaatactcaaactcagcctggggacttatatcaaaagggcgcaaaatgtttttttctcggggccgaccggggttggaaaaacatacctggtatgcgccttgggcagggccgcctgcgcccaaggagtccaagtcctttatacaagggttactgattatttcaatgtgatatttgcttcttcaagcaactacaggcacaaaccgttgcgggataaattcgcttccgtgcccctgctcatccttgacgactgggggcttaaaaagttttccgttgaagaaagccatgaactctcagagctgtttgaacggcgttatggccgggccgcaaccatcatttcaggacagattccttccacctcctggcatgacttgtttcccgacccgacacaagctgacgcaatcctcgaccgtattgtccataacgcctacacctataatatctcaggtgagtccatgcggaaagccctcgggaaaaaggatcttgaaatgtcctga

SEQ ID NO: 31044 - protein, 274 aa, Unknown
  Obtained from environmental sample
  DOMAIN (48)...(77): IstB-like ATP binding N-terminal
  misc_feature (1)..(274): Xaa is any amino acid
MKTSSSGNRFSMKTCGAAVTTGGTIMLDNSTLNQLHDMRLSAMACCFKEQQGRNDIGSLSFEERFGMLVETEWLSRRNKRFDRLVKQAGFRLPAVLEDIDYTGKHGIAKPEILKLSLGTYIKRAQNVFFSGPTGVGKTYLVCALGRAACAQGVQVLYTRVTDYFNVIFASSSNYRHKPLRDKFASVPLLILDDWGLKKFSVEESHELSELFERRYGRAATIISGQIPSTSWHDLFPDPTQADAILDRIVHNAYTYNISGESMRKALGKKDLEMS

SEQ ID NO: 31045 - DNA, 882 bp, Unknown
  Obtained from environmental sample
  misc_feature (1)..(882): n is a, c, g, or t
ttgattatggcaggtacaaacgcaaaaaacaggccgttgccggtagacaaatctttttttgaccgcgtaattgagggaggggcctactatgtcgataagacgctgtttatcagggatcttatagatagagacgcggaagccgtcctctgtacccgcccgcgccggttcggtaaaacgttgaaccagacaatgctcaaatgcttttttgaggatacggcgccgattggcggcaaggatacacggaggctttttagcggattgaagatagaggaagcaggagaacggtacatggaatatcaggggaagtatccggtgatattcctgagctttaaggacgcaaaactagatagctttgacatgtcgtataatcgcttgaaagactacatcgccgaagaatttgagcggcacgcttacgctatggaaaaaatatccggtgaccgcaacttagagaggtttaaacgattatcaaccggtaccggttctataagtgattactctcacgcgctcagattcttgtgtgaatgcttggctaattaccacggcggaaaagtcgttattttaattgacgagtacgacgtcccgctggaaaattcttggtctcgcggtttttatcaggagatgattgatttcatccgaccgttccttagcagcgcgctcaaggacaacccgcacctgcaattggccgttatgaccggatgtctgcgggtttccagagaaagcatattcacagggctaaacaatttggcggtagtatcaatcctcagcgatttctacagcgagcacttcgggtttacacaaaacgaaatggacaccatgcttgaatactacggattagagagcaaaacgcaaattatcaaggattggtacaacggttatctttga

SEQ ID NO: 31046 - protein, 293 aa, Unknown
  Obtained from environmental sample
  DOMAIN (16)...(293): Protein of unknown function (DUF1703)
  misc_feature (1)..(293): Xaa is any amino acid
MIMAGTNAKNRPLPVDKSFFDRVIEGGAYYVDKTLFIRDLIDRDAEAVLCTRPRRFGKTLNQTMLKCFFEDTAPIGGKDTRRLFSGLKIEEAGERYMEYQGKYPVIFLSFKDAKLDSFDMSYNRLKDYIAEEFERHAYAMEKISGDRNLERFKRLSTGTGSISDYSHALRFLCECLANYHGGKVVILIDEYDVPLENSWSRGFYQEMIDFIRPFLSSALKDNPHLQLAVMTGCLRVSRESIFTGLNNLAVVSILSDFYSEHFGFTQNEMDTMLEYYGLESKTQIIKDWYNGYL

SEQ ID NO: 31047 - DNA, 687 bp, Unknown
  Obtained from environmental sample
  misc_feature (1)..(687): n is a, c, g, or t
atggtttttccggtatcctcacccttccgggaacggtgggtcgagggttctttcgcattctcagtcggagaatgtgtatggcacatggatatttgcgttatacgcaaatattcgcaaacagagatgagtttttccgttggaagaactcgaaaacagaagaccgtaaagcggttttttgtacggcatggaagccgcggcgcatatccgtcgttgacggagcgccgaaaaagccaaaggagtgagtatatgataatcaatcacaacttaagtgcaatgtttgccgacaggtccctcaaggttacccaggtgttcctggataaaaacatggagaaattgtcgagcggactgcgcatcaaccgcgccggtgatgatgcttccggattggcagtatcagaaaaaatgcgcgctcagattcgcggtttgaatcaggcgtcaacaaacgcccagaacggtatttcgttcatccaaaccactgagggttatcttcaggaatccgaggacatcgtccagcgtctgcgtgaattggcaattcaggcatcaaacggtatttacaccgaggaagatcgtatgtacatccaagttgaagtttcttccttagttgcggaagtcgacagaatcgcttcgcacgcccaattcaacggaatgaacctgttaacaggccgttcggacgcccatcgctcgccataa

SEQ ID NO: 31048 - protein, 228 aa, Unknown
  Obtained from environmental sample
  DOMAIN (109)...(228): Bacterial flagellin N-terminus
  misc_feature (1)..(228): Xaa is any amino acid
MVFPVSSPFRERWVEGSFAFSVGECVWHMDICVIRKYSQTEMSFSVGRTRKQKTVKRFFVRHGSRGAYPSLTERRKSQRSEYMIINHNLSAMFADRSLKVTQVFLDKNMEKLSSGLRINRAGDDASGLAVSEKMRAQIRGLNQASTNAQNGISFIQTTEGYLQESEDIVQRLRELAIQASNGIYTEEDRMYIQVEVSSLVAEVDRIASHAQFNGMNLLTGRSDAHRSP

SEQ ID NO: 31049 - DNA, 762 bp, Unknown
  Obtained from environmental sample
  misc_feature (1)..(762): n is a, c, g, or t
atggacaataattacatttcgcaggtagagctaatccgcgaagttttccattatcaaacccgctttgaaggctctactctggttttcaaaattgactgccccgtaaccgaagaccccggcttccccggactggtaaaagatctggctttactggcaaagacgggttttaaggtaattattgttcccggagcgaaagaaaatatcgacgcggttttaaggcagtacaatatcgaatcaaattatacctctattgataacttccccgtccgcattacaacaaaacagactatcccctttgttgaaatggcggcttttgacgtagcgagcaaatttatgacattccttaccgccagcaaggttgaggctataatcggcaactttgtgcgggcaagggggcttggcgtccaaaacggcgttgacacggaacacgccggtcttgtagacaagattttcaaagattcgctggagagggtattgaatctgggcatggttcccattcttccctgcataggctggagcccgtccggaaagccctacaatgtgccgagcgcggaaatcgcccttgccgcggcgtccgccctgaaagcggaaaaattgttcttcctttccgtacacgacaggcctctggttaaaaaccttaatatggaagatttggaaacaaggccggacggaagccttttaaggcttaccccacagcaggcgggaaaaactgatagcttcaggctcaaattcgagctctgtccccgcaccattccttcgtga

SEQ ID NO: 31050 - protein, 253 aa, Unknown
  Obtained from environmental sample
  misc_feature (1)..(253): Xaa is any amino acid
MDNNYISQVELIREVFHYQTRFEGSTLVFKIDCPVTEDPGFPGLVKDLALLAKTGFKVIIVPGAKENIDAVLRQYNIESNYTSIDNFPVRITTKQTIPFVEMAAFDVASKFMTFLTASKVEAIIGNFVRARGLGVQNGVDTEHAGLVDKIFKDSLERVLNLGMVPILPCIGWSPSGKPYNVPSAEIALAAASALKAEKLFFLSVHDRPLVKNLNMEDLETRPDGSLLRLTPQQAGKTDSFRLKFELCPRTIPS

SEQ ID NO: 31051 - DNA, 1302 bp, Unknown
  Obtained from environmental sample
  misc_feature (1)..(1302): n is a, c, g, or t
ttggccgagttttcattatcaacccgctttgaaggctctactctggttttcaaaattgactgccccgtaaccgaagaccccggcttccccggactggtaaaagatctggctttactggcaaagacgggctttaaggtaattattgttcccggcgcgaaagaaaatatagacgcggttttaaggcagtacaatatcgaatcaaattatacctctattgataacttccccgtccgcattacaacaaaacagactatcccttttgttgaaatggctgcttttgacgtagcgagcaaatttatgacattccttaccgccagcaaggttgaggctataatcggcaactttgtgcgggcaagggggcttggcgtccaaaacggcgttgacactgaacacgccggtcttgtggacaagattttcaaagattcgctggagagggtattgaatctgggcatggttcccattcttccctgcataggctggagcccgtccggaaagccctacaatgtgccgagcgcggaaatcgcccttgccgcggcgtccgccctgaaagcggagaaattgttcttcctttccgtacacgacaggcctcaggttaaaaatcttaacatggaagatttggaaacaaggccggacggaagccttttaaggcttaccccccagcaggcggaaaagctgatagcttccggaacaaattcgagctctgtccccgcaccattccttcgtgagctgaatcttgcattaagcgccagccgggcgggcgttaacagggtacatttattggacgcaagggaagagggcgccgtattgaaagagctcttttccaacctcggcgtgggaacaatggtttataatgacgaatacgactctatccgggcctttcattctagggacttgcccgatattctgcggatgatggagccgttaatgcaaaaaggcgtccttatcaggcggaaccccgagcaaatacaggaaaaaaaggccgattacgccgtccttgagattgacggctctgtccgcgcttgcggcgctctgcacgattggggcgagtctcagggcgaaatcgccgctgtcgcaaccgatcccgattacaaagacatgggtttaggcagcaaaatcgtcggctaccttgtcgaaaaagcccggaaaagcaaaatgaagcgcgtttttgtgcttacgactcaatcccaggactggttcgaggctttgggtttcaaagaaacgcaagtggagactttgccggaacaaaaacgcaagacttatgaccaatcccggaagagcaaggtctttggattggtactgtaa

SEQ ID NO: 31052 - protein, 433 aa, Unknown
  Obtained from environmental sample
  DOMAIN (13)...(241): Amino acid kinase family
  misc_feature (1)..(433): Xaa is any amino acid
MAEFSLSTRFEGSTLVFKIDCPVTEDPGFPGLVKDLALLAKTGFKVIIVPGAKENIDAVLRQYNIESNYTSIDNFPVRITTKQTIPFVEMAAFDVASKFMTFLTASKVEAIIGNFVRARGLGVQNGVDTEHAGLVDKIFKDSLERVLNLGMVPILPCIGWSPSGKPYNVPSAEIALAAASALKAEKLFFLSVHDRPQVKNLNMEDLETRPDGSLLRLTPQQAEKLIASGTNSSSVPAPFLRELNLALSASRAGVNRVHLLDAREEGAVLKELFSNLGVGTMVYNDEYDSIRAFHSRDLPDILRMMEPLMQKGVLIRRNPEQIQEKKADYAVLEIDGSVRACGALHDWGESQGEIAAVATDPDYKDMGLGSKIVGYLVEKARKSKMKRVFVLTTQSQDWFEALGFKETQVETLPEQKRKTYDQSRKSKVFGLVL

SEQ ID NO: 31053 - DNA, 897 bp, Unknown
  Obtained from environmental sample
  misc_feature (1)..(897): n is a, c, g, or t
atgacggaatacagcgggttgaatcgcaagtatcaaacagccaaagatactattgatcgtatcaactggtacagccgttccagagatcaaatgtacgagagcctgttggcaaagaacgccaggcagaaagaattcttcaacctgctcctgaaaaacatgcaaaatgttattttaattttggatcagaacctgcgtctgttgtattgttcagacgcttttctgaaacttgtcgggataaccaatataggatttatcagcaaccagtcctttgatgaattttccaaatggtacgcagatgcggccagcatcaaatttattcttgacgcgctggtacaggcgttagctgaaaagaaagtaaaagtagtggacagggttttgcccataggggaggataaagagctaaggcattacaggatcaatatcgcgccgatgctgaacgccaaagaagtgattgaaggcataattctcctgttctatgatcttacggaaatcatggaagccaaagaacaggctgtgcaggcaagcaaggcaaaatcggtttttcttgcccagaccagccatgaaatccgcacccccatgaataccgttattggtatgagcgaactggccctccgtgcggacaacctgccccaggcccaagagtatcttggaagcatcaagcaggccgggcttaatcttttagctatcatcaatgatattcttgatatttcaaagatcgaagccggtacaatggaaatagaaaatattccttattcgctttccacccttattaacgatgtggttactatgatccaggtaaaagtctcggaaaaacccatcatctttgtcgttgatttggattctccccttcccatatgcttaaaggtgacgaagcgaggatacggcaggttctggtaa

SEQ ID NO: 31054 - protein, 298 aa, Unknown
  Obtained from environmental sample
  DOMAIN (177)...(242): His Kinase A (phosphoacceptor) domain
  misc_feature (1)..(298): Xaa is any amino acid
MTEYSGLNRKYQTAKDTIDRINWYSRSRDQMYESLLAKNARQKEFFNLLLKNMQNVILILDQNLRLLYCSDAFLKLVGITNIGFISNQSFDEFSKWYADAASIKFILDALVQALAEKKVKVVDRVLPIGEDKELRHYRINIAPMLNAKEVIEGIILLFYDLTEIMEAKEQAVQASKAKSVFLAQTSHEIRTPMNTVIGMSELALRADNLPQAQEYLGSIKQAGLNLLAIINDILDISKIEAGTMEIENIPYSLSTLINDVVTMIQVKVSEKPIIFVVDLDSPLPICLKVTKRGYGRFW

SEQ ID NO: 31055 - DNA, 690 bp, Unknown
  Obtained from environmental sample
  misc_feature (1)..(690): n is a, c, g, or t
ttgcaggggcagttcagccagaatgtagatagtaaaagtccaattgtcacgtcattgacaaagaaggttgtacctgccggttcttcacccactccggctgtagtttcaacaggcggtgcaagaacatcgacaacgcctgcggcaacgccgacaccacaatcttacaaaatcggcgataccggacctgcgggcgggcttatcttctatgataaaggaaacaactcaggcggctggcgttatcttgaagctgcaccaatcaagcttgaatttcaagctccttggagttcgcgcttaggttctgtgcttaatatggtaaaagaaactcaggcgggaattggaagcggaaaacaaaacacgcggttaattattgaactattaaaaaaatcaggcggtgaatggaacagtgcggctataaaaatctcagaaataaatactaacgggttctctgattggtttttaccaagttccggtgaacttgatcaaatgtacggcaatttaggacgtcgcggtttaggcgatttctcgaatagttggtattggtcatctactgaatacaggcaaggtcccgatagtagatggggtgtttatggtcaaaaccttgtcagtggtgaaatcgctgttgcagttatcggtatttttagcgacgacaggtcaaaaaatctctacgtccgtcccatccggcaattttaa

SEQ ID NO: 31056 - protein, 229 aa, Unknown
  Obtained from environmental sample
  misc_feature (1)..(229): Xaa is any amino acid
MQGQFSQNVDSKSPIVTSLTKKVVPAGSSPTPAVVSTGGARTSTTPAATPTPQSYKIGDTGPAGGLIFYDKGNNSGGWRYLEAAPIKLEFQAPWSSRLGSVLNMVKETQAGIGSGKQNTRLIIELLKKSGGEWNSAAIKISEINTNGFSDWFLPSSGELDQMYGNLGRRGLGDFSNSWYWSSTEYRQGPDSRWGVYGQNLVSGEIAVAVIGIFSDDRSKNLYVRPIRQF

SEQ ID NO: 31057 - DNA, 564 bp, Unknown
  Obtained from environmental sample
  misc_feature (1)..(564): n is a, c, g, or t
atggactcttttctcgtatctccgaacggaccgctcaaaggcgatgtctgtatttctggttcaaaaaacgctgtgctacctgttatggctgcgacaatgcttgcaaacggaatttctaaaataagcaatgttccaaacttaaaagacacaaaaacaatggcagatgttttgcgagtaattggttgccgcataaaagaagataatggttgtttgagcatagattcaagtgatataaatcatttggaagctccttatgaacttgtaaaaacgatgagagccagtttttatgtgcttggacctttggttgccaaattcgggaaatgcagggtatctttgcccggcggctgcgcttgggggcctcgccctgtggatttgcacttgaagggcttggaagcactcggtgcaaaaataaatgtgacgcacggatatgtagaagcactcagcaatggcaggcttaaaggaaacatgttttcgtttcccataagttctgttggagcaaccgcaaatattctaatggcgggcacacttgcagagggaacttccgttttgcaaaatcatccatag

SEQ ID NO: 31058 - protein, 187 aa, Unknown
  Obtained from environmental sample
  DOMAIN (6)...(187): EPSP synthase (3-phosphoshikimate 1-carboxyvinyltransferase)
  misc_feature (1)..(187): Xaa is any amino acid
MDSFLVSPNGPLKGDVCISGSKNAVLPVMAATMLANGISKISNVPNLKDTKTMADVLRVIGCRIKEDNGCLSIDSSDINHLEAPYELVKTMRASFYVLGPLVAKFGKCRVSLPGGCAWGPRPVDLHLKGLEALGAKINVTHGYVEALSNGRLKGNMFSFPISSVGATANILMAGTLAEGTSVLQNHP

SEQ ID NO: 31059 - DNA, 612 bp, Unknown
  Obtained from environmental sample
  misc_feature (1)..(612): n is a, c, g, or t
gtgatgggggatcggatatacggcacgctgccggggatagcctggctgaggcagcatggggccggttatgtgctgaggataaagctccgcggcattacgctgtataacggcaggagccaggaaatcgacctgtcggagcggatatccgggcttaaagcagggaaaacagccgatatcgccgggaaatgcaaaatcaacggcaagcctgaaccgatacgcatatgcgccctgcgcaaaggcagggagagcgaaagagcggggttgaaacggctgaagaaagaaaaccagcgcaagcatggggggaaagcggtgaccaaactgcagcgggaaagcaacaagtatatacttgtggcgacctcgctgggaaaagaagaagcgaccgccgcgcaggttctgggcttgtaccggatgcgctggcagatagaactggctttcaaacggctgaaatcgctgttcgcttacaatgatttgcctgagaaacaaagcggcagcgtccgggcgtggttttacggaaagctgctgcttgccgccctgtgtgaaacattggtgaacacagggcgtttttccccctcagggcaaacgttcccgcagatacggtttaccggattctga

SEQ ID NO: 31060 - protein, 203 aa, Unknown
  Obtained from environmental sample
  misc_feature (1)..(203): Xaa is any amino acid
MMGDRIYGTLPGIAWLRQHGAGYVLRIKLRGITLYNGRSQEIDLSERISGLKAGKTADIAGKCKINGKPEPIRICALRKGRESERAGLKRLKKENQRKHGGKAVTKLQRESNKYILVATSLGKEEATAAQVLGLYRMRWQIELAFKRLKSLFAYNDLPEKQSGSVRAWFYGKLLLAALCETLVNTGRFSPSGQTFPQIRFTGF

SEQ ID NO: 31061 - DNA, 792 bp, Unknown
  Obtained from environmental sample
  misc_feature (1)..(792): n is a, c, g, or t
atgatgccgcccatgatgccttgcagcgtatcaaattccctgaccatcccggagacgagatccgccttgcagagcttgcctgcccgttcggcgtcgcgcgccaactgtgtatctcccggcgcgcatttccgcgccagcataccgcacagcgcctccaggcgatgcgctttttcgcccacagaccccagcggcccgagaaagaccaccttatccaacgccgccagccaagcatcgaagttgcccgccagatccgttttccagaaaaagcgcgcatcttccaggcgggcgcgcaggacgcgttcccatccgttacgcaccaccgcctcgtccggcgggcgcatattcagcaccgtcaggaaatacggcagcagcgcgtcgtccgcgccctgcaccccgaagctcttctggtggccttccatgctggtcagcagcacttcgcgcggcagttccagaaaacccttgtccaggccgcccagcaggggaacaggctgttcacacagcccctgcacctcgtcaagcaggctttccttccagagtacgctgcccccgacggccgcagccagggcatcgccttgcgcccggatgcggctgcggcgttccgcagtatccagaatcacctccgccctgcccgccagacagtccaggtattcgttcgcgtgcgccagatcaaaggggccggggccgtgtacccgatgtccgaagctgcggcgtccggattgtacccggccgacggcaaaggaaaccacatcgccgtccagcagcgccagtatccagcgcaggggacgcgcatag

SEQ ID NO: 31062 - protein, 263 aa, Unknown
  Obtained from environmental sample
  misc_feature (1)..(263): Xaa is any amino acid
MMPPMMPCSVSNSLTIPETRSALQSLPARSASRANCVSPGAHFRASIPHSASRRCAFSPTDPSGPRKTTLSNAASQASKLPARSVFQKKRASSRRARRTRSHPLRTTASSGGRIFSTVRKYGSSASSAPCTPKLFWWPSMLVSSTSRGSSRKPLSRPPSRGTGCSHSPCTSSSRLSFQSTLPPTAAARASPCARMRLRRSAVSRITSALPARQSRYSFACARSKGPGPCTRCPKLRRPDCTRPTAKETTSPSSSASIQRRGRA

SEQ ID NO: 31063 - DNA, 1266 bp, Unknown
  Obtained from environmental sample
  misc_feature (1)..(1266): n is a, c, g, or t
ttgcagcgtatcaaattccctgaccatcccggagacgagatccgccttgcagagcttgcctgcccgttcggcgtcgcgcgccaactgtgtatctcccggcgcgcatttccgcgccagcataccgcacagcgcctccaggcgatgcgctttttcgcccacagaccccagcggcccgagaaagaccaccttatccaacgccgccagccaagcatcgaagttgcccgccagatccgttttccagaaaaagcgcgcatcttccaggcgggcgcgcaggacgcgttcccatccgttacgcaccaccgcctcgtccggcgggcgcatattcagcaccgtcaggaaatacggcagcagcgcgtcgtccgcgccctgcaccccgaagctcttctggtggccttccatgctggtcagcagcacttcgcgcggcagttccagaaaacccttgtccaggccgcccagcaggggaacaggctgttcacacagcccctgcacctcgtcaagcaggctttccttccagagtacgctgcccccgacggccgcagccagggcatcgccttgcgcccggatgcggctgcggcgttccgcagtatccagaatcacctccgccctgcccgccagacagtccaggtattcgttcgcgtgcgccagatcaaaggggccggggccgtgtacccgatgtccgaagctgcggcgtccggattgtacccggccgacggcaaaggaaaccacatcgccgtccagcagcgccagtatccagcgcaggggacgcgcataggcaaaatcgcccccgccccagcgcatgcgtttggcaaagggcagcgcggaaatgatcgcggggcagatatccgccagcagcctgagcgcgcttgcgccgccgacgcgcttgcgtatggccacatagtcgccctttttttccgggacgttgaggacaaaacagtcggccgtcgtcaagccgtgtccacgcgcaaagccttccagcgccgtggtgggcctgccgtccacatcataggcggcattgagcgacgggccggtgcacacttcctcgcgctcctcctgcttgagggccagatcctccagcaataccgcggcacggcgcggcgtgctccctacgcgcaaggccccgtaaggcagctttgccccggcgatcgccgcctgaaagcgctgtttcagttcttcttcctgcgccgccagaaaagcggccggcagttcctcggtgcctatttccagtacgaacaaagccatattttcaccattttgattgagaagtga

SEQ ID NO: 31064 - protein, 421 aa, Unknown
  Obtained from environmental sample
  misc_feature (1)..(421): Xaa is any amino acid
MQRIKFPDHPGDEIRLAELACPFGVARQLCISRRAFPRQHTAQRLQAMRFFAHRPQRPEKDHLIQRRQPSIEVARQIRFPEKARIFQAGAQDAFPSVTHHRLVRRAHIQHRQEIRQQRVVRALHPEALLVAFHAGQQHFARQFQKTLVQAAQQGNRLFTQPLHLVKQAFLPEYAAPDGRSQGIALRPDAAAAFRSIQNHLRPARQTVQVFVRVRQIKGAGAVYPMSEAAASGLYPADGKGNHIAVQQRQYPAQGTRIGKIAPAPAHAFGKGQRGNDRGADIRQQPERACAADALAYGHIVALFFRDVEDKTVGRRQAVSTRKAFQRRGGPAVHIIGGIERRAGAHFLALLLLEGQILQQYRGTARRAPYAQGPVRQLCPGDRRLKALFQFFFLRRQKSGRQFLGAYFQYEQSHIFTILIEK

SEQ ID NO: 31065 - DNA, 741 bp, Unknown
  Obtained from environmental sample
  misc_feature (1)..(741): n is a, c, g, or t
gtgtatctcccggcgcgcatttccgcgccagcataccgcacagcgcctccaggcgatgcgctttttcgcccacagaccccagcggcccgagaaagaccaccttatccaacgccgccagccaagcatcgaagttgcccgccagatccgttttccagaaaaagcgcgcatcttccaggcgggcgcgcaggacgcgttcccatccgttacgcaccaccgcctcgtccggcgggcgcatattcagcaccgtcaggaaatacggcagcagcgcgtcgtccgcgccctgcaccccgaagctcttctggtggccttccatgctggtcagcagcacttcgcgcggcagttccagaaaacccttgtccaggccgcccagcaggggaacaggctgttcacacagcccctgcacctcgtcaagcaggctttccttccagagtacgctgcccccgacggccgcagccagggcatcgccttgcgcccggatgcggctgcggcgttccgcagtatccagaatcacctccgccctgcccgccagacagtccaggtattcgttcgcgtgcgccagatcaaaggggccggggccgtgtacccgatgtccgaagctgcggcgtccggattgtacccggccgacggcaaaggaaaccacatcgccgtccagcagcgccagtatccagcgcaggggacgcgcataggcaaaatcgcccccgccccagcgcatgcgtttggcaaagggcagcgcggaaatga

SEQ ID NO: 31066 - protein, 246 aa, Unknown
  Obtained from environmental sample
  misc_feature (1)..(246): Xaa is any amino acid
MYLPARISAPAYRTAPPGDALFRPQTPAARERPPYPTPPAKHRSCPPDPFSRKSAHLPGGRAGRVPIRYAPPPRPAGAYSAPSGNTAAARRPRPAPRSSSGGLPCWSAALRAAVPENPCPGRPAGEQAVHTAPAPRQAGFPSRVRCPRRPQPGHRLAPGCGCGVPQYPESPPPCPPDSPGIRSRAPDQRGRGRVPDVRSCGVRIVPGRRQRKPHRRPAAPVSSAGDAHRQNRPRPSACVWQRAARK

SEQ ID NO: 31067 - DNA, 444 bp, Unknown
  Obtained from environmental sample
  misc_feature (1)..(444): n is a, c, g, or t
atggtacaatctgaaattctgctgaaatattcactctttggcggactgttaaaagaacagattgaagccttaattccgcttatgcaggaagagaaatacggtccggatgaatttattattaccgagggaagccccaatgacaagatttttttcataattgaggggcaggtatcggtaagtaaaagaaatgtacatctgtccaactttagcgaaggcgaggcttttggtgaaatggaagtactcgatattatgccggctattgcgtcaattaaaaccgtttcgcaggttacggtcatgtcgatatccaataaagctttgcgggaaatttacaaaatggatgtcaaagtctttgcgctgataattatgaatcttgccagggatgtttgccgtcgtttgtgtaaaacagatgaaaaacttgcttcattacaaccaattttaatttaa

SEQ ID NO: 31068 - protein, 147 aa, Unknown
  Obtained from environmental sample
  DOMAIN (30)...(115): Cyclic nucleotide-binding domain
  misc_feature (1)..(147): Xaa is any amino acid
MVQSEILLKYSLFGGLLKEQIEALIPLMQEEKYGPDEFIITEGSPNDKIFFIIEGQVSVSKRNVHLSNFSEGEAFGEMEVLDIMPAIASIKTVSQVTVMSISNKALREIYKMDVKVFALIIMNLARDVCRRLCKTDEKLASLQPILI

SEQ ID NO: 31069 - DNA, 681 bp, Unknown
  Obtained from environmental sample
  misc_feature (1)..(681): n is a, c, g, or t
gtgaccaacaggcaaaataaccggcaagtcgcggtaaaggtgaatgaccgggggccttttgtccctgggaggattattgatgtttccagagcggcggcagagcagcttgatatgctcattacaggcactgcttttgtaacagttgacaaaatccaggcaaaccacccattgaacgcccagggcgcttatttaccgccgcaagctttccagcagccgcctggctatttgccgccacagcaagctccggtggtcattacgcagccgatgctccccccccagtcccagcagctgccccctctgcctcagcagccagtccagacacccgtactgatcccaacactgccgcctctgcctcagcagcaggtacttccggcgcaggcccaggcaccggtaccaacaccgccacctctgccgcctcctgaaacacctgcgcctgttgcggccccctacgcgccaattactgtaactatataccccccccaaacgcagtctccatccatagcgcctaacccaacggacataacgcctaatccgtcggttatatcgcctaatccaatggactttccggagcccagggcaaggctgaacccgtcaataacaccgtctccggacagaatatacaaactgcaagtcggttcatataaagtcgccggcaacgcggttgacgcttatgtaaattga

SEQ ID NO: 31070 - protein, 226 aa, Unknown
  Obtained from environmental sample
  misc_feature (1)..(226): Xaa is any amino acid
MTNRQNNRQVAVKVNDRGPFVPGRIIDVSRAAAEQLDMLITGTAFVTVDKIQANHPLNAQGAYLPPQAFQQPPGYLPPQQAPVVITQPMLPPQSQQLPPLPQQPVQTPVLIPTLPPLPQQQVLPAQAQAPVPTPPPLPPPETPAPVAAPYAPITVTIYPPQTQSPSIAPNPTDITPNPSVISPNPMDFPEPRARLNPSITPSPDRIYKLQVGSYKVAGNAVDAYVN

SEQ ID NO: 31071 - DNA, 1032 bp, Unknown
  Obtained from environmental sample
  misc_feature (1)..(1032): n is a, c, g, or t
gtgaatcaacgcgcccttcgggcggacattctgttactgctcactgccggaatctggggctttggatttgtcgcccagcgttccggcatggagtatgtagggccattcgcttttaatgggattcgctttatactgggaagcctttcccttctgccattaatcttcttccgcagcaggtactatcaaaaagcatccggcacacatcagggctcttataaaaaattattaatatattcgctttccgccggcacttgtctgtttatcgccgttatcctgcagcagattggcattatgttcacgacggcgggcaacgccggatttatcaccgggttctacgtggtgcttacccccatattcggcatttttcttggcagaaaaaccggacccgctacatggttaggatcggtgttcacccttgccggcctttacttcatctgcgccattggcaaacaaggctttaaccctggcgacattatcgttttggcgagcgcggttttttgggcctgccatgttctgctgatagaccgccttgtacaaagcattgacccaatattactatcctcagggcaattcgccgtgtgcggcatcctcatgcttataggaacatttctggcggaaccgtttattatgccggttgttgaaaagctcaaccccgcgctgctgcaaaccgggactttttcgtggctgcctttaacggttctggtcaaggggatttcagcgcaaacagtcgccttccctgttgacgcgataatcccgattctgtacggagggcttggttccgtgggcatagcctacaccctgcaggcagtagcgcaaagagacgctccgcccgcccacgcgacgatcatactctgtttcgaaggatgttttgccgcaatcggcggtgccctgctgctctcggaaaaagtcggccgctggacgcttttgggattcgtccttatgcttgcgggaatgctggtaacacagtgggaagttatcgcgcggggactggggcagggagcagggagcaacgttgccaaaaatgatacctga

SEQ ID NO: 31072 - protein, 343 aa, Unknown
  Obtained from environmental sample
  SIGNAL (1)...(25)
  DOMAIN (165)...(323): Integral membrane protein DUF6
  misc_feature (1)..(343): Xaa is any amino acid
MNQRALRADILLLLTAGIWGFGFVAQRSGMEYVGPFAFNGIRFILGSLSLLPLIFFRSRYYQKASGTHQGSYKKLLIYSLSAGTCLFIAVILQQIGIMFTTAGNAGFITGFYVVLTPIFGIFLGRKTGPATWLGSVFTLAGLYFICAIGKQGFNPGDIIVLASAVFWACHVLLIDRLVQSIDPILLSSGQFAVCGILMLIGTFLAEPFIMPVVEKLNPALLQTGTFSWLPLTVLVKGISAQTVAFPVDAIIPILYGGLGSVGIAYTLQAVAQRDAPPAHATIILCFEGCFAAIGGALLLSEKVGRWTLLGFVLMLAGMLVTQWEVIARGLGQGAGSNVAKNDT

SEQ ID NO: 31073 - DNA, 351 bp, Unknown
  Obtained from environmental sample
  misc_feature (1)..(351): n is a, c, g, or t
atgatggccgagatgcttgccactatattaagaagtccgcaagcaacggcggcgactattgccattattgagacttttacgaaactgcgtgaattgtcgcatacaatcgcaaaactggcggatactaaagaaaagccggaacaacaatcacttatgcaaaaaagcggagatattttctctgaattggtagccgccgatatgcctgtatcgggaacagaaactactcttgagataaattttgcggtaatgaaatttcggcatactgttaaaagagagaaaaaaaaggaaacgatacaaggtgctaaaaagccaagcaggggactacgtatgaaaccaaaacctttcggataa

SEQ ID NO: 31074 - protein, 116 aa, Unknown
  Obtained from environmental sample
  SIGNAL (1)...(17)
  misc_feature (1)..(116): Xaa is any amino acid
MMAEMLATILRSPQATAATIAIIETFTKLRELSHTIAKLADTKEKPEQQSLMQKSGDIFSELVAADMPVSGTETTLEINFAVMKFRHTVKREKKKETIQGAKKPSRGLRMKPKPFG

SEQ ID NO: 31075 - DNA, 534 bp, Unknown
  Obtained from environmental sample
  misc_feature (1)..(534): n is a, c, g, or t
atgccattcaaacgctctagccaactgagctacacccccggaagtctcttcaatttacaaaatagacggttttttgtcaatggattagtattaagcatgattgtcagtgtttcaaggcggtgcgatataccacgataccggttcaaatggttcatggaaaggctcgatgaaggattttgtgaagtcgctaacccctacaaccagaaacagataaaacgtgtttccttgcttccggcggcaggggaagacgacacggctgataatgtcgaggcttttgtcttttggacacgggaaccggagaatattcttgccaatacggaagaattggaaaaacgcggggttcgtttctatgtgatggttacggttaccggatatcccgcagaactggaacctgatgtgccggacacgccaaaggttttggtttacatgaaaaaactgtcgcaaaaaatagggcaggacagggttatttggcgttacgatcctgtaatcttaacaagcgtgacagacgaaaagttttcaccaaaagaactttga

SEQ ID NO: 31076 - protein, 177 aa, Unknown
  Obtained from environmental sample
  misc_feature (1)..(177): Xaa is any amino acid
MPFKRSSQLSYTPGSLFNLQNRRFFVNGLVLSMIVSVSRRCDIPRYRFKWFMERLDEGFCEVANPYNQKQIKRVSLLPAAGEDDTADNVEAFVFWTREPENILANTEELEKRGVRFYVMVTVTGYPAELEPDVPDTPKVLVYMKKLSQKIGQDRVIWRYDPVILTSVTDEKFSPKEL

SEQ ID NO: 31077 - DNA, 354 bp, Unknown
  Obtained from environmental sample
  misc_feature (1)..(354): n is a, c, g, or t
gtgtttaacatttacgaggagaatcattttgattactgctgcgccggcggttggattcattttacctctctggacttcggtagtcagaaaatagatcatttttccgcagttgtacaaggtacacaaggaagctgtatagaaatacggctggatgcgcctgacggagcgttggcaggaatcattgaagttcccaacacgggggaaatatgttcttatgagctaaaccccttaagcccgcgccggcggcctgtatgggcatacgctgaaacaatgattgaaaaaatcagcggcatccatgatctatatcttatattgtacggaaaaaccgctgtctggtgttttgaatttaaataa

SEQ ID NO: 31078 - protein, 117 aa, Unknown
  Obtained from environmental sample
  misc_feature (1)..(117): Xaa is any amino acid
MFNIYEENHFDYCCAGGWIHFTSLDFGSQKIDHFSAVVQGTQGSCIEIRLDAPDGALAGIIEVPNTGEICSYELNPLSPRRRPVWAYAETMIEKISGIHDLYLILYGKTAVWCFEFK

SEQ ID NO: 31079 - DNA, 357 bp, Unknown
  Obtained from environmental sample
  misc_feature (1)..(357): n is a, c, g, or t
gtgaaactaaaattcaacacaataaacggagtgctaaaagatagaagagtgtgcttggttgacgattccattgttcgcggaacaactctgaaaattctatgcaaaatgatacgaaacgcaggagcaaaagaagttcatattcgcgttgcaagcccgcccgttgaacatccgtgcaattacggaatggatttcccaagccctgcggaattaatcgcaactgcgctagcacctgcggaggtagcaaaaatgctgggcgtggatagcctcggctatttgagcgtaaaaggaatgagagaatgcaccggccagccagatgatttttgctgtgcttgttttgacgatatctaccccgaataa

SEQ ID NO: 31080 - protein, 118 aa, Unknown
  Obtained from environmental sample
  misc_feature (1)..(118): Xaa is any amino acid
MKLKFNTINGVLKDRRVCLVDDSIVRGTTLKILCKMIRNAGAKEVHIRVASPPVEHPCNYGMDFPSPAELIATALAPAEVAKMLGVDSLGYLSVKGMRECTGQPDDFCCACFDDIYPE

SEQ ID NO: 31081 - DNA, 585 bp, Unknown
  Obtained from environmental sample
  misc_feature (1)..(585): n is a, c, g, or t
atgtatcctctttttgcgctaccaatagcttatttgctaggctcaataccaacggcggtttgggttgcaagaatttacaagaacatagatataagagaacacggcagcaaaaatgccggtttaacgaatgtattcagggttttggggtggaaacctgctctgcctgttatagctgttgacttggcaaagggcttttttgcgccttttatagcaatgcgattaaatgctgctgagggtacatctgaagtttatttgtggctcccagttgttgccggaatgcttgtggttttgggtcatagctttacctgcttggcgaggttcaaaggcggaaagggggttttaaccacgctcggcgtgttcctcgccttgcaacctgtgcttgccctcacctgctttgccttttgggggcttttgtttgtggcaacaaaatatgtgtctgtggcaagcatcggagcctgtgctatgctttccgtgctttctgcggtttgttttgcctaccagtgtgatggcatgaaacattacgttctcatttatctccaatcgtggcgatttttggtatttgtaacacaaagcaaatatggttag

SEQ ID NO: 31082 - protein, 194 aa, Unknown
  Obtained from environmental sample
  DOMAIN (7)...(192): Domain of unknown function DUF
  misc_feature (1)..(194): Xaa is any amino acid
MYPLFALPIAYLLGSIPTAVWVARIYKNIDIREHGSKNAGLTNVFRVLGWKPALPVIAVDLAKGFFAPFIAMRLNAAEGTSEVYLWLPVVAGMLVVLGHSFTCLARFKGGKGVLTTLGVFLALQPVLALTCFAFWGLLFVATKYVSVASIGACAMLSVLSAVCFAYQCDGMKHYVLIYLQSWRFLVFVTQSKYG

SEQ ID NO: 31083 - DNA, 1452 bp, Unknown
  Obtained from environmental sample
  misc_feature (1)..(1452): n is a, c, g, or t
gtggtaaaactgattttaaaacagcgtcccggcgtgtgggtgttaatgtgcgctctttcaaaaataggcgcgatttgtattccggggacataccagcttaccgctaaagatttggattaccgttgcaatatagccaatgtaaaacttttaattacggttgatgacaaggacctgcttgataatatcgctttggcgcgtccaaattgccctaatctggaaaaaattgccgttatcggaaatacaattcctcagggttttattgacatgcgcgcggaaattcaaaaagcgcctgaaaactttaaaagaatgccgaccgtggcaaaagacccgatgctcatttatttttcttccggtactgccggaatgcctaaaatggtgcttcacaaccacagtctgccgttggggcatattgttacggcaaaatactggcactgcgtggaagataaccgcgtccacctgacgcagactgattcaggctgggcgaaattcgcgtggggcaagatttacggacagtggatttgcggcgcggcaataggcgtttacgacacggaaaaatttacccccaaaggaatgttagacgcgattcaacggttaaagcccacgacattttgcgctcccgccacggtatttcgttatctgattaaggaagacctttcacattatgattttagttttattcgccacacgtccgtggccggggagccgttaagtccggaagtttataataaatttaaagaactgacaaaacttgaaattcatgaagggttcggccagagtgagacttcggtaatggcggctgtttttaaatggctgcccgtaaagcctggttcaatgggaaaacccgcgccgcttttcggattcaaattgttggacgaaaacggaaatgaatgcgacgagggcattgtaggaaacatgagtataacgctagccggaaaaaatatgtacgaaacagaaggtagcgccgctgataatattccgcccgtaatcggcaattcggattttccaggccttttccgcggttattggaaagatagggaaataactttaaataactggaacaacggaacgtatcaaacgggcgacatggcgtggaaagacgacgacggctatttatggtttgtaggacgtaatgacgatgtgatcaaatgttcgggttaccgtataggtccttttgaggttgaaagcgccctgatggaacacccctcggtactggagtgcgccgtcaccgccgctcccgataccatgcgcgggcaggtagtgaaggctaccatcgttctagcgcggggttacgccgcctcggatgaattgatacgagaactgcaaaatcacgttaaacgggtaaccgccccctacaaatacccgcgcatcatagaatttacgccggaactgccgaaaacaatcagcggaaaaatccagcgtaatatgatacggaaaaaagattttaacgattag

SEQ ID NO: 31084 - protein, 483 aa, Unknown
  Obtained from environmental sample
  DOMAIN (1)...(408): AMP-binding enzyme
  misc_feature (1)..(483): Xaa is any amino acid
MVKLILKQRPGVWVLMCALSKIGAICIPGTYQLTAKDLDYRCNIANVKLLITVDDKDLLDNIALARPNCPNLEKIAVIGNTIPQGFIDMRAEIQKAPENFKRMPTVAKDPMLIYFSSGTAGMPKMVLHNHSLPLGHIVTAKYWHCVEDNRVHLTQTDSGWAKFAWGKIYGQWICGAAIGVYDTEKFTPKGMLDAIQRLKPTTFCAPATVFRYLIKEDLSHYDFSFIRHTSVAGEPLSPEVYNKFKELTKLEIHEGFGQSETSVMAAVFKWLPVKPGSMGKPAPLFGFKLLDENGNECDEGIVGNMSITLAGKNMYETEGSAADNIPPVIGNSDFPGLFRGYWKDREITLNNWNNGTYQTGDMAWKDDDGYLWFVGRNDDVIKCSGYRIGPFEVESALMEHPSVLECAVTAAPDTMRGQVVKATIVLARGYAASDELIRELQNHVKRVTAPYKYPRIIEFTPELPKTISGKIQRNMIRKKDFND

SEQ ID NO: 31085 - DNA, 450 bp, Unknown
  Obtained from environmental sample
  misc_feature (1)..(450): n is a, c, g, or t
gtgcttcacaataaagttaccgcaatagagaaggaagctttcgcgaattgtacaggtcttgctgaaatcataattcccgcaagcgttacgagcataggtccaaacgcgttttataattgcttcgcccttacggacataattattccggcgggtattaaagttattcccgataacgctttctccgggtgcaagaatttgaggaacgtaactttgggtaacaatgtacagcgcattgacaaggcttttatgaactgcgaaaaccttgtagcgataattattccccgcagtgtgacagccataggcgatttcgctttttcacaatgcaagaacctaaaaaccgtcactctgctcaatgacaaagtgacaatcggaagacgcgcttttctgggatgcccgctgaccaacaaggaagaaatgattacccgtttcggcgcggctatttttaattaa

SEQ ID NO: 31086 - protein, 149 aa, Unknown
  Obtained from environmental sample
  misc_feature (1)..(149): Xaa is any amino acid
MLHNKVTAIEKEAFANCTGLAEIIIPASVTSIGPNAFYNCFALTDIIIPAGIKVIPDNAFSGCKNLRNVTLGNNVQRIDKAFMNCENLVAIIIPRSVTAIGDFAFSQCKNLKTVTLLNDKVTIGRRAFLGCPLTNKEEMITRFGAAIFN

SEQ ID NO: 31087 - DNA, 999 bp, Unknown
  Obtained from environmental sample
  misc_feature (1)..(999): n is a, c, g, or t
atgtcgcagaccccggccgcctccatttctttgnacagtccgcaagagaaagaagcccgtgacaggggcgccaccctatatcttcccgaaggggccattagaatgtnggcgcaggaggcaattcccatttttgcgctcggtctttctgaaaagtcttttgcgttaacttttaagatgacggttgataaagacggcatggttttagatacggaaatatttccctctattgttaaagtgctgcgtatgacttatgaagaggcggacagggtgatggatacggataatggaacggatcaaaaggacgcgactgcgttacgtgcgcttttttccctgtcacagaaaatttataaccgccgcatcgcgtatggcgccgttaacattgaccttcccgacgttcacataacggttgaaaatgagaaaattgaagttacgcctataaaagattaccgcagttcttttttagttaaagaatgtatgattgcggcgggggagggtgcgggagattgggcggctggaaaaggacttccttttccgtatatcagtcaggaagtggaaatacagggaaaagttttgggcggttttgccggttccatgcagctacgcaaatgcatgaggccgcgcaccctttccgtaaaaccgggacggcatcaggggctggggttggatacctacacgcaggtgacaagccccctgcgccgttacaccgatttactcgcccacattcaaataagggccttcctgcgcggcaacacccccctttcctccgatgatgtttcggcgcgtcttggtttcagcgatgcggcggtaaccgcggtcgttcacgccgagagggcgtctgaaaaccactggaaaatggtttatttatctgacaaaaaagactccgtttgggacgcggtcgccatagaaaacaaaggcaaccgctgggctgtaataatcccccaacttgcgctgaaacgcaagtttcgcttcagagggatgtttcacctaacgacaaagtaa

SEQ ID NO: 31088 - protein, 332 aa, Unknown
  Obtained from environmental sample
  DOMAIN (1)...(182): RNB-like protein
  misc_feature (1)..(332): Xaa is any amino acid
MSQTPAASISLXSPQEKEARDRGATLYLPEGAIRMXAQEAIPIFALGLSEKSFALTFKMTVDKDGMVLDTEIFPSIVKVLRMTYEEADRVMDTDNGTDQKDATALRALFSLSQKIYNRRIAYGAVNIDLPDVHITVENEKIEVTPIKDYRSSFLVKECMIAAGEGAGDWAAGKGLPFPYISQEVEIQGKVLGGFAGSMQLRKCMRPRTLSVKPGRHQGLGLDTYTQVTSPLRRYTDLLAHIQIRAFLRGNTPLSSDDVSARLGFSDAAVTAVVHAERASENHWKMVYLSDKKDSVWDAVAIENKGNRWAVIIPQLALKRKFRFRGMFHLTTK

SEQ ID NO: 31089 - DNA, 1206 bp, Unknown
  Obtained from environmental sample
  misc_feature (1)..(1206): n is a, c, g, or t
atgcaaaaatggtctagcctgatagccccaaaaccgttggttgttttattggacgaagtggatgccctggaaggggatgcaatgataagtttcttgcgccaattacgtaatggttttatgactcgaggtgttgggaagtttccggtatcaatcgcgctggtgggcatgagggacttaaaggattacattactgtggcaaaaggcggcgttgctccaaatccgggttcaccctttaatataaaagaagatccagtagtattgtccaactttacccaaacagatgttgaaaaactcttcgctcaacgaaccgaggaaactggccaggctattaatagggatgcccttgactacgcgtatgagcagtcacgtgggcagccatggattgtcaattcactgtttaaacgcgctacaatgcgagtattacatgagaatgattacagcaatgtaacactggcgcatatcagggaagcgagggagcagatgatacttgcacgggagacccatcttgattctcttgctgtaaggatacaggataaagttattcgcaaagtgatggaaagccttataacaggaacgcctgatccggagcttaccgcaagcgaaggttttcgtatttgtgtggatttagggcttgtaatgaaggagcggggcaccccgacagtagccaatcctatttataaagaagtacttgcaaggcaattgacctattctacacaggatgccattccagagccggaatggcaatgggaaaagccggatggttcccttgacatggacgcgttactgcgtgaatttcaggtgttctggcgggaaaattccgaaatgtgggaggaaaagatgagttataccgaagctttcccccatctcttgttaatggcttttctacagcgcgtgcttaacggcggaggccgtatagaacgcgaatacgccgccggacgcggcaggatggatttatttattgaatataacgcatacaaatatattattgaaataaaactgatatatgaaaaacaatcatttgataatattaaaattaagggattggatcaaaccgccaaataccgggatataaaagcgccggattgccccgcctaccttgttatttttgaccgccgtgatacggcaaagaaccacagttgggatgaaaagatttattggcaggaagaaaccgttcccggcggaacagtaacggttgttgggtgttag

SEQ ID NO: 31090 - protein, 401 aa, Unknown
  Obtained from environmental sample
  misc_feature (1)..(401): Xaa is any amino acid
MQKWSSLIAPKPLVVLLDEVDALEGDAMISFLRQLRNGFMTRGVGKFPVSIALVGMRDLKDYITVAKGGVAPNPGSPFNIKEDPVVLSNFTQTDVEKLFAQRTEETGQAINRDALDYAYEQSRGQPWIVNSLFKRATMRVLHENDYSNVTLAHIREAREQMILARETHLDSLAVRIQDKVIRKVMESLITGTPDPELTASEGFRICVDLGLVMKERGTPTVANPIYKEVLARQLTYSTQDAIPEPEWQWEKPDGSLDMDALLREFQVFWRENSEMWEEKMSYTEAFPHLLLMAFLQRVLNGGGRIEREYAAGRGRMDLFIEYNAYKYIIEIKLIYEKQSFDNIKIKGLDQTAKYRDIKAPDCPAYLVIFDRRDTAKNHSWDEKIYWQEETVPGGTVTVVGC

SEQ ID NO: 31091 - DNA, 537 bp, Unknown
  Obtained from environmental sample
  misc_feature (1)..(537): n is a, c, g, or t
gtgccgcagactgccgagcctgtgaagccctcggcttcaacacaaaattcccagccaactgtaccgtcaaccgcccagagccagacagggcaaagcccgcctgcgcagcgtcctcctgaaacgcgggaaagggttctgtattttgtccaggtggacagaagcgggtacataaacagggtgcaggctaacaggagacttccggtttcagattcgccccttaccgatgttgttcaggccctcgtcgccggaccgaacgcggatgaaaaaagcaaaggccttatttcgcttattcctccggcgacaaaactgctttccgccagcatccggggaaacacagcgtatctcagttttaacgaggagtttcagtacaacacctacggagtggaaggatacgcagtccagctgcggcagattgtctttaccgttactgagttctccaatgtcgccgacgttcagattttaatcgaagggcggcggattgattaccttggcgaaggtgtctgggttggcagtccggtcagcagggatatgctgtaa

SEQ ID NO: 31092 - protein, 178 aa, Unknown
  Obtained from environmental sample
  misc_feature (1)..(178): Xaa is any amino acid
MPQTAEPVKPSASTQNSQPTVPSTAQSQTGQSPPAQRPPETRERVLYFVQVDRSGYINRVQANRRLPVSDSPLTDVVQALVAGPNADEKSKGLISLIPPATKLLSASIRGNTAYLSFNEEFQYNTYGVEGYAVQLRQIVFTVTEFSNVADVQILIEGRRIDYLGEGVWVGSPVSRDML

SEQ ID NO: 31093 - DNA, 678 bp, Unknown
  Obtained from environmental sample
  misc_feature (1)..(678): n is a, c, g, or t
gtgcgagagccaaaggaagcttccgaggcagaagagatggacaataaagccgagatgaaacagcttagcaaagatgagaaaaagagcctgctcttgattctcttcggcgtgtttttttggttcaccggctacaatgccgtcgagacgttctttaccctgtatgccacgaacactctgggcatggacgccggcggcgcgtcgatgacgctttcaattttttctcttacttttttggcctttgcggttccggccggttatcttgccgtaaagaccggaaggcgcaaagcaattttgataggcttaacgggccttatcattctgtttatcccgatgatctttttggccaacgcgtgggctgcccgcgtctgtctttttttgggagggttcttttgggcgatggtcaacatcaactcgcttccaatggtggtaaagctttcaggcgaggacaaagtcggcgcttttgtgggctactactactttttttccttcagctcccagatcgtttctcctgttttgttcggctttatccgcgacatagtgggccattataaagtgctgttcctgtacgcctgtatagcttttttcctggccgcgttaagcctattatttgtgcgtcacggtgaggacaagccggatcaggtaagcgcgtcgcaggtgcttgaagggcttgatgattaa

SEQ ID NO: 31094 - protein, 225 aa, Unknown
  Obtained from environmental sample
  misc_feature (1)..(225): Xaa is any amino acid
MREPKEASEAEEMDNKAEMKQLSKDEKKSLLLILFGVFFWFTGYNAVETFFTLYATNTLGMDAGGASMTLSIFSLTFLAFAVPAGYLAVKTGRRKAILIGLTGLIILFIPMIFLANAWAARVCLFLGGFFWAMVNINSLPMVVKLSGEDKVGAFVGYYYFFSFSSQIVSPVLFGFIRDIVGHYKVLFLYACIAFFLAALSLLFVRHGEDKPDQVSASQVLEGLDD

SEQ ID NO: 31095 - DNA, 903 bp, Unknown
  Obtained from environmental sample
  misc_feature (1)..(903): n is a, c, g, or t
gtgtcggaacgttccctgcagagcgacaataccacctaccttttcgccggaaccgtgatctcgcgcgatgaggaagacgtcaccattctgaaccaggcgacgatcagcagcgccaacaaccccgaatccctgtggtcgctctccgcctcgcgcgtatggcttctgcccggatccgatttcgccatatttaacgcggttcttaaagtcggcgaaatgccggtaatgtatataccgttttttcactatccggcggatgaagttatttttcatcctgtgataggctcccgtacaagggaggggtcttttatccagactacgacataccttctgggccgtccgaaagcgtcttccagctcccagagctcactaaccaagatactgggcaattccagcgatatggaaaagaagcgggaagggatgtttctgcggagtacgggaaagaaagtgacggatcccgacaaaaccagcctgaagatgatgcttgattattatgttaatctgggcacttatatcggaatggatctttcattgccggcatataagattttcagcgcgacaaacctcagcatgggcgtcggcctgacgcggactctcgtcccgcaagacggaagttatacgccatttttccctgattataacggcgagaccgactggaaccactccaacctgttatcaaaggatgtaccgttcaggtaccggtttacaagcgggaacactataagcggaaaatacggcagtttttcctggtccatcccttattattccgatccctttgtagacagcgattttctcaagcgttccgaagagatggactgggtcaacatgattcagcggggcgcggcttccatggcaggcgcaggattcttcagagaaccaaataagtcaggagcccgtggattttag

SEQ ID NO: 31096 - protein, 300 aa, Unknown
  Obtained from environmental sample
  misc_feature (1)..(300): Xaa is any amino acid
MSERSLQSDNTTYLFAGTVISRDEEDVTILNQATISSANNPESLWSLSASRVWLLPGSDFAIFNAVLKVGEMPVMYIPFFHYPADEVIFHPVIGSRTREGSFIQTTTYLLGRPKASSSSQSSLTKILGNSSDMEKKREGMFLRSTGKKVTDPDKTSLKMMLDYYVNLGTYIGMDLSLPAYKIFSATNLSMGVGLTRTLVPQDGSYTPFFPDYNGETDWNHSNLLSKDVPFRYRFTSGNTISGKYGSFSWSIPYYSDPFVDSDFLKRSEEMDWVNMIQRGAASMAGAGFFREPNKSGARGF

SEQ ID NO: 31097 - DNA, 723 bp, Unknown
  Obtained from environmental sample
  misc_feature (1)..(723): n is a, c, g, or t
ttgcggatggtgaactggaccatccccctgacgatagacggaaaagaaccttacacgccggctgctgccaggcttctggctgacggaacctactggatggacatcaaggtttccgacaggggcggcaacgaatactcccgctacaatattgtctttgcggtagacaggacagatccgaccatttccataacaagtccgtctcccacggctgacaagaataaagcctacaaagaggcgtttagactggttggacaggccacggataacaacctccgctatgtaaagataaaagtggataacggcccggaacgtgacccgacaacgcagactctcactggtaatggcggtgaatggacatgggatgccgcatcgtggcaatcagtggaatttggcgctaccggaactctcctgtcgcagggaacgcatacgataaccgttaccgcgtatgactatgccggcaaatccacttatgcgacatacacctttgtcagggataaaactccgcccacggtggaactgaancacatcagcagcgccaataatgtgattaccgagaataacgccatgattcgggtgtccattaacgacgcgcattccacatcngctttgcgacagacgccgcttctccnggtaatggcgcttactactatgagtacggcattggcaacagcgtctaccacgatggtaaaacaaatggggctaaatggcctcaaagcgccataa

SEQ ID NO: 31098 - protein, 240 aa, Unknown
  Obtained from environmental sample
  misc_feature (1)..(240): Xaa is any amino acid
MRMVNWTIPLTIDGKEPYTPAAARLLADGTYWMDIKVSDRGGNEYSRYNIVFAVDRTDPTISITSPSPTADKNKAYKEAFRLVGQATDNNLRYVKIKVDNGPERDPTTQTLTGNGGEWTWDAASWQSVEFGATGTLLSQGTHTITVTAYDYAGKSTYATYTFVRDKTPPTVELXHISSANNVITENNAMIRVSINDAHSTSALRQTPLLXVMALTTMSTALATASTTMVKQMGLNGLKAP

SEQ ID NO: 31099 - DNA, 690 bp, Unknown
  Obtained from environmental sample
  misc_feature (1)..(690): n is a, c, g, or t
atgtactacatggcccttgccacccgccgcggcggaatccagccgtttgtcaatgcggttgacggttccggcacttttctggatcccgcttttatctatgccggtgaaaaaattcaggaatgggtcaagaagggctatttcatcacaggttttaacggtctggattgggatgcaggccaggcgcgcgcgcctatctacagaggggaagccgctatggtttttatgggaagctggtttaatatgcaggctcttaatgagaatcccgcgtaccatgcaaaaatgggaatcttcaaatttcccagagatgagcagggaaccggaaatcccgataccgcatttggtactattggggataacttctaccatgtgtcggcatcttcaaaaaaccagataaaagcgtttgaacttatcacctgtttgattgacgatgtcgcggtaaaagacgcaatagctgacgggcggatacctcctgtaaaaggggtaaagctgacagacccgattctgatagaactgtttgcgcaaattcaatcggctcctgatttacaactctggtacgatcaatcgctgtcctttgaagtctccgaggttcataaagttaccagccaggaaatattcggcggaactttaactccacgcgccgccgcgcagaaactccaggatgcgcaggcggcttatctaaaaaagagataa

SEQ ID NO: 31100 - protein, 229 aa, Unknown
  Obtained from environmental sample
  misc_feature (1)..(229): Xaa is any amino acid
MYYMALATRRGGIQPFVNAVDGSGTFLDPAFIYAGEKIQEWVKKGYFITGFNGLDWDAGQARAPIYRGEAAMVFMGSWFNMQALNENPAYHAKMGIFKFPRDEQGTGNPDTAFGTIGDNFYHVSASSKNQIKAFELITCLIDDVAVKDAIADGRIPPVKGVKLTDPILIELFAQIQSAPDLQLWYDQSLSFEVSEVHKVTSQEIFGGTLTPRAAAQKLQDAQAAYLKKR

SEQ ID NO: 31101 - DNA, 585 bp, Unknown
  Obtained from environmental sample
  misc_feature (1)..(585): n is a, c, g, or t
ttgctgttgctcttaagcgcttttgccgcctatccactttcacggatgcaattcaaactgaacagattcatattcggcgccattgtcgccgccatgtccataccgattcacattacccttattcccgtgttcataatgactattcgttttaatatgtatgacaaggcttacggtcttatcggccccaatgtggcttttaatctgcccatatccattttcatactaacctcgtttatgcagggtatttccaaagagatggaagaagccgccgagattgacggctgcggcaaattctcaacatttttccgggtaattttgcctctttcaaaatcggggcttgcgactctggctatttataacggcgtagtaatatggaacgaatttgtttttgccatggtgcttacccagtctcaggaagcccgcaccttgccgcttgcgatttgggaataccaggggcaatattcaataaacacgccgttgatcatggccctcttggttttgtccagcttgccggttattttattgtatgttttcagtcaggataaattggttaaaggaatgatggcaggggcgattaaggggtaa

SEQ ID NO: 31102 - protein, 194 aa, Unknown
  Obtained from environmental sample
  DOMAIN (3)...(189): Binding-protein-dependent transport system inner membrane component
  misc_feature (1)..(194): Xaa is any amino acid
MLLLLSAFAAYPLSRMQFKLNRFIFGAIVAAMSIPIHITLIPVFIMTIRFNMYDKAYGLIGPNVAFNLPISIFILTSFMQGISKEMEEAAEIDGCGKFSTFFRVILPLSKSGLATLAIYNGVVIWNEFVFAMVLTQSQEARTLPLAIWEYQGQYSINTPLIMALLVLSSLPVILLYVFSQDKLVKGMMAGAIKG

SEQ ID NO: 31103 - DNA, 402 bp, Unknown
  Obtained from environmental sample
  misc_feature (1)..(402): n is a, c, g, or t
atgcggacccagcgctttccccgatcttccggcaagcttctcgcccttgcgagcgaatacgcgatgggtgagcgcgttatctattcgtcatttaaccattattctctaaaggaaataaaaacgctcgatccttcagccaggatcgggctattgtatgaattgggcatggtagatccctgggtttacgctaattatgtgggcgcggacgcgatacacccgcattactttgtcatcgcggcgttgcctgaaacggtggcgctctgccatgaacacggcgtcaaggtaaatgtgtggacggtggatgagcctgacgccataaagttaatgctcaagtgcgctgtggacgggattattacaaataaaccggatattgcggccgcgtgccgtgacggttcaaaataa

SEQ ID NO: 31104 - protein, 133 aa, Unknown
  Obtained from environmental sample
  misc_feature (1)..(133): Xaa is any amino acid
MRTQRFPRSSGKLLALASEYAMGERVIYSSFNHYSLKEIKTLDPSARIGLLYELGMVDPWVYANYVGADAIHPHYFVIAALPETVALCHEHGVKVNVWTVDEPDAIKLMLKCAVDGIITNKPDIAAACRDGSK

SEQ ID NO: 31105 - DNA, 1251 bp, Unknown
  Obtained from environmental sample
  misc_feature (1)..(1251): n is a, c, g, or t
atgcaggaaaacaaactggacgtaaaaaagacgcttcttttatctttcggatttttcgcctcgtcaatcgcgtggagcgtttacaattcctttgtgccgcagatccttgaagggtttattaaaagtaccacgcttattggctttattatgactattgacaatatctttggcgttatttttcagccgctgttcggaacacttagtgataaaacccgcacgcgttttggccgccggctaccatatatcattgtcggcctgcctgtctgcgccgtggctttcacgttgattcctcacatgagcagccttgggtccctgatggcggttataattcttttcacttttgttatgtcggcgtggcgcacgcctgtggtggcgctcatgcctgatattacgcccggcccgctgcgcagtcaggccaatggtattgtcaacctcctgggcggagtcggcactttaatcgctttcctggtgggcggcatcctctttagggtgggcggcttcccgctcccgtttttaatgagcgcgatcatgatgatgcttgcgcttgcggtactggtgctttttgtgcgtgagcctaaacaagcttatataaacaatgagccggaagaagaaagcaaaaaagccgaaataaagaaactaagtaaagacgagaaaaaaagcctggttttgattctcctgggcgtgttcttctggttcaccggctacaatgccgttgagaccttttttaccctgtacgccactaacactctgggtatggatcccggcggcgcctcgatgacgctttcaattttttctcttacttttttggttttcgcggttccggctggctatatggccgtaaaaaccggacggcgtaaggcgatcttaataggcctggctgggcttatcattctgtttattccgctgatcttttttgccaatgcatgggttgcgcgcgcctgcctttttttgggagggtttttctgggcgatggtcaacatcaactcgcttccgatggtagtacagctttccggcgaagagaaggttggcgcttttgtgggatactactacttcttttccttcagctcccagatcgtttccccgattttattcggctttatccgcgatatggttggccattacaaggtactgttcctgtacgcatgtatagcctatgtgctggctgtgttttgccttttatttgtgcgtcacggcgaggacaagccggttcaggtaagcgcatcgcaggttcttgaagggcttgatgattaa

SEQ ID NO: 31106 - protein, 416 aa, Unknown
  Obtained from environmental sample
  SIGNAL (1)...(26)
  DOMAIN (44)...(401): PUCC protein
  misc_feature (1)..(416): Xaa is any amino acid
MQENKLDVKKTLLLSFGFFASSIAWSVYNSFVPQILEGFIKSTTLIGFIMTIDNIFGVIFQPLFGTLSDKTRTRFGRRLPYIIVGLPVCAVAFTLIPHMSSLGSLMAVIILFTFVMSAWRTPVVALMPDITPGPLRSQANGIVNLLGGVGTLIAFLVGGILFRVGGFPLPFLMSAIMMMLALAVLVLFVREPKQAYINNEPEEESKKAEIKKLSKDEKKSLVLILLGVFFWFTGYNAVETFFTLYATNTLGMDPGGASMTLSIFSLTFLVFAVPAGYMAVKTGRRKAILIGLAGLIILFIPLIFFANAWVARACLFLGGFFWAMVNINSLPMVVQLSGEEKVGAFVGYYYFFSFSSQIVSPILFGFIRDMVGHYKVLFLYACIAYVLAVFCLLFVRHGEDKPVQVSASQVLEGLDD

SEQ ID NO: 31107 - DNA, 1152 bp, Unknown
  Obtained from environmental sample
  misc_feature (1)..(1152): n is a, c, g, or t
ttgttggaagacgcaagaggcgggtacggcaaattgggcttcacccgggtacccgaagagggcaggctggacaataccgtcaatgggaactgcctttcctacgcggtcagggacagcgttccggtttatcttgaagacctcggcggcagttaccccgaagtaaaccgcgttttatccgaatcgggcgaggatggagtcgccgattatataggcgaactgtttgaaaaatatgtcgaagaacacaaaacggagcttcgtgtgtcaaaattacgcagtatagacgacttcaactcttccataaaccccgcaaaagaataccgtatcgtgatgcgcctgagctgttacgcgggagaagatcagcctttaagcgataccgcgcgcaattttgactttcatttttggtcgcagcttgacgacggcagatggtcgcaaaaattcgggtggagttactcggaaataattcccgccacaagttccggcgtttccccggagaaatactattgggaaatggccaagtacggttatttatacagaagcaagccgctctattacgccgtaacaaaagataccgatgaaattactattcacaggccaagcccgtttgccgacgtggagctttatgactatttgaacagcggcgtggaatacgttttcaaaaacggctttatgaccggcacaagcgagacacccgcgctgttcagtccggatacggcgatgacgcgcggcatggcggctgatgtgttttaccgcattgcgggcagaccggacgcgggcaagtttgccaacccgtttgacgacgtggacgcgggttatcattattacaacgcggtaaaatgggcggcggcaaacggcgtcatagttgattacagcggcagcggcaatttttcgcctgaccgcaaaattacgcgcgaggaagcggcagttgcgttctataattatcaacgtttgtcggggaatattcccccggacattctcctgaatatagatcccgaagacgcggacgagataagcaaatgggcaaaggaagcggcgaaaaaacttatgaggcaaatgatattccgttgtccgggcggcttgtttgttccgaggggcgaattaactcgtattgaattttcgggtttgttacgcgattactgcgaatactccaagtaa

SEQ ID NO: 31108 - protein, 383 aa, Unknown
  Obtained from environmental sample
  DOMAIN (264)...(307): S-layer homology domain
  misc_feature (1)..(383): Xaa is any amino acid
MLEDARGGYGKLGFTRVPEEGRLDNTVNGNCLSYAVRDSVPVYLEDLGGSYPEVNRVLSESGEDGVADYIGELFEKYVEEHKTELRVSKLRSIDDFNSSINPAKEYRIVMRLSCYAGEDQPLSDTARNFDFHFWSQLDDGRWSQKFGWSYSEIIPATSSGVSPEKYYWEMAKYGYLYRSKPLYYAVTKDTDEITIHRPSPFADVELYDYLNSGVEYVFKNGFMTGTSETPALFSPDTAMTRGMAADVFYRIAGRPDAGKFANPFDDVDAGYHYYNAVKWAAANGVIVDYSGSGNFSPDRKITREEAAVAFYNYQRLSGNIPPDILLNIDPEDADEISKWAKEAAKKLMRQMIFRCPGGLFVPRGELTRIEFSGLLRDYCEYSK

SEQ ID NO: 31109 - DNA, 1005 bp, Unknown
  Obtained from environmental sample
  misc_feature (1)..(1005): n is a, c, g, or t
atgatacgggaggttttcgtgccgggtaaatcggcggaggaaaaagtacggataaaccggattctaatgatcgatgacgcaatccgttccggtttttacccttccattgcaaaactggcaaagaaggccgaagtcaacaaacgtaccattgaacgcgacattgagtaccttcgggatatgtatgaagcccccatagaatatgaccgccagaagcgcggctattattactccgaaccgaatttcttcatcaagagcgttatcctgaccgaaggggaactgttctcgctcgctttgtttgaccacctattggagcagtaccgcaacacgccgcttgaagccgcccttaaacggattttcgagaagattgtccgttccctgcctgaaaatgttacggtaaaccccggcgtatttagttcccatgtcagtattatttccgatcatcaggggcagattgaccccaaggtgtttgaaggcatttttaccgcccttaaaacaaagcgaaccttaaattttgagtaccggcctttacaaaagaccacctatatgacccgtacggttgatccttatcacgcgatatgccaaagggctaattggtacttcataggctattgccatgacaagaaagaacctcggatgttttctttttcacgggttaaaaatctggcgctgacaaaaaagcatttcaatataccgcaggatttcaaggctgatgagcattttgacaaagcgatgggtgtatttgcctcagccaaaaccccgtacacggtggaattgttaatagacaatgagatcggcacattcgcccttgaacggcaatggcacgacacccagacagtagatcaaagaaaagacggatcggtgtatgtcaagtttaccacgacccagatgccggaagtcctgcgctgggtactcgggcagggacatacggtgaaggcgcttgggccgcttgaacttgttaacatggtgaaggatgaggcggagaaggtaagggggatgtatgggtaa

SEQ ID NO: 31110 - protein, 334 aa, Unknown
  Obtained from environmental sample
  DOMAIN (17)...(76): HTH domain
  misc_feature (1)..(334): Xaa is any amino acid
MIREVFVPGKSAEEKVRINRILMIDDAIRSGFYPSIAKLAKKAEVNKRTIERDIEYLRDMYEAPIEYDRQKRGYYYSEPNFFIKSVILTEGELFSLALFDHLLEQYRNTPLEAALKRIFEKIVRSLPENVTVNPGVFSSHVSIISDHQGQIDPKVFEGIFTALKTKRTLNFEYRPLQKTTYMTRTVDPYHAICQRANWYFIGYCHDKKEPRMFSFSRVKNLALTKKHFNIPQDFKADEHFDKAMGVFASAKTPYTVELLIDNEIGTFALERQWHDTQTVDQRKDGSVYVKFTTTQMPEVLRWVLGQGHTVKALGPLELVNMVKDEAEKVRGMYG

SEQ ID NO: 31111 - DNA, 336 bp, Unknown
  Obtained from environmental sample
  misc_feature (1)..(336): n is a, c, g, or t
gtgtaccataaaataggcgatgtagataaagcaatgacggatttaaccagggcgatacggctaaacgccaattacgcggacgcctataacaggcggggtatgttgtattttgaaaaaggcgaactggacaaggcaatcgctgagtataatcaggcgatacggcttaaacccaaagacccggataattataaactgcggggcatggcatacttccaaaaaaaggacattgaccgcacaatcgcggactttgaagcggccttgcggcttgctcccaatgacaacgaggtgaaaaatattttggatatggcgagacagctgaaacaaatgaaaaaataa

SEQ ID NO: 31112 - protein, 111 aa, Unknown
  Obtained from environmental sample
  DOMAIN (60)...(93): Tetratricopeptide repeat
  misc_feature (1)..(111): Xaa is any amino acid
MYHKIGDVDKAMTDLTRAIRLNANYADAYNRRGMLYFEKGELDKAIAEYNQAIRLKPKDPDNYKLRGMAYFQKKDIDRTIADFEAALRLAPNDNEVKNILDMARQLKQMKK

SEQ ID NO: 31113 - DNA, 471 bp, Unknown
  Obtained from environmental sample
  misc_feature (1)..(471): n is a, c, g, or t
gtgcgtttctgcggaaaagccgctttcatcattgaaagtaaactcgtttacagtaaactcgtctgcctcaaacgggggcaaaagcgcaacccggtttcaacttcatttcaaaggggcctgtcgcgcccacgagaggaactttataatcgcataaaccagcgctgcgcagatatgttccggcagggtcttgccgaggaggtgcgctctttgtacgaagcggggtacacgccgaatgatcccggcttgcgcgcaatcggttacagggaattttttgtcgagagcgaagaagggccggggaagtggcggctttcgcgggacattgacggggtacaggcgcttgtcgcgcaaaacagccgccgttatgcgaaaagacagataactttttttgctggaattcccaaggttaagtggatagagtgcggcggcagcgaagcggagaccgcagagcttattaaacgggaacttgaataa

SEQ ID NO: 31114 - protein, 156 aa, Unknown
  Obtained from environmental sample
  DOMAIN (1)...(141): IPP transferase
  misc_feature (1)..(156): Xaa is any amino acid
MRFCGKAAFIIESKLVYSKLVCLKRGQKRNPVSTSFQRGLSRPREELYNRINQRCADMFRQGLAEEVRSLYEAGYTPNDPGLRAIGYREFFVESEEGPGKWRLSRDIDGVQALVAQNSRRYAKRQITFFAGIPKVKWIECGGSEAETAELIKRELE

SEQ ID NO: 31115 - DNA, 1038 bp, Unknown
  Obtained from environmental sample
  misc_feature (1)..(1038): n is a, c, g, or t
ttggacaaggagcgtaactccatgatagaagtacggaatcttacgaaaaactacgggcaggtaaaggcggtgcaggatgtttccttttccgtggggcaagggcaggtgcttggctttcttgggcctaacggggcggggaaaaccaccatcatgaagatactgaccgggttccatttccccacaagcgggagcgccctggtagacggtatcaggatcgatgaagacccggtcgaggttaagaaacgcataggctatctgccggaaagcattccgctttatgaagaccttaccgttgacgaataccttgactttatagccgaggcgaggctgatcccctctcctgagcgaaaaaaggccgtggacgcctgccttgaagcctgcggattgcaacagtaccgcagccggaaaatcgaaacactttccaaaggataccgccagcgtacaggcctggctcaggcaattctccacgatccgccaatccttatccttgacgagccgaccaacgggcttgacccaaaccagatcatcgaaatccgttcccttataatggagcttggaaaaagaaagaccgtcctgctttcatcccatatactgcaggaaattgaggctatctgcccgcaggtgctgatcatcaacgaagggaaaatagcagcccagggaactaccgaggaaatagcaggctccatgaagggcggcgatacctgggagcttctgatcacgcggagcacggcatttgacgtcatggcaggcaccgcctttgccgaaaagctccaaagccttgggggggggattagttcggtcacggtcgagctaatggacaacggcgtcgcgaaaatcggcttctttatgcccatgaaaaacgccgccgacacaagcgcgtatatccccacaggcgagatgatctttgactgggccgtctcgggcgggcttaagataatcggcatgaaccgcaagaagatcagccttgaggatattttcgtaagcctcacttcggatgaacatagctctgctgatgagcanaacaaggaggcccaatga

SEQ ID NO: 31116 - protein, 345 aa, Unknown
  Obtained from environmental sample
  DOMAIN (34)...(214): ABC transporter
  misc_feature (1)..(345): Xaa is any amino acid
MDKERNSMIEVRNLTKNYGQVKAVQDVSFSVGQGQVLGFLGPNGAGKTTIMKILTGFHFPTSGSALVDGIRIDEDPVEVKKRIGYLPESIPLYEDLTVDEYLDFIAEARLIPSPERKKAVDACLEACGLQQYRSRKIETLSKGYRQRTGLAQAILHDPPILILDEPTNGLDPNQIIEIRSLIMELGKRKTVLLSSHILQEIEAICPQVLIINEGKIAAQGTTEEIAGSMKGGDTWELLITRSTAFDVMAGTAFAEKLQSLGGGISSVTVELMDNGVAKIGFFMPMKNAADTSAYIPTGEMIFDWAVSGGLKIIGMNRKKISLEDIFVSLTSDEHSSADEXNKEAQ

SEQ ID NO: 31117 - DNA, 591 bp, Unknown
  Obtained from environmental sample
  misc_feature (1)..(591): n is a, c, g, or t
ttggccgagatgaaatatatgatagaaattccgggagttgatacgaaaaaaggacttgatttgtacgcaggtgagacggatatatatctgcccctgctgcgttcctatgccgccaacacgccggcggctttaaacaaactgaaatccgtttcggcgcagaatttgtccgactatgttataaccgtgcacgggttaaaaggcaccagcgccggaataggcgcggaagaaatacgcgcggcggctctggaactggaaaacaagtcaagggcaggcgacttgcagagcgttttggagaaaaacagcaaactaattgccgatacagaaataatcgtagcgaatataaacgcgtggctgcgggaatatgactccaaaaacaaaaaaccgcggctgaaagcccccgataaggatcttctggccaggttgaaggaatgctgcgataattacgatatgagcggcatagacgaggccattgcggaactggaaaaaaacgaatacgaggaaaacgccgatttagtgatatggttgaagggaaaaatcgacatatcggaaatagacgaagctgcggcgcgtcttgcggaggtattggtttga

SEQ ID NO: 31118 - protein, 196 aa, Unknown
  Obtained from environmental sample
  DOMAIN (31)...(117): Hpt domain
  misc_feature (1)..(196): Xaa is any amino acid
MAEMKYMIEIPGVDTKKGLDLYAGETDIYLPLLRSYAANTPAALNKLKSVSAQNLSDYVITVHGLKGTSAGIGAEEIRAAALELENKSRAGDLQSVLEKNSKLIADTEIIVANINAWLREYDSKNKKPRLKAPDKDLLARLKECCDNYDMSGIDEAIAELEKNEYEENADLVIWLKGKIDISEIDEAAARLAEVLV

SEQ ID NO: 31119 - DNA, 564 bp, Unknown
  Obtained from environmental sample
  misc_feature (1)..(564): n is a, c, g, or t
ttgccggaacagcgtcttttttcccctggcacaggagaatacgcaagcgcggagcttataagcaaaatatgcgggagagaatctttctcaaaggctaacatcagctattcaggaaacaggggcgcgatgggttttaacaacgccagcctaagcagtcaggatcaggagcgtaaccttatcaacgccgacgaaataatgaaattgccgcttgataattttattcttctttgccagggcctgcccccttacatcggaaagaaaaatgtatattacgaggatcctgttttcatggcgagatgccacaacccaaaaacaggtgctaaccctcctgcgtttacttccagggaagaagcggtcaagcaggcgatggcaacaataaaaaagattcaaaagcgaaaatggtacggctacaaaagcaaacccgaaacaagggatttagaaatgggcgaagacgaaattttaaacatgtacgacaaactcgggtaccttcttgatgaagatgacgaagaagcggaaaagcaggaagcccccgccttctccggtagcgaagaaaactttttataa

SEQ ID NO: 31120 - protein, 187 aa, Unknown
  Obtained from environmental sample
  misc_feature (1)..(187): Xaa is any amino acid
MPEQRLFSPGTGEYASAELISKICGRESFSKANISYSGNRGAMGFNNASLSSQDQERNLINADEIMKLPLDNFILLCQGLPPYIGKKNVYYEDPVFMARCHNPKTGANPPAFTSREEAVKQAMATIKKIQKRKWYGYKSKPETRDLEMGEDEILNMYDKLGYLLDEDDEEAEKQEAPAFSGSEENFL

SEQ ID NO: 31121 - DNA, 555 bp, Unknown
  Obtained from environmental sample
  misc_feature (1)..(555): n is a, c, g, or t
gtgcagaacaacgcggcaacaaacatttacaccctccaggtaaagacaaaaggcgaggagaaattcatccgccacgccagggccttgcacccggatttcgcacaaggtcttacttttccccaacgctgtttggatatccgcaagggtgggaaggtaaagccttccaaattggcggtctttccaggatacgtttttttggaacttggcgctgacgatgatgtgaaaaaatgcttttgggcttttcgtaaaattgaaggcttttaccgttttttaagatcaaacagggacattgcccctcttcagaacaaggatttggaactggttttacattttatcaaaaaggtagggcctgtagcggagaaatcaaaagtttatttcaacgaggaatctaaaatcgtggttttatacggtcctcttgccgggcttgaaggcaggatcgttaaagtcgacagaaggaaaaagagggccaaaatatccctcgacctttacgacaattcattttttgtagaccttgcttttgaagtaatcgaaaaagcgaatgaaaggagcgcatga

SEQ ID NO: 31122 - protein, 184 aa, Unknown
  Obtained from environmental sample
  DOMAIN (7)...(103): Transcription termination factor nusG
  misc_feature (1)..(184): Xaa is any amino acid
MQNNAATNIYTLQVKTKGEEKFIRHARALHPDFAQGLTFPQRCLDIRKGGKVKPSKLAVFPGYVFLELGADDDVKKCFWAFRKIEGFYRFLRSNRDIAPLQNKDLELVLHFIKKVGPVAEKSKVYFNEESKIVVLYGPLAGLEGRIVKVDRRKKRAKISLDLYDNSFFVDLAFEVIEKANERSA

SEQ ID NO: 31123 - DNA, 675 bp, Unknown
  Obtained from environmental sample
  misc_feature (1)..(675): n is a, c, g, or t
atgcggataatgataattgaagatgaagacgccctgcgggaagttctcgagttcagcctcggccgggccggcttcgccgtcgattcccacggcaacgccaacgacgccctgatcgccgtcgaggactgcccgcccgacctcattctcttggacctcatgctgcccgggcttcaggggctgcagttcctggacattctgcgccggaaggatccggccctgccggtcatcgtcatttccgcccgcaacgccgaaacggacataatcaaggccctggaacagggcgccgatgattatgtgcccaagcctttcagcgtcaagctggtcgaagccaaaatcagggccatgggccggcggggcggaaacggggaagaccggggccagaccctcaagggcggcgggataaccatagacctgaacacccacaaggcctggaacggcgacgcgccgctccacctgacccagaaggaattcgagctcctctcccttttcctgaaaaagccggagcgcatcttcacccgcaaccaactcttaaacctggtctggggctacgattcagacctggtcacccggactgtcgacgcccatgtggccgtcctcaggaaaaaactgggcgacaagggccgcttcatcaagaccatgcccaaagtgggctatctttgggacgaagccacttga

SEQ ID NO: 31124 - protein, 224 aa, Unknown
  Obtained from environmental sample
  DOMAIN (147)...(220): Transcriptional regulatory protein, C terminal
  misc_feature (1)..(224): Xaa is any amino acid
MRIMIIEDEDALREVLEFSLGRAGFAVDSHGNANDALIAVEDCPPDLILLDLMLPGLQGLQFLDILRRKDPALPVIVISARNAETDIIKALEQGADDYVPKPFSVKLVEAKIRAMGRRGGNGEDRGQTLKGGGITIDLNTHKAWNGDAPLHLTQKEFELLSLFLKKPERIFTRNQLLNLVWGYDSDLVTRTVDAHVAVLRKKLGDKGRFIKTMPKVGYLWDEAT

SEQ ID NO: 31125 - DNA, 363 bp, Unknown
  Obtained from environmental sample
  misc_feature (1)..(363): n is a, c, g, or t
atggcgaggcgcccgatcctgccccttctgcccggcttcgccggcatgaccgaattgaccgggaccatgctgaccgaggccgtcgaggcttttttcaaaaccgacgcccgcaagtacgccgaactggtgaaaaaggaccgggaggtgggcggattccaacaggccctcaaccggcggctggtggagatcatttcccgcgaggtcaacaacatcgacggggccgtggcccttttgaacgtcgtcaggcgcctggaaagagtggccgaccacgccaaaagcatagcccggatgatcccctacatcgccgaaggcgccgtgatgcggcccaaagggaaatcgccagatgcggataatgataattga

SEQ ID NO: 31126 - protein, 120 aa, Unknown
  Obtained from environmental sample
  DOMAIN (13)...(98): PhoU family
  misc_feature (1)..(120): Xaa is any amino acid
MARRPILPLLPGFAGMTELTGTMLTEAVEAFFKTDARKYAELVKKDREVGGFQQALNRRLVEIISREVNNIDGAVALLNVVRRLERVADHAKSIARMIPYIAEGAVMRPKGKSPDADNDN

SEQ ID NO: 31127 - DNA, 858 bp, Unknown
  Obtained from environmental sample
  misc_feature (1)..(858): n is a, c, g, or t
ttggaacgggttgcccaatatgaaaacgaagcaattaagaatctttgtttgatgcaggagaaagccattgaacagaataagtgggaagaagccatatcacttggcagatcaatttcgagtatcggaataaagaccgccaatacagggatggaaagcgcctttcttcttgcggatgcaaagaaaaaattatcggaaaacaatactcttggcgcatttttgtcggctgtaaaatctcatgagctacggccattggatttgggaagcgctatgttgtttcttgaaaaagccgtagaaataaaacagcgccgtacggcgtctttcttcctttcggctgccgaaagcgcaggcggcaggaatattcccgcaaagttaagggaatacgcattaggacgagataatcctgccgaaatgattaagggagttgctactgtactggtagacaggggagttaggattgaaaggggaatgggtataccggacagggtattgggttcagctttttttgttgatgcttccggctttttaattacaaactaccatgttattgcaagcgaagttgatcccaaatacaaaggatattccagaatgtatatccgtatgggagattctacaagttcgcgtattcccgcgcgcgttatcggctgggacaaggccatggatctggcattgatcaaaactgaaatagaatgcgaatatgttttttccgttgtggatcgcgtaattccccgagtaggagatactgtgcttgcaatgggatcgcctgtgggacttgaaaaaaccgtaacgtccggaattgtttccgcgcttggcagacgtttattgcagattggagatgttattcaaattgacgccgcgtaa

SEQ ID NO: 31128 - protein, 285 aa, Unknown
  Obtained from environmental sample
  misc_feature (1)..(285): Xaa is any amino acid
MERVAQYENEAIKNLCLMQEKAIEQNKWEEAISLGRSISSIGIKTANTGMESAFLLADAKKKLSENNTLGAFLSAVKSHELRPLDLGSAMLFLEKAVEIKQRRTASFFLSAAESAGGRNIPAKLREYALGRDNPAEMIKGVATVLVDRGVRIERGMGIPDRVLGSAFFVDASGFLITNYHVIASEVDPKYKGYSRMYIRMGDSTSSRIPARVIGWDKAMDLALIKTEIECEYVFSVVDRVIPRVGDTVLAMGSPVGLEKTVTSGIVSALGRRLLQIGDVIQIDAA

SEQ ID NO: 31129 - DNA, 471 bp, Unknown
  Obtained from environmental sample
  misc_feature (1)..(471): n is a, c, g, or t
gtgtacctgcccaattactacaatgacgtatcacttcaggcaaaacagcttcgggatcagagggtaacctgcgctcttgtcggcggcgatggctgggacagtctcactgacaatgcgggagacgagattcttaatggtttctggtcttcgggatttgcttccgatacaacagaccccaaaggcgttgcttttgtcagagctttccagaccagatttaaccggcctgcttcacagtttgccgcgcttggttacgatacaatgatgcttgttatcgacggtattaaagctgccggatcttttgatccaagtgttgttaaaaacgcaatggcaaagctcagcggtacttatgttaccggaaatattcgttttgactctgatcgcaacccgatcaaaggcgccgcaattcttgaaattgtcaagcggagcggtaggcttgtaaacgtatacaaaacaacggttaatccaaactaa

SEQ ID NO: 31130 - protein, 156 aa, Unknown
  Obtained from environmental sample
  misc_feature (1)..(156): Xaa is any amino acid
MYLPNYYNDVSLQAKQLRDQRVTCALVGGDGWDSLTDNAGDEILNGFWSSGFASDTTDPKGVAFVRAFQTRFNRPASQFAALGYDTMMLVIDGIKAAGSFDPSVVKNAMAKLSGTYVTGNIRFDSDRNPIKGAAILEIVKRSGRLVNVYKTTVNPN

SEQ ID NO: 31131 - DNA, 660 bp, Unknown
  Obtained from environmental sample
  misc_feature (1)..(660): n is a, c, g, or t
gtgttaaaactaaccggggattaccttgcaattgttaccctgggtttcggagaaataatccgtgtggtatttatcaaccttaaaaccctgacaggcgggcccaacggaagatcgtttacaacaagcctggtgatgaacagcgaattggcctttgtattcacaacggcaacgctggttattattctagcgctgctgcagaattttctccgttctacctatggccgcgcgataaaagcgtgcagagaagatgagattgcagctaacgcaaacgggattaatattttccgctacaaaatgattggttttgttattgccgcctttattgccggcataggcggttgtgtctatgcgatggttgtcggctttgtaaaaccggacatggcgcaattccttaaatccattgatttccttatttatgtcgtacttggcggcatgggctcaatgacaggttcgatcctttcggcttatgtccttacctatttgcaggaatttttacgtttcctgcaagactaccgcctcctgatataccctgtaatactgatactagtaatgatgttccgcccaaaaggccttctgggaatgaaagaattttccattattggttttgttgataaaattcacggtaaatttctccgtcagacaaagaaggcggaagcatga

SEQ ID NO: 31132 - protein, 219 aa, Unknown
  Obtained from environmental sample
  DOMAIN (2)...(184): Branched-chain amino acid transport system / permease component
  misc_feature (1)..(219): Xaa is any amino acid
MLKLTGDYLAIVTLGFGEIIRVVFINLKTLTGGPNGRSFTTSLVMNSELAFVFTTATLVIILALLQNFLRSTYGRAIKACREDEIAANANGINIFRYKMIGFVIAAFIAGIGGCVYAMVVGFVKPDMAQFLKSIDFLIYVVLGGMGSMTGSILSAYVLTYLQEFLRFLQDYRLLIYPVILILVMMFRPKGLLGMKEFSIIGFVDKIHGKFLRQTKKAEA

SEQ ID NO: 31133 - DNA, 1164 bp, Unknown
  Obtained from environmental sample
  misc_feature (1)..(1164): n is a, c, g, or t
atggagttaaatttgaaggaaagacaaaaactaaccgcgataacggctaagaaataccgtattgcgaggaagagggaaaagaccaaaatactggacactttcattgaacaaaccggatatgaccgtaaatacgcgatacatatcctcgccaatgaaggccggatcaaagcggcgggaaaacgagttcgaataaaaacaacacataaaaaaacaaagcggcgcacatatcccgttatttatgacaaagcggtacaaaacgcgctggcgctcatctgggaggcttttaaccgccagtgcgggaaattgcttgagcctttcctgcgcgcgaacatcgaccgcattgtacaagaacccaggttcgatcctggcgctgaggtaacggccaagttacggaagattagcgcctcaacaatcgaccgtcttctgaaaccaaacaaggccaaattgaaaatcaagggcacaagcggcaccaagcccgcggccacgcacattaaaaaattgatacccacgctcagccatttcgaatgtgtcgaacaaggggacggtttgtggcaaatagaccttgtccagcatgacggcggcaatccgtcaggggaattttgctatactttgaccgttaccgaggttaaaaacgcatggacggtccattacgcgctgaaaaataaggctttcgcatgggtctaccatgctctcaacgacgcctgtttacagcttccacttccggtacgcgttctgcattcggataacggcagcgagtttattaacaacgccctcatgacatggtgcgaacaacaagaaataacccttaccagaagccgcggcagcaggaaaaatgacaattgtttcgttgagcaaaagaacggcgccaccgtcagaaaacacgtcggctacctgcgttattccggcgacaggggtgttgccgcgctgcaggatgtgtacacccattacgaccggctgttcaatttcttttatgccgcccgtaaactggtttccaaagaaagggcgggaagcaaggtcagaagaacttacgacaagccgcagactccttttgaacgggccatgttgtctgccgacacttcagaggaaataaaaagacatctcaagtctttgaagaaacnggttaaatctcatgaccgagatgaaaaaaatgcagctggctcttga

SEQ ID NO: 31134 - protein, 387 aa, Unknown
  Obtained from environmental sample
  DOMAIN (176)...(354): Integrase core domain
  misc_feature (1)..(387): Xaa is any amino acid
MELNLKERQKLTAITAKKYRIARKREKTKILDTFIEQTGYDRKYAIHILANEGRIKAAGKRVRIKTTHKKTKRRTYPVIYDKAVQNALALIWEAFNRQCGKLLEPFLRANIDRIVQEPRFDPGAEVTAKLRKISASTIDRLLKPNKAKLKIKGTSGTKPAATHIKKLIPTLSHFECVEQGDGLWQIDLVQHDGGNPSGEFCYTLTVTEVKNAWTVHYALKNKAFAWVYHALNDACLQLPLPVRVLHSDNGSEFINNALMTWCEQQEITLTRSRGSRKNDNCFVEQKNGATVRKHVGYLRYSGDRGVAALQDVYTHYDRLFNFFYAARKLVSKERAGSKVRRTYDKPQTPFERAMLSADTSEEIKRHLKSLKKXVKSHDRDEKNAAGS

SEQ ID NO: 31135 - DNA, 828 bp, Unknown
  Obtained from environmental sample
  misc_feature (1)..(828): n is a, c, g, or t
atgccctacagaccgttagtcgccatggaagtttttgacagcgtaagcgaaaagtaccccgatatattgcgcaaggcttacggagatgttttaaataaccctgtgcaaatggcgaaactctgcgtagaaaagtacggcgcggagctaatcagcgttaaccttgacggcactcatcccgagcgtgaaaacagaagcggcaagcagagcgtcgaacttgtaaaatcaattcttgaagctgtcgaagtgccgctgattatcacaggcacgagccatcatgagaaaaacaacgaagtaatgaaagcaatcgcccaaagctgtgagggagagaatcttctttttaactgggtagagcaggataattataggactatcgccggagctgcaatggcttatggtcacactcttgtagcgcaagccccaattgatgtcaatatcagcaaacagttaaatattctgttaaccaacatgggcatggctcccgaaaaaataatcatagacccaatgacaagtacggttggttacggtatcgaatatacttattccgtaatggagcgtattcgcctaacggggcttggcggggacaatatgctcttaagcccgatgattgtctctgtcggtatggagtgcgccaaagtaaaagaatttaaagcgccacaatcaagcttccctgactggggcgatcttgcaaagcggacagcttattgggaaattgccactgcgacaactctgttgtacgccggagccgacatattgattctttatactcctgaagctgtaacgacaataaagaagaccattaacagtttgatggacggggagggcaaataa

SEQ ID NO: 31136 - protein, 275 aa, Unknown
  Obtained from environmental sample
  DOMAIN (2)...(273): CO dehydrogenase/acetyl-CoA synthase delta subunit
  misc_feature (1)..(275): Xaa is any amino acid
MPYRPLVAMEVFDSVSEKYPDILRKAYGDVLNNPVQMAKLCVEKYGAELISVNLDGTHPERENRSGKQSVELVKSILEAVEVPLIITGTSHHEKNNEVMKAIAQSCEGENLLFNWVEQDNYRTIAGAAMAYGHTLVAQAPIDVNISKQLNILLTNMGMAPEKIIIDPMTSTVGYGIEYTYSVMERIRLTGLGGDNMLLSPMIVSVGMECAKVKEFKAPQSSFPDWGDLAKRTAYWEIATATTLLYAGADILILYTPEAVTTIKKTINSLMDGEGK

SEQ ID NO: 31137 - DNA, 951 bp, Unknown
  Obtained from environmental sample
  misc_feature (1)..(951): n is a, c, g, or t
gtgggcgtgacgagtcgtttcacgaacagtcacaaggcgattgattcattctgcgcctactccatcatggacaggcccatgacgagctgcggctgcttcgaggctatttgcgcctacgtgcctgagtgcaacggcgtaatgatcgtcaaccgcgaatatctgggtgaaactcccataggaatgaccttctccactttggccggttccgttggcggcggcaatcagacccctggctttttcggctgcgggaaggtgtttttgtccagccggaagttcctttcggcggaaggcggtttcgccaggatcgtgtggatgcccaaagagctaaaggatctgctgcacgacgatttattgaagcgctttgacgaaaagggcttaacgggctttattgaccaaatcgccgatgagaccatcgccgttaccggtgagggagtccgggcgttcatggagaaggtcaaacatccggcgctaaaaatggaagatatggcccgcttcgcccagagcgcagagagtgacgcaacggcggcaaagactgttcccgcgaaaacggacgcaaaagcggaggccgcgcctgcaaagggtacggctgaggaaggtacaccgataaccggcgtggatatcgctgccataaccgagcaggtaaaatccgccgtagccaaagaaatcgttagcagcataattgatctattgagcgagcgcttcctcgggcaaaccgtcgcaaaacccgaagctcctaaaccggaggctaaacctgtaatatccgcttccacgcggatctccgaaatcaaaaacttcgcaattccggcagagagctcaagcgccgccacatacgcggtaaaactgggcagttcaaaaactgaaggcggcactcgcggcaaaacccgcattgtaggcggcgcgaactgcatgcccttccactctgggagggccggatgccctacagaccgttag

SEQ ID NO: 31138 - protein, 316 aa, Unknown
  Obtained from environmental sample
  DOMAIN (1)...(163): CO dehydrogenase/acetyl-CoA synthase complex beta subunit
  misc_feature (1)..(316): Xaa is any amino acid
MGVTSRFTNSHKAIDSFCAYSIMDRPMTSCGCFEAICAYVPECNGVMIVNREYLGETPIGMTFSTLAGSVGGGNQTPGFFGCGKVFLSSRKFLSAEGGFARIVWMPKELKDLLHDDLLKRFDEKGLTGFIDQIADETIAVTGEGVRAFMEKVKHPALKMEDMARFAQSAESDATAAKTVPAKTDAKAEAAPAKGTAEEGTPITGVDIAAITEQVKSAVAKEIVSSIIDLLSERFLGQTVAKPEAPKPEAKPVISASTRISEIKNFAIPAESSSAATYAVKLGSSKTEGGTRGKTRIVGGANCMPFHSGRAGCPTDR

SEQ ID NO: 31139 - DNA, 303 bp, Unknown
  Obtained from environmental sample
  misc_feature (1)..(303): n is a, c, g, or t
atgatgatcgaaggcaagggaatcgaagttgaagaccttggcgtagattgcgatacccagttggtggtagacaaggtaaaagagggcaaggcaaaagttctctgcctttccgcgcttcttacgacaacgatgggcgtccaaaaagatgtaattgacgcgctgaaagacgcgggcgtaagagacaaggtaaaagtgatggtaggcggcgctcccgttacgcagagttttgccgatgaaatcggcgcggacgcttacacgccggatgccgcaagcgcggcggaagtttgcagaacattttattaa

SEQ ID NO: 31140 - protein, 100 aa, Unknown
  Obtained from environmental sample
  DOMAIN (1)...(98): B12 binding domain
  misc_feature (1)..(100): Xaa is any amino acid
MMIEGKGIEVEDLGVDCDTQLVVDKVKEGKAKVLCLSALLTTTMGVQKDVIDALKDAGVRDKVKVMVGGAPVTQSFADEIGADAYTPDAASAAEVCRTFY

SEQ ID NO: 31141 - DNA, 837 bp, Unknown
  Obtained from environmental sample
  misc_feature (1)..(837): n is a, c, g, or t
atgatcagatcggccgagagagatctttttaccgccattaacaatcaagttaaaaatatactgatgtctttcatgcaaaaattaaatctttcccgcattgagaaatgtgccgttagcggaaataccaccatgcttcatcttttttgccgtgtcgatccgtccgcgatgggaaccgcgccgtatactccggtgtttttggaagagcggcaatttagcggaaaggaactttcacttcctgcggaaaatattaccctgcttccggggatttccgcttttataggcgcggacattacggcaggtttggtgtttgttgatataatgggcaagggtgaagacgctctttttgtggatcttgggacaaatggagaaatagccgtgtggaaaaacagcgaaaaaaggcttttctgctgttcaaccgccgcaggaccatgttttgaagaagcggactcctgcggtttaacagcttcggattttattgacgctgtagccgaaatgaggcggcggaatgtaattgacgaaaccggcgcgttagctgatgatttttcgcggacggattttccaacggcgagtggaaaagttataacgcaaaaagacatgcgccaatttcaactggcaaaaagcgcgatttattcagggattaaaacaatttgcagaacagcgggaatagaattaaaaaatcttggtgctgcgtatgtcgcaggaggactcggtttctctctcaatccgcaaaacgccgccgccgtcggtctgctccccaaagaatttgcaggcgattctgcggcggttaaaaccgtaatttgcggaaacaccagtcttcaaggaactgttgaaagttaa

SEQ ID NO: 31142 - protein, 278 aa, Unknown
  Obtained from environmental sample
  misc_feature (1)..(278): Xaa is any amino acid
MIRSAERDLFTAINNQVKNILMSFMQKLNLSRIEKCAVSGNTTMLHLFCRVDPSAMGTAPYTPVFLEERQFSGKELSLPAENITLLPGISAFIGADITAGLVFVDIMGKGEDALFVDLGTNGEIAVWKNSEKRLFCCSTAAGPCFEEADSCGLTASDFIDAVAEMRRRNVIDETGALADDFSRTDFPTASGKVITQKDMRQFQLAKSAIYSGIKTICRTAGIELKNLGAAYVAGGLGFSLNPQNAAAVGLLPKEFAGDSAAVKTVICGNTSLQGTVES

SEQ ID NO: 31143 - DNA, 813 bp, Unknown
  Obtained from environmental sample
  misc_feature (1)..(813): n is a, c, g, or t
gtgcgtttgcaaaagcagtctgtttctacctcaccgggaagcattcccgcggttgttttatcaatccgtcttgaaggcgacccttcaaaaaaattggaaataatcgagaaagaattggctctgcttagccaaaaatctttgggtgttggggagcttaacattgaaaaaggccacgctcttgtcgatttaaaacggttttccgaagccgtcggcgcttttgacaccgctttttcttcgggaattaacaaagtttacaaagacagttacggacaggaaagagaccgcgcctgggaacttcgcaacgcaaccggagtgaacgcgggatctctcagtctgcttggacgggaaagcattacatggaacgactgtattgctcttgcaaaaaacgaaacgcagctttttcggtttattacaggtggcagaaatattacggatgcggaattatttacccgccttgttgaacgcgcttttattccctatacccaggatataacggtaactcaatggccgacggcaaaaccaaaaccggacgaagccgtaacacgcgccggggccgctttttttatctggcatctgtacgccgaagcgcgcggggaccgtggaatgttaacccgttattccgcacgttatgcgacaggtacaaaaccccgcactccaatccccgatacgcccgcgctttcacccttctttgattcaatccttggctgtgttgagacggaactgttgtccctccccgacggacggaattttcgcccaactcagtttataaaaggcgcggaacttcttacgatacttaaaaaaatagacaattaa

SEQ ID NO: 31144 - protein, 270 aa, Unknown
  Obtained from environmental sample
  misc_feature (1)..(270): Xaa is any amino acid
MRLQKQSVSTSPGSIPAVVLSIRLEGDPSKKLEIIEKELALLSQKSLGVGELNIEKGHALVDLKRFSEAVGAFDTAFSSGINKVYKDSYGQERDRAWELRNATGVNAGSLSLLGRESITWNDCIALAKNETQLFRFITGGRNITDAELFTRLVERAFIPYTQDITVTQWPTAKPKPDEAVTRAGAAFFIWHLYAEARGDRGMLTRYSARYATGTKPRTPIPDTPALSPFFDSILGCVETELLSLPDGRNFRPTQFIKGAELLTILKKIDN

SEQ ID NO: 31145 - DNA, 438 bp, Unknown
  Obtained from environmental sample
  misc_feature (1)..(438): n is a, c, g, or t
atgatttacaagggctatatcgacaaatttataggggactgcatcatggccgtatggggcgttcccatgcagcctaaaaaagacgacgcgataaacgccgtatcatgcgcaatcgccattcaggaagcggtgcgctcgacaaaaagaaaatttttccgtaaagaagccgcgcgattgcgcatcggcataggcgttaacacgggcccgctggtcgccgggaacctgggaagcatacagcgtatggattactcggtcataggcgacactgttaacctggcggcacggcttgaaggcgcggcggaggcggacgagataatcatttcccaggcgacgcgggaccacatcgggaaccatttcgagcttgaaaaaagagagccaatccgcgtcaagggcaaggcaaaaccaataaagatttacaatgtcctggggtttaaatag

SEQ ID NO: 31146 - protein, 145 aa, Unknown
  Obtained from environmental sample
  DOMAIN (1)...(143): Adenylate and Guanylate cyclase catalytic domain
  misc_feature (1)..(145): Xaa is any amino acid
MIYKGYIDKFIGDCIMAVWGVPMQPKKDDAINAVSCAIAIQEAVRSTKRKFFRKEAARLRIGIGVNTGPLVAGNLGSIQRMDYSVIGDTVNLAARLEGAAEADEIIISQATRDHIGNHFELEKREPIRVKGKAKPIKIYNVLGFK

SEQ ID NO: 31147 - DNA, 510 bp, Unknown
  Obtained from environmental sample
  misc_feature (1)..(510): n is a, c, g, or t
atgaccaacgtcaaccccaccgccccttccaccattcagccgggggaactgttcagcaccggctccggctccatacagctcctcttcgcccagcttcagttgaagctgagccaggccaacaaggaaaaggccctggagaaaatggacgtcatccaaaagaaccaggacctagccaagaaaaccgccgacatgatcgctagggctcgggatctgcaagtgacggccaagaacaacggcagctccatcatgccgtcggacatgaaacagttctacaaggacaacggcttaaagtgggacaccaagggcaacgacgacatacacaacaaggacgagtgggattataacatcaagagcctgaccaactttcaggaacagatcggggccgacacccagcagcttatggtcttcatccaggatttcatgggccaatacaattcctacctcaccggggccaacagcgccatccgtgaggccaaccagactttggccaccattgccagaggccagtga

SEQ ID NO: 31148 - protein, 169 aa, Unknown
  Obtained from environmental sample
  misc_feature (1)..(169): Xaa is any amino acid
MTNVNPTAPSTIQPGELFSTGSGSIQLLFAQLQLKLSQANKEKALEKMDVIQKNQDLAKKTADMIARARDLQVTAKNNGSSIMPSDMKQFYKDNGLKWDTKGNDDIHNKDEWDYNIKSLTNFQEQIGADTQQLMVFIQDFMGQYNSYLTGANSAIREANQTLATIARGQ

SEQ ID NO: 31149 - DNA, 555 bp, Unknown
  Obtained from environmental sample
  misc_feature (1)..(555): n is a, c, g, or t
ttgattatttgcggggactcaatgcttaatataaataataatacatcccggctgaaacgggaaatactggtgcgtatcgctaaacttcagtttgaggggaaattagctgaaggagttcataatatacccaaggaacttgccccaaccggcagcaatccgattcgctgctgcatttaccatgatcgggaaattctgatgcatcgggtgattgcacggcttggatgcggactggaagattataacgatgaaaagcagcttaccgaatatgtgcaggaagcacttaaccgggaaaaaccgacatggcccatgcataccgtgcttgatttagcgtgtaacgcctgtgtgcgttctcattttatggtaaccaacgcctgtcttgcctgcgttgcccgtccatgcctggtgaactgcggcagaaaagcgattgagattaaagacggcagggcgcgtatcgacagcgataaatgcgttagctgcggtctgtgcctgcaaaattgcccctatcacgcaataataaaaatccccgtaccatgcgaggaaagcatgtcccggtag

SEQ ID NO: 31150 - protein, 184 aa, Unknown
  Obtained from environmental sample
  DOMAIN (149)...(172): 4Fe-4S binding domain
  misc_feature (1)..(184): Xaa is any amino acid
MIICGDSMLNINNNTSRLKREILVRIAKLQFEGKLAEGVHNIPKELAPTGSNPIRCCIYHDREILMHRVIARLGCGLEDYNDEKQLTEYVQEALNREKPTWPMHTVLDLACNACVRSHFMVTNACLACVARPCLVNCGRKAIEIKDGRARIDSDKCVSCGLCLQNCPYHAIIKIPVPCEESMSR

SEQ ID NO: 31151 - DNA, 1719 bp, Unknown
  Obtained from environmental sample
  misc_feature (1)..(1719): n is a, c, g, or t
atgaaattccttatcaaggtgtacataggcgatgaaaactttgacgatattgaccacctgggcaacaggcgcgtgcgctctgtcggtgagctgatgtccgttaccatgaagacggcgttcagcagaatggaacgcatcgccaaggaaaggatgagcatgaaagagaccgacaccataaagccgcaggaccttgtttccattaagcctatagtcgcggccatcaaggaatttttcggctcaagccagctttcacaattcatggatcaggtgaacccccttgccgagctgacccacaaacggcggcttaacgcgctgggccccggcgggctttcacgcgagagggcgggttttgaggtgcgcgacgttcattacacccactacggaaggatgtgccccatagagactccggaaggaccgaatatcggtctgatcgtttcgctcgccaactataccagggttaacgaatacggctttctcgaaacgccgtaccgcaagatcaataaaggcgtagccacgagggatatagagtatctttcggcgatggatgaggacaggtacttcatcgcccaggcttccgccaaactcaaggacaacggctcttttgccgaagggcagatttcctgccgcagacagggcgactataccaaccgttcccctgaggatattcagttcatggacgtgtcgcccaaacagattatttcggtatccgcctcgttaatcccctttctggaacatgacgacgccaaccgcgcccttatgggctcgaacatgcagcgccaggcagtgccgctggtgtttcccgaagcgcccagggtcggcacgggatgggaggcgaaatgcgcctacgattccggcgttcttgtaaaggcttgcagaagcgggaccgcgttgcgcgtaacatcccatgagatcattataaaaccggataagcccggcgctttaaaatctttgtcgcagattcttatagacgaagagggcaatgacgtttataaactggtgaaattccagcgcaccaaccaggacacctgctataaccagcggcctattatcaaagtgggcgagaaaatcacagccgggcaggtaatcgcggacggccccgccacccagaacggggaacttgccctgggcaggaatatcctcgtaggctttatgccctggaacggttacaactacgaagactcgatccttatctccgagcgcgtggtcaaggaagatatgtttacctctatccatataaaggaattcttaaccgaggtaagggaaaccaaactggggccggaaaagattaccgacgagattcccaatacttccgaaaaaagcctggacaacctggacaaggaaggcattatctgcgtcggcgcgagagtccgctccggcgatattctggtaggcaaggtaacgccgaagagcgagaccgagacgacgccggaattcaaactccttaactcaatcttcggcgagaaggccaaggaagtgcgcgattcctcactcagggtgccgcacggcgttgagggaacggtgattgacatacagaggctcaagcggacggaaggggacgatcttagccccggcgttgacgaagtggtaaaagtgcttatcgccaccaagcgcaaactccgcgaaggcgataaaatggccggacggcacggtaacaagggcgttgtggcgcgcatacttcccgaagaggatatgccctacaggaagacggcacaccgctga

SEQ ID NO: 31152 - protein, 572 aa, Unknown
  Obtained from environmental sample
  DOMAIN (85)...(154): RNA polymerase Rpb2, domain 3
  misc_feature (1)..(572): Xaa is any amino acid
MKFLIKVYIGDENFDDIDHLGNRRVRSVGELMSVTMKTAFSRMERIAKERMSMKETDTIKPQDLVSIKPIVAAIKEFFGSSQLSQFMDQVNPLAELTHKRRLNALGPGGLSRERAGFEVRDVHYTHYGRMCPIETPEGPNIGLIVSLANYTRVNEYGFLETPYRKINKGVATRDIEYLSAMDEDRYFIAQASAKLKDNGSFAEGQISCRRQGDYTNRSPEDIQFMDVSPKQIISVSASLIPFLEHDDANRALMGSNMQRQAVPLVFPEAPRVGTGWEAKCAYDSGVLVKACRSGTALRVTSHEIIIKPDKPGALKSLSQILIDEEGNDVYKLVKFQRTNQDTCYNQRPIIKVGEKITAGQVIADGPATQNGELALGRNILVGFMPWNGYNYEDSILISERVVKEDMFTSIHIKEFLTEVRETKLGPEKITDEIPNTSEKSLDNLDKEGIICVGARVRSGDILVGKVTPKSETETTPEFKLLNSIFGEKAKEVRDSSLRVPHGVEGTVIDIQRLKRTEGDDLSPGVDEVVKVLIATKRKLREGDKMAGRHGNKGVVARILPEEDMPYRKTAHR

SEQ ID NO: 31153 - DNA, 504 bp, Unknown
  Obtained from environmental sample
  misc_feature (1)..(504): n is a, c, g, or t
atgcgcgccacaacgcccttgttaccgtgccgtccggccattttatcgccttcgcggagtttgcgcttggtggcgataagcacttttaccacttcgtcaacgccggggctaagatcgtccccttccgtccgcttgagcctctgtatgtcaatcaccgttccctcaacgccgtgcggcaccctgagtgaggaatcgcgcacttccttggccttctcgccgaagattgagttaaggagtttgaattccggcgtcgtctcggtctcgctcttcggcgttaccttgcctaccagaatatcgccggagcggactctcgcgccgacgcagataatgccttccttgtccaggttgtccaggcttttttcggaagtattgggaatctcgtcggtaatcttttccggccccagtttggtttcccttacctcggttaagaattcctttatatggatagaggtaaacatatcttccttgaccacgcgctcggagataaggatcgagtcttcgtag

SEQ ID NO: 31154 - protein, 167 aa, Unknown
  Obtained from environmental sample
  misc_feature (1)..(167): Xaa is any amino acid
MRATTPLLPCRPAILSPSRSLRLVAISTFTTSSTPGLRSSPSVRLSLCMSITVPSTPCGTLSEESRTSLAFSPKIELRSLNSGVVSVSLFGVTLPTRISPERTLAPTQIMPSLSRLSRLFSEVLGISSVIFSGPSLVSLTSVKNSFIWIEVNISSLTTRSEIRIESS

SEQ ID NO: 31155 - DNA, 855 bp, Unknown
  Obtained from environmental sample
  misc_feature (1)..(855): n is a, c, g, or t
atggcgcacatacgcgcttacggcgagcaatgccccaaagcaaagccaatcatccacctgggagcgacctcctgttatgtaacagacaataccgacataatattgcagcattcagcgctgctgcttgtcaaaaaactgcttgtaaacacaatagcagccttgtacgacttcgccgataaatacagatccctgccctgcctggcgtttacccatttccagtccgcgcagcccactacgatcgggaaacgcgcgacgctctggatgcaggatctcctgcttgatcttgaacagcttgagtttacgcttaacagcttgaagctgctcggctgcagaggaacgaccggaaccggcgcgagttttctctccctatttgacggcgaccatgagaaggtaaaggcgctggatcaaaagatagccgcaaaaatgggttttaacagggtgtattcggtcagcggccagacctattcaagaaaagtcgattattacaccctgtccgttctgtcaggcatcgcccagagcgcgtataaattctcaaacgatatacgcctgctctcccatcttaaagaaatagaagaaccgtttgaagcaggacaggtcggatcatcggcaatggcgtacaagagaaacccgatgagaagcgagcgcatcgcctcgctcgcgcggcatgtgacggttaacgcgctcaacccggcgctgactgcgagcgcgcagtggatggaacggactcttgacgattcggctaaccggcgcatcgcaatccccgaagcctttctcgccacggacgctatactttcgctgtatatcaatattgcgggcgggcttaccgtttatccgcatataataaaaaacacctga

SEQ ID NO: 31156 - protein, 284 aa, Unknown
  Obtained from environmental sample
  DOMAIN (1)...(224): Lyase
  misc_feature (1)..(284): Xaa is any amino acid
MAHIRAYGEQCPKAKPIIHLGATSCYVTDNTDIILQHSALLLVKKLLVNTIAALYDFADKYRSLPCLAFTHFQSAQPTTIGKRATLWMQDLLLDLEQLEFTLNSLKLLGCRGTTGTGASFLSLFDGDHEKVKALDQKIAAKMGFNRVYSVSGQTYSRKVDYYTLSVLSGIAQSAYKFSNDIRLLSHLKEIEEPFEAGQVGSSAMAYKRNPMRSERIASLARHVTVNALNPALTASAQWMERTLDDSANRRIAIPEAFLATDAILSLYINIAGGLTVYPHIIKNT

SEQ ID NO: 31157 - DNA, 315 bp, Unknown
  Obtained from environmental sample
  misc_feature (1)..(315): n is a, c, g, or t
atggcgaccgaaaatattttaatgcactgcgtaaaaaacggcggagacaggcagtcgcttcacgagagaatacggattcattcggtagaggcggcgaaaaagataaaacaggaaggcggggaaaacgatctgatagcccgtatcctgtcggacgaaaaattcggactaagcaaagaagaaattaacggactgctggccgccgaacagttcacgggcagggccggcgaacagaccgaagagtttttagcggaagtcaagggaatgctcggagccaataaagagcttttgggcgttgaaatcaagatctctgtttaa

SEQ ID NO: 31158 - protein, 104 aa, Unknown
  Obtained from environmental sample
  misc_feature (1)..(104): Xaa is any amino acid
MATENILMHCVKNGGDRQSLHERIRIHSVEAAKKIKQEGGENDLIARILSDEKFGLSKEEINGLLAAEQFTGRAGEQTEEFLAEVKGMLGANKELLGVEIKISV

SEQ ID NO: 31159 - DNA, 570 bp, Unknown
  Obtained from environmental sample
  misc_feature (1)..(570): n is a, c, g, or t
ttgaaatcaagatctctgtttaagggggagaaaatgcttacagcggtagtcggaattaactggggcgatgaaggcaaaggacgcatggtagatctgctgtccgataaatatgatgtgatctgccgttatcagggaggcaacaacgccggacacacggtcgtcaatgacaggggcaaatttatcctgaaccttttaccgtcgggtattttacgcgaaggggctgtcaatgtcatgggcggcggcatggtaattgatatagaacatctcaacggtgaaattaaagcgctaagggaaaaaggcattagtataacgcccaataacctgaaaatcagcgataaagcctttatttgcatgccgtatcacaaaaaacaggatatactggaagaagaacggcttgccgataaaaaatacggctctacccgccgcggtatagctccggtgtacggcgacaaatatatgaaaaaaaggctaaggattggcgatttacaggattccaaaaccctgaaacaaaaactcaccgacatcattgaatggaaaaatattacgcttaacggctaccggggcacatga

SEQ ID NO: 31160 - protein, 189 aa, Unknown
  Obtained from environmental sample
  DOMAIN (13)...(187): Adenylosuccinate synthetase
  misc_feature (1)..(189): Xaa is any amino acid
MKSRSLFKGEKMLTAVVGINWGDEGKGRMVDLLSDKYDVICRYQGGNNAGHTVVNDRGKFILNLLPSGILREGAVNVMGGGMVIDIEHLNGEIKALREKGISITPNNLKISDKAFICMPYHKKQDILEEERLADKKYGSTRRGIAPVYGDKYMKKRLRIGDLQDSKTLKQKLTDIIEWKNITLNGYRGT

SEQ ID NO: 31161 - DNA, 861 bp, Unknown
  Obtained from environmental sample
  misc_feature (1)..(861): n is a, c, g, or t
atgcacatggttaccgatactgaacagtggaaaaaattgaaaaatgccggaattgaaagctggatggagcagaagaaaaaagcggggttaataaagcacataggtttttcatttcatggttccggaagcgaatttttaaaaatcattgatatttatgattgggaattggctttgattcagtacaattactttgatgaaaattaccaggctggcgttacgggacttcgcgccgccgccgtgaaaatgcccgttgtgattatggagccgcttcttggcggaaaacttgcctcagggctgccaaaagaagcggttaaattatttaaaaacgccgatacggatttatcgcccgtaggctgggcgcttaactggctgtggaatcagggagaaattacaacagtcctttccggtatgaactcaaaagaacaactggaagaaaatatcgctcttgctgaaaaatcgtccgccggaatgttagatgatactaaattggcagtttacaagtcggcgcttgaaattattaaacgctcctgcaaggtacgctgcaccggatgtaattattgtatgccgtgtcctgtaggagtaaatattccaggagctttttcagcgtataacgccgttttttcaatgggttatgtcgaaggaatgaaacaatatgctacaagtaccggattaacgcaggaaaaaagcggcagtcccagcctgtgtataaaatgcggcaaatgcgaacctcactgcccgcagaatatcccgattatgaaagaacttgttaccgttaaaaagagaatggaaacgcctattatcaggtttattggtttttgcgcccgcgcttttttgggcaaaaaacgtaaaaagatttcttaa

SEQ ID NO: 31162 - protein, 286 aa, Unknown
  Obtained from environmental sample
  DOMAIN (228)...(251): 4Fe-4S binding domain
  misc_feature (1)..(286): Xaa is any amino acid
MHMVTDTEQWKKLKNAGIESWMEQKKKAGLIKHIGFSFHGSGSEFLKIIDIYDWELALIQYNYFDENYQAGVTGLRAAAVKMPVVIMEPLLGGKLASGLPKEAVKLFKNADTDLSPVGWALNWLWNQGEITTVLSGMNSKEQLEENIALAEKSSAGMLDDTKLAVYKSALEIIKRSCKVRCTGCNYCMPCPVGVNIPGAFSAYNAVFSMGYVEGMKQYATSTGLTQEKSGSPSLCIKCGKCEPHCPQNIPIMKELVTVKKRMETPIIRFIGFCARAFLGKKRKKIS

SEQ ID NO: 31163 - DNA, 708 bp, Unknown
  Obtained from environmental sample
  misc_feature (1)..(708): n is a, c, g, or t
ttgcccgaatcaatagaaaaccctttcagctttttggaggactcttctccggaaccgattgtcttgatattacacactgaaacagcccaaacaacaccccttatactttccacactttcttctatactttctgccggaactataagcaaacttcctgcaaaacaaaaggctgaaatactgaaacgtatggcgcatcaaagagaactttctcccgaaattcttgaacaggtgtctgcggctttaaaggaaaaagtcaggaatattgtcggcagtgcgaattcgatcgaaataaacggtatgcaaacccttgctgcaattttaaagcaaggcgactattctttcggcgataggattatcaacgagcttgaaaaagaaaatcctgaagtgggcaaaaatttaaaagaggaactttatacacttgatgatgttgtgaataccattgatcgttctgtacaggaaaaacttagtacgatgacagaacgcgatattgcaatcctgttaaaaggcaggaaacaggaattccgtgagaaaatactgtcatgtgtttcagcagggagaaggcagataattcgtgaagaatctgaaattctcggcgctgtgtcaaaaagcgactgcgacgcagccgcaaatgaatttctcgcgtggttcaggaaagcccgtgaaaacggagatataatacttgaaagcgataaggatgtgtttatatga

SEQ ID NO: 31164 - protein, 235 aa, Unknown
  Obtained from environmental sample
  DOMAIN (119)...(228): FliG C-terminal domain
  misc_feature (1)..(235): Xaa is any amino acid
MPESIENPFSFLEDSSPEPIVLILHTETAQTTPLILSTLSSILSAGTISKLPAKQKAEILKRMAHQRELSPEILEQVSAALKEKVRNIVGSANSIEINGMQTLAAILKQGDYSFGDRIINELEKENPEVGKNLKEELYTLDDVVNTIDRSVQEKLSTMTERDIAILLKGRKQEFREKILSCVSAGRRQIIREESEILGAVSKSDCDAAANEFLAWFRKARENGDIILESDKDVFI

SEQ ID NO: 31165 - DNA, 768 bp, Unknown
  Obtained from environmental sample
  misc_feature (1)..(768): n is a, c, g, or t
atgacattaattgagttagcacagaaaaacagtaatggaatagaaattccatcaactattttaacttctaactattctattaaactgaaaatccaaaattctgtatttctcatattgaagaaatcttcaaatcaacctgatagtattaaattaccatcaaatgtcacatatgatacatgtaacaggtggcttaatcaactttatacgttgtatcactgggagaccgaagaaacaaaaagggttaaatctagaaaacgattagattattatgctgctattatgaatcaatggattcataataactcactaaatcaaataattaacctatccataaattatcatcttaaaaataagtataagatcatcactggatatgccaaagaaggtcctacttatgaagaatttaataatactaagcatcatattaatattgttattggaaatctaattgaagatattgaaaacattttaagatttatgcttgaaaaatattttaacaactattatttgatgttggttgaaattttgggtgaagaaaatgcaggtgctaattgggcatcttttttagaatatggcacgcaaaatcaaatcgtaatagcgttacaaaacattggtttatcaagacattcatctaattatttatattctaaccataaggattgtctagtaatagagaaagataaacttgttagtattaatgtgaaaaagctaaaaaaagacatagataacgaatgtatagaatatgatgaaatttgttcaatactataa

SEQ ID NO: 31166 - protein, 255 aa, Unknown
  Obtained from environmental sample
  misc_feature (1)..(255): Xaa is any amino acid
MTLIELAQKNSNGIEIPSTILTSNYSIKLKIQNSVFLILKKSSNQPDSIKLPSNVTYDTCNRWLNQLYTLYHWETEETKRVKSRKRLDYYAAIMNQWIHNNSLNQIINLSINYHLKNKYKIITGYAKEGPTYEEFNNTKHHINIVIGNLIEDIENILRFMLEKYFNNYYLMLVEILGEENAGANWASFLEYGTQNQIVIALQNIGLSRHSSNYLYSNHKDCLVIEKDKLVSINVKKLKKDIDNECIEYDEICSIL

SEQ ID NO: 31167 - DNA, 603 bp, Unknown
  Obtained from environmental sample
  misc_feature (1)..(603): n is a, c, g, or t
gtggtacttaccaatcctccattcggcggcaaagaaggaaaagaggcgcagaccgcctttgcctataagaccggatcgacgcaggttttattcctacagcacgtcatagacagcctaaaaaagggagggcgttgcggcatcgttttagacgagggtgtcctattccgcacaaacgaaattgctttcgtgcaaaccaagcgaaaactgctcgacgattgcaacgtctacgcgattatcagcctccccggcggcgtattctccgcagccggcgcgggcgttaagacaaacatactgctgttcgaaaaaggcaagcggacggaacgtatttggtactacgacctatcagacataaaagtcggcaagcgtaccccgttcaccatagacaaattcgacgagttcttccgcctgctacccgaccgcgccgacagcgagcgcagctggtcggtggataggcagaccatcgaaaaaaacggcttcgatatcaaggcggtaaaccccaaccgcaaagtcgaacacgacactagaactccgtcggagcttatcgcgttgatagaggaaaaacagggcgagattatggcggcgttggcggaattgaagcggtag

SEQ ID NO: 31168 - protein, 200 aa, Unknown
  Obtained from environmental sample
  DOMAIN (1)...(173): N-6 DNA Methylase
  misc_feature (1)..(200): Xaa is any amino acid
MVLTNPPFGGKEGKEAQTAFAYKTGSTQVLFLQHVIDSLKKGGRCGIVLDEGVLFRTNEIAFVQTKRKLLDDCNVYAIISLPGGVFSAAGAGVKTNILLFEKGKRTERIWYYDLSDIKVGKRTPFTIDKFDEFFRLLPDRADSERSWSVDRQTIEKNGFDIKAVNPNRKVEHDTRTPSELIALIEEKQGEIMAALAELKR

SEQ ID NO: 31169 - DNA, 1290 bp, Unknown
  Obtained from environmental sample
  misc_feature (1)..(1290): n is a, c, g, or t
gtggcgaaggtcgcnggcgtcgtcaggcttaaggacgtggagaccgtggaacacagcacgggcaatgtggttatgaaccgcatcggcgaggttatggtgctggacgacgcggagcgggagcgctacaggtacaatatcccctacgggtcggtcgtcaaggtgaccgacggcgagaaggtggcgaaggggcaggatctctttacttgggacccgtacaacaacgtgattttggcgccgcgcgccggcatagtcaggtacgccgacctcacggagggcgagactttcgagaggattgacgacgagcgtaccggcgcgaccaacttcgtggtgatcgagcaccgccgtgacaagaagctgcatccgcatatacaggtgtacgagggcgagacgcgcgtagccaatctagccatgcctaccggcagttaccttcaggtcagggagggtgatacggtcgtcgccggcgatatcttggcgaagatgccgcgtgagagcgcgaagagccgcgacatcaccggcggtttgccgagggttgcggagctgtttgaggcgcgccgtcccaaagaccccgccgtcgtttcggttattgccgggacggtggagttcggcgataccgagcgcggcaaccgtaagcttaagataagggacgagcacggcgatgtgagggagtacctgatacctttgggcaagcacctccgcgtccacgagggcgacagggttaaggccggcgaccgcctgtgcgagggcgccatcgacccgcacgacatcctgaggatcatgggtgaaaaagaggttaggaagtacatgctcaacgagattcaggcggtgtaccgtctgcagggcgtgacgatcaacgataagcacgtggaggttatagtctcccagatgttgcgcaaggttaggatagagcagcgcggcaataccgattttcttgaaggcgacgaggtcgaccgcagggagttgcgcaaggtcaacgagagggtggagtccgagggcgggaagccggcgactttcgagccgttgttgcttggtataactaaggcgtcgctcaccacggagtcgttcctcagcgccgcctcattccaggagacgacaaaggtgctctcgaaggcggctgtggagggtaagatagacgctttgggcggcctcaaggagaacctgatcatgggtaacctgatcccggcgggcacggggtctaggatgtacaggatgcttaaggtcaaggacttagagaccgacatggtggaggttgaggaccacacggagagcgacgattttgtcgatttggggtag

SEQ ID NO: 31170 - protein, 429 aa, Unknown
  Obtained from environmental sample
  DOMAIN (10)...(357): RNA polymerase Rpb1, domain 5
  misc_feature (1)..(429): Xaa is any amino acid
MAKVAGVVRLKDVETVEHSTGNVVMNRIGEVMVLDDAERERYRYNIPYGSVVKVTDGEKVAKGQDLFTWDPYNNVILAPRAGIVRYADLTEGETFERIDDERTGATNFVVIEHRRDKKLHPHIQVYEGETRVANLAMPTGSYLQVREGDTVVAGDILAKMPRESAKSRDITGGLPRVAELFEARRPKDPAVVSVIAGTVEFGDTERGNRKLKIRDEHGDVREYLIPLGKHLRVHEGDRVKAGDRLCEGAIDPHDILRIMGEKEVRKYMLNEIQAVYRLQGVTINDKHVEVIVSQMLRKVRIEQRGNTDFLEGDEVDRRELRKVNERVESEGGKPATFEPLLLGITKASLTTESFLSAASFQETTKVLSKAAVEGKIDALGGLKENLIMGNLIPAGTGSRMYRMLKVKDLETDMVEVEDHTESDDFVDLG

SEQ ID NO: 31171 - DNA, 777 bp, Unknown
  Obtained from environmental sample
  misc_feature (1)..(777): n is a, c, g, or t
gtggatcatcaccgacatactttccgatcaggcaagccgttttacaggcttggatcggccccgactctcgcgacggaattcccctcaatgttcaagaccggcaccgcgaaccagtttcagcacatctgggcgtttggagctacgccccgttatacggtaggcgtatggatggggaatttttcgggcgagaccgtggttggaaagacgggcagttccattcccgcgcgtattgccgcggatcttctgagggccctggaacagaccgcgggatctgaaaaaggctttcccccggttccccgcggcgcgcgcgaaatacagatctgctccctttcgggaatggcggccggcccctactgcaccggcgccgcgcgcgaatggctgccgcccgaggaaggcgaagaacccggcaggctgtgtacctggcacaggcagccgggcgccgctccgtcatacccacctgagtaccaggcctggcttaccgagcgtttccgcagcggaaggctttcgccgcgaagcgaagcttcgggcgcttcgaaaatacggcttccggtttccggctcggttttttattttaacccggccctgccccccgaagcgcaggccatccgcgttgagaccacaggcttcgatattggggcgcttgtgtacgcaaacgacgttttacagggcggcctcaacaacgccggggtatttcgcctccccctgcgccgcggccgccagcgcataacggtggaagacgagggggctgttagcgaagtggagattgaggtaagatag

SEQ ID NO: 31172 - protein, 258 aa, Unknown
  Obtained from environmental sample
  misc_feature (1)..(258): Xaa is any amino acid
MDHHRHTFRSGKPFYRLGSAPTLATEFPSMFKTGTANQFQHIWAFGATPRYTVGVWMGNFSGETVVGKTGSSIPARIAADLLRALEQTAGSEKGFPPVPRGAREIQICSLSGMAAGPYCTGAAREWLPPEEGEEPGRLCTWHRQPGAAPSYPPEYQAWLTERFRSGRLSPRSEASGASKIRLPVSGSVFYFNPALPPEAQAIRVETTGFDIGALVYANDVLQGGLNNAGVFRLPLRRGRQRITVEDEGAVSEVEIEVR

SEQ ID NO: 31173 - DNA, 900 bp, Unknown
  Obtained from environmental sample
  misc_feature (1)..(900): n is a, c, g, or t
atgctgatcccggaagactggctgatgaaaaaacccnctttttatgcgccgcattttaccgaccgtattacggcggacggcagacagcctgtacgcactacccttgacctgaatttacagttatatgccgaaaaacgcctcgcgtccgagcttgccatgctggaaaataaccgtgtgggcaatggggccgtgctagcggttgacaattcaagcggggaggtgctggtttatataggctcggcctcatggtttgacgacgcgagaaacggcaagatcgacggtgtcagggtgaaaaaccagcccggttcctgtcttaaaccctttctttacgcgctggccctggaaaaaggatttaccccaaacgatattctacctgatattcctactgttttcggcagcaacgaggcttacagcccgggaaattttaaccgtcgttttaacgggccggtgcgtttaaggatagccctcgcgtcttcgcttaatatcccggctgtttatatgcttgaacggctggnggttcgcaattttgaggattggcttgggagattgggttttgattcaattgccgcgtcagcgggcagttatggtcttggacttgcccttggcaacgccgagctcagcctgggagaaatgacacggggctttgcggtctttccgcggggcggacgagctttgaatttggtatttaccgaggcggcgcgaaaaagagaagagcgtcagctaatgtcgccttacagcgcgtggatcatcaccgacatactttccgatcaggcaagccgttttacaggcttggatcggccccgactctcgcgacggaattcccctcaatgttcaagaccggcaccgcgaaccagtttcagcacatctgggcgtttggagctacgccccgttatacggtag

SEQ ID NO: 31174 - protein, 299 aa, Unknown
  Obtained from environmental sample
  DOMAIN (62)...(299): Penicillin binding protein transpeptidase domain
  misc_feature (1)..(299): Xaa is any amino acid
MLIPEDWLMKKPXFYAPHFTDRITADGRQPVRTTLDLNLQLYAEKRLASELAMLENNRVGNGAVLAVDNSSGEVLVYIGSASWFDDARNGKIDGVRVKNQPGSCLKPFLYALALEKGFTPNDILPDIPTVFGSNEAYSPGNFNRRFNGPVRLRIALASSLNIPAVYMLERLXVRNFEDWLGRLGFDSIAASAGSYGLGLALGNAELSLGEMTRGFAVFPRGGRALNLVFTEAARKREERQLMSPYSAWIITDILSDQASRFTGLDRPRLSRRNSPQCSRPAPRTSFSTSGRLELRPVIR

SEQ ID NO: 31175 - DNA, 648 bp, Unknown
  Obtained from environmental sample
  misc_feature (1)..(648): n is a, c, g, or t
atgtcaaaacgtattactatttttgttatttcgcttgtagcgctcattccggcgctgctggtggtgattttgatttgcgcgtctccttcgcaggaactgacaatcaaatattttaccacgcccgcgatgcactccgtctggcggtacgatggttttgcggagtatatggtgtccgtgcgcaaactggacttccggaaagacggcgagaatacgcggtatcgggtggaagctgaagttgacgatatgtccggtgatgagccggcacccgggaatgagcgccgcaaaatcgaattgcaatatcttcttacgaaagacacgcttatccagagcgggcagcggaaaccattgatggatgcggagttccggacgctggagcttttgcgcctgccgctgaaagagggtgcccgctggacacaaacgcaaaaaaatgagctcggagagactgttaccattgattgccagatcacaaatctgcaggtgaaagacggacggacgatccttgacgtaacctattcctcgcgcgacggggatcagtatgagtggcgccgttttctgggcggtgatggtctttcgcggtacgagaagcgttggaagcacatggatgaggagcttatgatcggcttcaacctcctcctgccggtgaactag

SEQ ID NO: 31176 - protein, 215 aa, Unknown
  Obtained from environmental sample
  SIGNAL (1)...(27)
  misc_feature (1)..(215): Xaa is any amino acid
MSKRITIFVISLVALIPALLVVILICASPSQELTIKYFTTPAMHSVWRYDGFAEYMVSVRKLDFRKDGENTRYRVEAEVDDMSGDEPAPGNERRKIELQYLLTKDTLIQSGQRKPLMDAEFRTLELLRLPLKEGARWTQTQKNELGETVTIDCQITNLQVKDGRTILDVTYSSRDGDQYEWRRFLGGDGLSRYEKRWKHMDEELMIGFNLLLPVN

SEQ ID NO: 31177 - DNA, 951 bp, Unknown
  Obtained from environmental sample
  misc_feature (1)..(951): n is a, c, g, or t
atgatggcgagcgcggctttgggtgctgttttgccgcagcttggaattgatgctatacttgcccctatgtttgttgccgcgcttgggattttattttctttgataggcataatgctggttcgcacaaaagaagatgctggttctaaaaatctgctacgctctcttttagttggaacgcttggcagttccattttgattttggttgcagttgccgctatggcaggatgcggattaataagctggggaattttcggttccgtggcttctggtttggtggttggcgtgataatagggcaattcacagaatattacacatcggatatctacaaaccaacacagagcattgcaaatcaagcaaagcttgggcacgcaactacaataatagagggcatatcggttggaatgaagagcacaggatttcccgttgtttgcattgcggttggaattcttttggcatttgggtttgcgggtggttttggcaatttgtcacttggactttatggtgttagctttgcagcagttggaatgctctcaactcttggtataactcttgcaaccgatgcattcggacccatagcagacaatgcgggtggaaatgcagagatgagtgggctgtctccagaggttcgcaaacgcacagacgaacttgatatgctaggcaacaccactgccgcaactggcaaaggctttgccataggttctgccgctttaacggctatcgcgcttttggcagcatatatagaagaggtaaaactctggcttggaaaaatcgctgcagattcaagcggaacattcaaagcaggttccgttgtatttgcaagttctggcgaaaatcttgcaaacacttttgcctcggactctgccattaaaataatagacaatggaaacaagggcaataaatgcaaacggaacattggtaggcttgggtgcacacaatgcaaatatatctga

SEQ ID NO: 31178 - protein, 316 aa, Unknown
  Obtained from environmental sample
  DOMAIN (1)...(300): Inorganic H+ pyrophosphatase
  misc_feature (1)..(316): Xaa is any amino acid
MMASAALGAVLPQLGIDAILAPMFVAALGILFSLIGIMLVRTKEDAGSKNLLRSLLVGTLGSSILILVAVAAMAGCGLISWGIFGSVASGLVVGVIIGQFTEYYTSDIYKPTQSIANQAKLGHATTIIEGISVGMKSTGFPVVCIAVGILLAFGFAGGFGNLSLGLYGVSFAAVGMLSTLGITLATDAFGPIADNAGGNAEMSGLSPEVRKRTDELDMLGNTTAATGKGFAIGSAALTAIALLAAYIEEVKLWLGKIAADSSGTFKAGSVVFASSGENLANTFASDSAIKIIDNGNKGNKCKRNIGRLGCTQCKYI

SEQ ID NO: 31179 - DNA, 933 bp, Unknown
  Obtained from environmental sample
  misc_feature (1)..(933): n is a, c, g, or t
ttgcttaacgaagtaattcgcttgcagggcaaaatatgcggattaatgctcgctatgggattttcccagaaaactgaagctatgctgaatactttgaccttagacgtgttgaaatcttctgaaattgagggggaaaatctgaattatgagcaagtgcgctcatcaatagctagacgtttgggcatagatgttgccaattcggtgaaatccagcagagccatagatggcgttgttgaaatgatgctggacgccacgcagaattttaagcaggcactaacagaaaaaaggttgtttgactggcacagagttctctttgcaagcgagtatttcccgtcaatatccgttggaaaatacagaacagaggaaatgcagatagtatctggcagaatggagcatttaaatgttcattacgaagctccagaaccagagcggctttcagaggaaatggctcagtttttaaaatggctcaatgatgaaaatgaacccaaccatgttctaaaatctgccatcgcgcatttttggtttgtgaccatacacccctttgatgatggcaatggaagaatagctcgcgcaatatccgatatgatgcttgcccgctcggataacagctcgcaaagatattacagcatgtctgcgcaaattttgaaagcgagaaaaaaatattacgatgtattgcaaaaaacttcgtacggaaatggcgatataacggattggcttttgtggtttttggaaacactaaaaaaatctttgcttgaatctgaaaaaataatcgattccgtactattcaaagcgaatttctgggataaacataaagatactccactcaatagcaggcagcgtttaatgctgaataaattgatggatggctttaccggaagactgaaatcttcaaaatgggcaaaaatcgccaaatgtcaccctcggccgatctga

SEQ ID NO: 31180 - protein, 310 aa, Unknown
  Obtained from environmental sample
  SIGNAL (1)...(27)
  DOMAIN (97)...(231): Fic protein family
  misc_feature (1)..(310): Xaa is any amino acid
MLNEVIRLQGKICGLMLAMGFSQKTEAMLNTLTLDVLKSSEIEGENLNYEQVRSSIARRLGIDVANSVKSSRAIDGVVEMMLDATQNFKQALTEKRLFDWHRVLFASEYFPSISVGKYRTEEMQIVSGRMEHLNVHYEAPEPERLSEEMAQFLKWLNDENEPNHVLKSAIAHFWFVTIHPFDDGNGRIARAISDMMLARSDNSSQRYYSMSAQILKARKKYYDVLQKTSYGNGDITDWLLWFLETLKKSLLESEKIIDSVLFKANFWDKHKDTPLNSRQRLMLNKLMDGFTGRLKSSKWAKIAKCHPRPI

SEQ ID NO: 31181 - DNA, 432 bp, Unknown
  Obtained from environmental sample
  misc_feature (1)..(432): n is a, c, g, or t
atggcgaggcacgggtgttattccgggcagggtgacgcgggggttgccggcggtccgacaggcgacctctacgtttttatccgcgtaaaaccccatgaattttttgagcgcgagggcgatgacctttactgcgccattcctatttcaataacacaggcggcacttggcgctgagattcaggtcgctacactcgagggcaaatccatcaagataaaggttccgcccggaatacagaacggcaaactgctgcgtatacgcgacgaaggcgtccccacgtctggacgcaggggaaacctctatatcaagatgatggttcaggtgcccgcaaaactttcaaagcgcgggcgggagcttatggaagagctttcgcgtgttgaaggtgaaaacagtacccccaagccgatacctctttcggagctttcggaacaatag

SEQ ID NO: 31182 - protein, 143 aa, Unknown
  Obtained from environmental sample
  DOMAIN (8)...(123): DnaJ C terminal region
  misc_feature (1)..(143): Xaa is any amino acid
MARHGCYSGQGDAGVAGGPTGDLYVFIRVKPHEFFEREGDDLYCAIPISITQAALGAEIQVATLEGKSIKIKVPPGIQNGKLLRIRDEGVPTSGRRGNLYIKMMVQVPAKLSKRGRELMEELSRVEGENSTPKPIPLSELSEQ

SEQ ID NO: 31183 - DNA, 1041 bp, Unknown
  Obtained from environmental sample
  misc_feature (1)..(1041): n is a, c, g, or t
atgatttccatatttttaaattcggtaaatggctgggcatggaaacggaacagcacatcgtgttttacaaaatggaacgaggataattgcagataccctataaggcatcaagttgaaccggcttacaagcctcgtttggttgtttcaagaaaagacagggaagatatctacactaaaacttacggaaacccgatgaccgtcatggttgacgattttctttacgccggaaatgacgaagttatactggaaatagccaatgacggaataggcaaacttgattatacgatagattttttaaataacgaatatccgtggcttgaaataagttcaaaaaaaggaaaggttgagtttcaggaagaaataatcattaggtgcaaacgagacaaacttgacaaacagcgagaagaaacagccgtttttattatacaggacaatgagagcagggtagcggtcgaagtaaaagcaaaagttataaataccgatttacccgaaaaaacatttttggaaaacaacaatgtaatagcgattaacgcaaatcatttctgcggtaaaaaagacgtttccaaaggcgcttttatggagttaaaaaattacagcagaagcggctgcggaatgaaagtatttcccgttacttctgactttgaagaaagtgaagaaaagccgtctcttacataccgtttcttaattgaaaaaagcggcgagtacacgatagaagtgtggacgactcccgttaattccgtgcaaaacaaacgccctctaagatgtcagcttgaaacttccaaaggcgaaaagcaagtcatagtaacggttcccgacgacttccgcgcaggaagcccctcagacgaaagatggtgtcagggagtgttggataacattcgcgtaactaaagcgtcatttagctttgaaaaaggcgttcaggaaatatcagtaagcgcgctggaagccgggcttgtactggagcgaattattatctatcccgaaaataatccgccgtttaaatcgtacttgggtccgcttgaaagttattatttctctaattga

SEQ ID NO: 31184 - protein, 346 aa, Unknown
  Obtained from environmental sample
  misc_feature (1)..(346): Xaa is any amino acid
MISIFLNSVNGWAWKRNSTSCFTKWNEDNCRYPIRHQVEPAYKPRLVVSRKDREDIYTKTYGNPMTVMVDDFLYAGNDEVILEIANDGIGKLDYTIDFLNNEYPWLEISSKKGKVEFQEEIIIRCKRDKLDKQREETAVFIIQDNESRVAVEVKAKVINTDLPEKTFLENNNVIAINANHFCGKKDVSKGAFMELKNYSRSGCGMKVFPVTSDFEESEEKPSLTYRFLIEKSGEYTIEVWTTPVNSVQNKRPLRCQLETSKGEKQVIVTVPDDFRAGSPSDERWCQGVLDNIRVTKASFSFEKGVQEISVSALEAGLVLERIIIYPENNPPFKSYLGPLESYYFSN

SEQ ID NO: 31185 - DNA, 411 bp, Unknown
  Obtained from environmental sample
  misc_feature (1)..(411): n is a, c, g, or t
atggcttatgacgaacattggaccagaagcgaaccgggtcctgtcgcgtctcttaaatggtgccgcaatgtagcggaatattctttgcgcgtaataggagatgaaaagttaatcatgggcattccgttctacggacgcgcatgggaagataaaaatcatcatagggcgcttatttatacaactactgaaaatttgatagaaacctataaggttaaggatataaaacgcgaaaacggtataccgacttttgattataatgcaaatcttgcggttaaagtttattacgaagatgaatattccatttccgcgcgaatggaaatgtacaaagcaatgaaaattaaggctataggtttctggcgtatcgggcaggaaaccccgaaagtttgggatattattcaattagagaaataa

SEQ ID NO: 31186 - protein, 136 aa, Unknown
  Obtained from environmental sample
  misc_feature (1)..(136): Xaa is any amino acid
MAYDEHWTRSEPGPVASLKWCRNVAEYSLRVIGDEKLIMGIPFYGRAWEDKNHHRALIYTTTENLIETYKVKDIKRENGIPTFDYNANLAVKVYYEDEYSISARMEMYKAMKIKAIGFWRIGQETPKVWDIIQLEK

SEQ ID NO: 31187 - DNA, 1236 bp, Unknown
  Obtained from environmental sample
  misc_feature (1)..(1236): n is a, c, g, or t
gtggacgaggccacccatccccagaacctgccaagccgccgcacgttattgcaaaccgaagaaattaacactgtccgcgaaagcgaacaggagtattatatagtaaattttgattcatccgcttttatcgggatgaatatgcctgtagaaataatcccctttgaaacctgggatgcctcttctttcaactcagcctatgctgtcgtcagctataccagcgaagctttcccttacgagcttatacgctccgtgcgcggcaacgactggtcggagagcctcggcttgaatccggaagagtacgccctctacaccgattacggcggagatgaggcgatagccgcttttgccagggaaattatcggcagttcggtgtcgaggttttcgggaaggagagaagattccccttcttattgggaacaggttcagatgatttacgacaggctcaagttcggcgaataccgctacagcctcaagcccggaatagccgccgacggggatcagcttaagcattttctttttaattccaaaaaagcctactgctcttactacgcctttgcttttacgctgatgctccgttctttgggaattccctgccgggttgccgccggtttttttgtcgatccctcaaccgaagcctttggctattatcctgtcagggcggacatggcccatgcttgggcggaagtgtggttccccggatacggctggattgaatatgacccgacttctgaaaacctggcggaaggagaagagtttcgtttttcaagcgggacgccgccagagctttttgaacggctgatgaaagagatactggacaaccgcatgcgtttaaaggcaaaagaaggggaagagcctgaaagcgaaaaaggagattgggcttctcttggcagggatgctttaaatttactaagcagaaaaggacctattatcgccgtagcgttgctcttgcttttgttcctgtccatccgttttggcttcttttggctttactcaatcagaaaaaaaacccgaaaaaaagcgctctgcctctgggcccacgcaaaacgccgcatggccctcgctggctttaggaaacctgtttctgatggcgaagcggagtgggcaaaagccgcccccggcgttatgtgcaatctttacccgctttatttggatgccgccgcagcccgtttcgcccctggttttacctttgacgacagcaaaaaaatggaagcgcactaccgcattttcatcgattga

SEQ ID NO: 31188 - protein, 411 aa, Unknown
  Obtained from environmental sample
  DOMAIN (175)...(242): Transglutaminase-like superfamily
  misc_feature (1)..(411): Xaa is any amino acid
MDEATHPQNLPSRRTLLQTEEINTVRESEQEYYIVNFDSSAFIGMNMPVEIIPFETWDASSFNSAYAVVSYTSEAFPYELIRSVRGNDWSESLGLNPEEYALYTDYGGDEAIAAFAREIIGSSVSRFSGRREDSPSYWEQVQMIYDRLKFGEYRYSLKPGIAADGDQLKHFLFNSKKAYCSYYAFAFTLMLRSLGIPCRVAAGFFVDPSTEAFGYYPVRADMAHAWAEVWFPGYGWIEYDPTSENLAEGEEFRFSSGTPPELFERLMKEILDNRMRLKAKEGEEPESEKGDWASLGRDALNLLSRKGPIIAVALLLLLFLSIRFGFFWLYSIRKKTRKKALCLWAHAKRRMALAGFRKPVSDGEAEWAKAAPGVMCNLYPLYLDAAAARFAPGFTFDDSKKMEAHYRIFID

SEQ ID NO: 31189 - DNA, 987 bp, Unknown
  Obtained from environmental sample
  misc_feature (1)..(987): n is a, c, g, or t
ttgtcgcgatggatccggcgcaccggtgatattctgggttccgcgtccttacctgattttgatccgaataacgttcgcgcttcggacgagacaagccgcatgaaccgtcccgttatctgggcttacgaacccggctccgtattcaaggtttttaccctctctgcgctgatggattcgggcgctataacaaacaattccgtctttacgtgtaacggctactatgttacaagcagcggcagccgtattaattgtctcggcgctcacggcagggtaaccgcaagggaaataattattcactcctgtaacgccggcgccgcctacgcttccgatcaaataaacagcggcggtttttataaattgttaactgattttggtttcggctcccgcacaggcgccggaagccccggcgagacatccggctatcttttagggagcgaacagtggtcggaccgttcaaagcccactatcgcgatgggacaggaaatagcggtttccgcttatcagatgttacaggcggcaagcgcaatcgctaacgacggcgtgttaatctctcccagaatagtgtcgaatattatttcacccgacggccgcgttacggagtggaaacctattgaaaaacgccgtatcttaaaagcggaaaccgcgaaagacatgcgctcctacatggtggacaccgcctccggcataggcacaggctggcgcgccgcggttgaggatctgtcgcttgccgtaaaaacaggaacagcgcagataattgatcccgctacccgcagatattccgaaaccgattttatcgcaagctgtatcgcgcttctccccgccgaatcgccctcgcttattttataccttgcgatcattaaaccgcggggagagattttaggcggcagaatcgcggctcccgcgatacgcgaggctgcggaatctcttattgactatatcggtattccgcgcggacgcaatcctcaggtgaccatccgtctactgtaa

SEQ ID NO: 31190 - protein, 328 aa, Unknown
  Obtained from environmental sample
  DOMAIN (7)...(307): Penicillin binding protein transpeptidase domain
  misc_feature (1)..(328): Xaa is any amino acid
MSRWIRRTGDILGSASLPDFDPNNVRASDETSRMNRPVIWAYEPGSVFKVFTLSALMDSGAITNNSVFTCNGYYVTSSGSRINCLGAHGRVTAREIIIHSCNAGAAYASDQINSGGFYKLLTDFGFGSRTGAGSPGETSGYLLGSEQWSDRSKPTIAMGQEIAVSAYQMLQAASAIANDGVLISPRIVSNIISPDGRVTEWKPIEKRRILKAETAKDMRSYMVDTASGIGTGWRAAVEDLSLAVKTGTAQIIDPATRRYSETDFIASCIALLPAESPSLILYLAIIKPRGEILGGRIAAPAIREAAESLIDYIGIPRGRNPQVTIRLL

SEQ ID NO: 31191 - DNA, 666 bp, Unknown
  Obtained from environmental sample
  misc_feature (1)..(666): n is a, c, g, or t
atgaattttaagcggcgttttatagtgatcttttcattgttagccattttccttttatatttgatcattcattacgccgtattaataattaagggagagcttcctccgcccgcccgcccgaatacgaatcttcctgaacgtggttctattctggacagaaacggacgtttcctcgccattcaaattcgttttgccgatgtcagcgtttggcggccttcgattaaagatgttgatgttttatcaaatgaacttgcagtaatcctagatatgtctccttctgaaatccgcgaaaaaataaattcttctgaatcaaactttctttatttaagaagacgcatcgacgacggcacggcaaggcagcttaccgctattcttgaagagaaaaaaataaggggagtaatgcttcaacccattgtaggcagggtatatcccgagaaaaatatcgcgagtcaggttgtcggttttgtaggtgacagaaacgaggggatagaatacgcttttaacaatgtcttgtccggcgttgataatgacggcaaaggttccaatgttgtgttgacaattgatgtctatattcaacatattttgcggcagattgcggtaaaaacaatggaagagacacaagcggaggcggcgatttttgtcgcgatggatccggcgcaccggtga

SEQ ID NO: 31192 - protein, 221 aa, Unknown
  Obtained from environmental sample
  DOMAIN (42)...(185): Penicillin-binding Protein dimerisation domain
  misc_feature (1)..(221): Xaa is any amino acid
MNFKRRFIVIFSLLAIFLLYLIIHYAVLIIKGELPPPARPNTNLPERGSILDRNGRFLAIQIRFADVSVWRPSIKDVDVLSNELAVILDMSPSEIREKINSSESNFLYLRRRIDDGTARQLTAILEEKKIRGVMLQPIVGRVYPEKNIASQVVGFVGDRNEGIEYAFNNVLSGVDNDGKGSNVVLTIDVYIQHILRQIAVKTMEETQAEAAIFVAMDPAHR

SEQ ID NO: 31193 - DNA, 810 bp, Unknown
  Obtained from environmental sample
  misc_feature (1)..(810): n is a, c, g, or t
gtggacgacagcacaggcgaagacgatgccgatgcggatggcggaaaaagaacaggaacaggcaaaaagcgctcggcaaacaatgataaagaagcgtctctggtggatgacccaatcagaatgtacctgcgcgagattggacgcgaaagccttcttacggcggaacaggaaatagagctttccagacaaatggaggaaggcgaaaatattatcaagaatgttataaaaaaatcgggaatgattattccggagttttaccgcatagtcgaggaagcgttttccaaaaaagacctgcgcgaactgaaccttacaaaaaaagaaaccaccgagcggatggcggagcggcgccgcttgagcgcgttttacagggattccctgcgcacaattcagggcgatctgaaaaattacatcgagataaaacaacgggtgatagacaggggaggggattatctggatgacaaggatctcacaagcctgcggaagcgaatttcccggtctataaaaaatgcggcgatacatccggatgaaataaacctgttctccgaaaaattcatccaggcttccaaaaaaataaagaaatataaaaaagaacaggaacgcatagaanagcatctgaaggtatgctcccttaaggatctccgcacccttggccgtaatcttaccataaaggaagaacgcgagcggcttgaacaggagcttgggctttcatccgatgaaatcagggagagatcaggcttatcccaggtatggaaaaaaagctcagggtcatggagtatgagtttgaggagtcgattgaatatatcaatctga

SEQ ID NO: 31194 - protein, 269 aa, Unknown
  Obtained from environmental sample
  DOMAIN (36)...(72): Sigma-70 factor, region 1.2
  misc_feature (1)..(269): Xaa is any amino acid
MDDSTGEDDADADGGKRTGTGKKRSANNDKEASLVDDPIRMYLREIGRESLLTAEQEIELSRQMEEGENIIKNVIKKSGMIIPEFYRIVEEAFSKKDLRELNLTKKETTERMAERRRLSAFYRDSLRTIQGDLKNYIEIKQRVIDRGGDYLDDKDLTSLRKRISRSIKNAAIHPDEINLFSEKFIQASKKIKKYKKEQERIEXHLKVCSLKDLRTLGRNLTIKEERERLEQELGLSSDEIRERSGLSQVWKKSSGSWSMSLRSRLNISI

SEQ ID NO: 31195 - DNA, 648 bp, Unknown
  Obtained from environmental sample
  misc_feature (1)..(648): n is a, c, g, or t
gtgcacggggacgcggatcgtcctggcctgatcggaaatagaacgcgttatcgcctgccgtatccaccatgtcgcgtaggtggagaatttaaaacctttctggtactcgaatttttctaccgccttgatgaggccgatattcccttcctgtaccagatcaaaaaaatgcaggccccggttggtgtattttttcgcgatggagacaaccagcctgaggttggcctttatcagccggtctttggcgttcttcatctggaccctgccgtgaaggatctcttttgccatcagattgatatattcaatcgactcctcaaactcatactccatgaccctgagctttttttccatacctgggataagcctgatctctccctgatttcatcggatgaaagcccaagctcctgttcaagccgctcgcgttcttcctttatggtaagattacggccaagggtgcggagatccttaagggagcataccttcagatgctnttctatgcgttcctgttcttttttatatttctttatttttttggaagcctggatgaatttttcggagaacaggtttatttcatccggatgtatcgccgcattttttatagaccgggaaattcgcttccgcaggcttgtgagatccttgtcatccagataa

SEQ ID NO: 31196 - protein, 215 aa, Unknown
  Obtained from environmental sample
  misc_feature (1)..(215): Xaa is any amino acid
MHGDADRPGLIGNRTRYRLPYPPCRVGGEFKTFLVLEFFYRLDEADIPFLYQIKKMQAPVGVFFRDGDNQPEVGLYQPVFGVLHLDPAVKDLFCHQIDIFNRLLKLILHDPELFFHTWDKPDLSLISSDESPSSCSSRSRSSFMVRLRPRVRRSLREHTFRCXSMRSCSFLYFFIFLEAWMNFSENRFISSGCIAAFFIDREIRFRRLVRSLSSR

SEQ ID NO: 31197 - DNA, 825 bp, Unknown
  Obtained from environmental sample
  misc_feature (1)..(825): n is a, c, g, or t
atggaaaaaaagctcagggtcatggagtatgagtttgaggagtcgattgaatatatcaatctgatggcaaaagagatccttcacggcagggtccagatgaagaacgccaaagaccggctgataaaggccaacctcaggctggttgtctccatcgcgaaaaaatacaccaaccggggcctgcatttttttgatctggtacaggaagggaatatcggcctcatcaaggcggtagaaaaattcgagtaccagaaaggttttaaattctccacctacgcgacatggtggatacggcaggcgataacgcgttctatttccgatcaggccaggacgatccgcgtccccgtgcacatgatcgagcagataaataaagtggtgcgggaatcgcgccagcttatgcagacgctcggacgggagccgaccgatgaggaaatagccgagcgccttggctggccggccttaagggtaaagtcggtcaagaaggtagcaagggagccaatcagccttgagacgcccataggcgaggaagaggattcccttttgggtgattttatcgaggacaaggacgtggaaaatcctgcgaccctcaccgcccataccttactgcaggaagaagtcgccggcgtgctttccaccctgcccgagcgtgagcaggaagttttgaaaatgcgcttcggtctgggcgacggttattctcttaccctggaagaagtggggctgcttttcaaggtgacaagggagcgtatcaggcagattgaggcgaaagcgctgcgccgcctcaggcatccaaggcggagcctgaagctgaaggattttttggatcattga

SEQ ID NO: 31198 - protein, 274 aa, Unknown
  Obtained from environmental sample
  DOMAIN (208)...(261): Sigma-70, region 4
  misc_feature (1)..(274): Xaa is any amino acid
MEKKLRVMEYEFEESIEYINLMAKEILHGRVQMKNAKDRLIKANLRLVVSIAKKYTNRGLHFFDLVQEGNIGLIKAVEKFEYQKGFKFSTYATWWIRQAITRSISDQARTIRVPVHMIEQINKVVRESRQLMQTLGREPTDEEIAERLGWPALRVKSVKKVAREPISLETPIGEEEDSLLGDFIEDKDVENPATLTAHTLLQEEVAGVLSTLPEREQEVLKMRFGLGDGYSLTLEEVGLLFKVTRERIRQIEAKALRRLRHPRRSLKLKDFLDH

SEQ ID NO: 31199 - DNA, 435 bp, Unknown
  Obtained from environmental sample
  misc_feature (1)..(435): n is a, c, g, or t
ttggctatcacgggaactttcaaatcgctgaaagcggttttttcaattgcttcttttaattttggtaatgcgtattccatcaacgggctgtggaacgcaccggaaactggcagcggaacaactttttttgcaccctttgcgcttgctatttcgccagctttggcaacgccctcttttgagccgctgatgactatttgcccgggtgaattgaagtttgccgcaacaacaacgcctgcgctttgcgcttcgcccagcacggcgttcaaatctgcctccgagagacccagcaccgcagacatcgcacctggctttagctcgcctgcctttgccataagctcgccgcgaacacgcactaagcggagcccgtcttcaaaagaaaaaccgcctgctgcatatatcgcggaatactcgccaagcgaatgccctgccacatag

SEQ ID NO: 31200 - protein, 144 aa, Unknown
  Obtained from environmental sample
  misc_feature (1)..(144): Xaa is any amino acid
MAITGTFKSLKAVFSIASFNFGNAYSINGLWNAPETGSGTTFFAPFALAISPALATPSFEPLMTICPGELKFAATTTPALCASPSTAFKSASERPSTADIAPGFSSPAFAISSPRTRTKRSPSSKEKPPAAYIAEYSPSECPAT

SEQ ID NO: 31201 - DNA, 1488 bp, Unknown
  Obtained from environmental sample
  misc_feature (1)..(1488): n is a, c, g, or t
ttgtttgatgggcgatttacggaaagcccctggtacaagccgcggttgaagcgaacggaaaagtcgttttcgctacgccgctattttaacgcgcgtatacgcagttatgtgcttacatactcacagcagattattaacggagacaagccgctggcggttatcgcaattgacgttccgattgacaatatcatagattatgttaccgggatgcatgtcaccgatgaaggttacgggataatggtggacgaaaatttgggattaatcgctcatccggacgtgtatctgataggaaaatcgctgcggagcgtgaacagcgggctggcaagccaccttgcctattatctggaaaatagcgatgagtacattccaaataatatggcaacaaattacaagggtttggagtccattgtattttccaggaaattaagaaccggatggtatatcagccttatagcgccggtcaaccagtattacagagaagtcaggagaatggggctggcgcttaccgttcttggcattataatggcaactgttttaagcatcatcctgtggcgtattaacaattcaaagaaaaaagtggaagcggacaacaaacagaaaagcgacttcctcgcaaaaatgagccatgaaatccgcacgcctataagcgctattctgggcattaccgaaatacagcttcaggatcaagcgctttatgaagatataagggaggcattaggcagaatttacagttctggggatttactgctgggaatcatcaacgacatatgggacttttcaaaaatagaagcgggtaaaatggagctggtgcccgtcaaatactatgtctcaagcatgattaacgatgtcgtacaactgaacagaataaaaaacgaaaacaaacccattgatttcaggctggaagtggatgaaattctcccggctgaattgatcggcgtcgagcttcgcatcaaacagatattgaataacctgctctctaacgctttcaaatatacagataaaggcgagattgtgctgtcggttgccgttgaacaggcgcggggaggaggactatcgactaacgcaaccattgttttcaaggtatccgatacagggcagggcatgaggacggaacaggtacataaagtgtttgacgagtattcccgctttaatctggaggtcaaccgcacaacacagggtacaggcctgggtatgaacatcacccggaatttggtacacatgatggacggcagtatttcggtaaagagcgcgccgggcaagggaacggaagttaccgtaaagctgccgcagcggactgaaggctcaggcgccatgataggcagggaaatggccgagaccttgcggcaattcaggatgagcagcgcgtcccaaacagaaaaagcgcaaatcacctatgatcccatgccttacggaagtgtgctgatagtggatgacgtggaaaccaatttatacgttgccaagggcctcttgtcgccttacaacttctag

SEQ ID NO: 31202 - protein, 495 aa, Unknown
  Obtained from environmental sample
  DOMAIN (28)...(103): Cache domain
  misc_feature (1)..(495): Xaa is any amino acid
MFDGRFTESPWYKPRLKRTEKSFSLRRYFNARIRSYVLTYSQQIINGDKPLAVIAIDVPIDNIIDYVTGMHVTDEGYGIMVDENLGLIAHPDVYLIGKSLRSVNSGLASHLAYYLENSDEYIPNNMATNYKGLESIVFSRKLRTGWYISLIAPVNQYYREVRRMGLALTVLGIIMATVLSIILWRINNSKKKVEADNKQKSDFLAKMSHEIRTPISAILGITEIQLQDQALYEDIREALGRIYSSGDLLLGIINDIWDFSKIEAGKMELVPVKYYVSSMINDVVQLNRIKNENKPIDFRLEVDEILPAELIGVELRIKQILNNLLSNAFKYTDKGEIVLSVAVEQARGGGLSTNATIVFKVSDTGQGMRTEQVHKVFDEYSRFNLEVNRTTQGTGLGMNITRNLVHMMDGSISVKSAPGKGTEVTVKLPQRTEGSGAMIGREMAETLRQFRMSSASQTEKAQITYDPMPYGSVLIVDDVETNLYVAKGLLSPYNF

SEQ ID NO: 31203 - DNA, 744 bp, Unknown
  Obtained from environmental sample
  misc_feature (1)..(744): n is a, c, g, or t
atggacatcagttaccgtgaaattgaaaaccgcagggacactaccgagaaccgcaagctcagcaaacaggtatacacaattctctttaaggaaggggtgatcaacaattacattgattcggcggatccggaaacaattacccgcatatatacctttatcaacgatgtcaaagatctggatcctgccgacaagatggatttaagaaacaggatcaccaaaaagtatcctgattttaaattctttggtatcgaagaaaagaaaattaccaatctgggtcttttggttacccttgccaagcaccaggaaaagcagaaacaactggcgactattattgaagtggacattcctgccaattcaaaggagatagaagccgccaaacagcacggcgacctgaaagagaatgcggaatacatcgcggcaagggaaaagcagacccagcttaactcccttgcgtccagactaaacgaggaaattgacagggcgcaaatttttgatccttcgaatgtcaatacttcaagggtttcttttggcacacacgttgtgttgttaaacaaaaacagcggcaaaagggaagaatttaccatattgggtccctgggagtccgatcctgacaattatattatttcttacctttcaccttttggagggactatcttaaacaaggttgttggcgattatgttgattttaccaacaacgatgaaaagacatcgtatctgatagaaggcatttcttccgccttttga

SEQ ID NO: 31204 - protein, 247 aa, Unknown
  Obtained from environmental sample
  DOMAIN (168)...(245): Prokaryotic transcription elongation factor, GreA/GreB, C-terminal domain
  misc_feature (1)..(247): Xaa is any amino acid
MDISYREIENRRDTTENRKLSKQVYTILFKEGVINNYIDSADPETITRIYTFINDVKDLDPADKMDLRNRITKKYPDFKFFGIEEKKITNLGLLVTLAKHQEKQKQLATIIEVDIPANSKEIEAAKQHGDLKENAEYIAAREKQTQLNSLASRLNEEIDRAQIFDPSNVNTSRVSFGTHVVLLNKNSGKREEFTILGPWESDPDNYIISYLSPFGGTILNKVVGDYVDFTNNDEKTSYLIEGISSAF

SEQ ID NO: 31205 - DNA, 1014 bp, Unknown
  Obtained from environmental sample
  misc_feature (1)..(1014): n is a, c, g, or t
ttgagggagagatatgtgaaaaaattattatttgtccttatacttgtcacgcatctggtttccggggctttctgccaatccgccaattcatcagatcccattgatctggttgtacttttggacacatccgccagtatgagcgccagttataatcaaaccagcaattatctcatcgggccttttttaagggaattccttcgtataggcgatacatttcatcttatctctttttccggtactccgaaacttgaaatctcccgccggatggaaggcgtaggcgacgttgagaccattatcgccagaatacttttaatgtatccccttgatcctgaatccaatctttccggggcgttaagctttgccgagagctttacttcttcattgtccaaccgttcaaaaaagatcgtcctgatttctgacggcgatgcggagaatacgcagggtctcgttgatggaagttccgcccgcttacgggggcttggagcggatttgcagtatatcaaggcgccggttacaggcgacggcccacgctccggaagggcgactgcgcagacggcccccgcacagacagcctcgtctcaaggttctcagacaacacaaacggcacagcagggttcgcaacccgcacaggctgcgcagacaactcagggcgcacaaacgacacagggatctcaagctcaaccatcacaaacggtgcaggcaactcagaacgcacaaacaacagcgcaaggcactcaacaaccaccatcacagaccacacaaacgacacaaggcgctcaaacatcaccatcacagaccgcgcagacaactgaaagcacacagccctcgtcttccgcgcagggaactcaaggcgcttcacaggcaggaagctctcaagtttcaggatccacagccactcagggaagcggcgcgtcaggccccgctcaagtcaatcacccggacagacgccggaagggttgggccgaactctacgggcagacgggagttacagaccaaactcaggcttttctttag

SEQ ID NO: 31206 - protein, 337 aa, Unknown
  Obtained from environmental sample
  SIGNAL (1)...(27)
  misc_feature (1)..(337): Xaa is any amino acid
MRERYVKKLLFVLILVTHLVSGAFCQSANSSDPIDLVVLLDTSASMSASYNQTSNYLIGPFLREFLRIGDTFHLISFSGTPKLEISRRMEGVGDVETIIARILLMYPLDPESNLSGALSFAESFTSSLSNRSKKIVLISDGDAENTQGLVDGSSARLRGLGADLQYIKAPVTGDGPRSGRATAQTAPAQTASSQGSQTTQTAQQGSQPAQAAQTTQGAQTTQGSQAQPSQTVQATQNAQTTAQGTQQPPSQTTQTTQGAQTSPSQTAQTTESTQPSSSAQGTQGASQAGSSQVSGSTATQGSGASGPAQVNHPDRRRKGWAELYGQTGVTDQTQAFL

SEQ ID NO: 31207 - DNA, 690 bp, Unknown
  Obtained from environmental sample
  misc_feature (1)..(690): n is a, c, g, or t
ttggttattgaggatgtttctcaggaggagcctcaggtgacgccgccggatgcaggggagacgccgcaagaggagtccgtagccgaggaggtgtccgaagaggagtcgtccccgccagctgtcgaggaaacaccccaggaggagcctgttgttgaggaagtaacccaagaatcgccggttgatgacgatgaagatatagtaattcaggagcagttggttattgaggatgtttctcaggaggagcctcaggtgtcgccgccagatataggtgagccgctgcaagaagggcctgtagccgaggaagctccagaagaggagtcgtccccaccagtagtcgaggaagcgccccaggtgccgccgcctccggttatcgaagaagtgcctaaagcaccaccgcctccggttgtcgaagaagcacccaaggtgccgccagttgttaagcatacaattaataggccgcgcattgttaaagagttatttaaggaaatactcataaataacggcagaaaagaggaagattacaaggatctggtactgcaaggaaaactctccgcgcaaatgttaaagaagtatacatttgaccgcagtgatctttccagaagagcagggatagagaacgatattcttctgccttatacgataatcaccccggagatgtatgattggggcctggaaaatataaaactatga

SEQ ID NO: 31208 - protein, 229 aa, Unknown
  Obtained from environmental sample
  misc_feature (1)..(229): Xaa is any amino acid
MVIEDVSQEEPQVTPPDAGETPQEESVAEEVSEEESSPPAVEETPQEEPVVEEVTQESPVDDDEDIVIQEQLVIEDVSQEEPQVSPPDIGEPLQEGPVAEEAPEEESSPPVVEEAPQVPPPPVIEEVPKAPPPPVVEEAPKVPPVVKHTINRPRIVKELFKEILINNGRKEEDYKDLVLQGKLSAQMLKKYTFDRSDLSRRAGIENDILLPYTIITPEMYDWGLENIKL

SEQ ID NO: 31209 - DNA, 885 bp, Unknown
  Obtained from environmental sample
  misc_feature (1)..(885): n is a, c, g, or t
gtgttagttgatcacattgtaaaaaaattcgaggaagagatggcacatgattttgccaattatgactcggcaatcataaacgccaatactcaattatttaatggcaatcccgataaagcactaaaaattattgaatcggtaataaatgaagtggaaattttccgagaacttgttcttgctgacgactcggctacgatatatcgcactttctacaatgttgtagaagaagggttctatttaaaagtgatacacggagattccaagcgtaaaatttatctattgccagagcgttttttccgtgcatatttaacatacggcacaacccttgtagagttggaacgctacgatgaagctaaagctgcattgttgaaagcatgggaaatcaatccagtttatgcagatgtatattttgaactcggagagatcagcaaaatacaaaaagaccaaaaagaattttttcgcataacgcaagaagctcacaggatagcttataccaaagcgaaactggctcgctgctatcgtaattttggttattatttcatagagcaagaaaaatttgatgatgcaatagcgatgtaccatgcaagtttatcctttgatagcacgcagacaaaaaaggtactctcggaattggattacatacaaaaatataccaaaaagccgcttggcaaaaaacccagcgaagaacaaataaaggctgtgttcaagaaacacaatatacaatatggcgttgatgaaaatctttacaatttgatttactcattaggacgcgcattggaagcggaaaaagaatacgaaagagcaaaattttgtttcaaggtattgtttgagttaaccgacaaaaaagagttcaaagattttattgaaaaaatgcctaagacataa

SEQ ID NO: 31210 - protein, 294 aa, Unknown
  Obtained from environmental sample
  misc_feature (1)..(294): Xaa is any amino acid
MLVDHIVKKFEEEMAHDFANYDSAIINANTQLFNGNPDKALKIIESVINEVEIFRELVLADDSATIYRTFYNVVEEGFYLKVIHGDSKRKIYLLPERFFRAYLTYGTTLVELERYDEAKAALLKAWEINPVYADVYFELGEISKIQKDQKEFFRITQEAHRIAYTKAKLARCYRNFGYYFIEQEKFDDAIAMYHASLSFDSTQTKKVLSELDYIQKYTKKPLGKKPSEEQIKAVFKKHNIQYGVDENLYNLIYSLGRALEAEKEYERAKFCFKVLFELTDKKEFKDFIEKMPKT

SEQ ID NO: 31211 - DNA, 327 bp, Unknown
  Obtained from environmental sample
  misc_feature (1)..(327): n is a, c, g, or t
atgctgttagttagagcgattatccgccccgaaaagtcggggctcgttatgcgtgaactggccgccgccggctttcccgccgtgaccaaactcgacgtctacgggcgcggcaagcagaagggtatcaccgtaggcgaggtgcactacgacgagatacccaaggacatgctcgtcatagtctgcaacgacgaggacaaggaagatctcgtgaagatcatcatccgcacggccaagaccgaagcgaagggcgctttcggcgacgggcgcattttcgtgtcgcccgtggaatcggcatacaccatcagttccggcaagcccggactgtaa

SEQ ID NO: 31212 - protein, 108 aa, Unknown
  Obtained from environmental sample
  DOMAIN (4)...(104): Nitrogen regulatory protein P-II
  misc_feature (1)..(108): Xaa is any amino acid
MLLVRAIIRPEKSGLVMRELAAAGFPAVTKLDVYGRGKQKGITVGEVHYDEIPKDMLVIVCNDEDKEDLVKIIIRTAKTEAKGAFGDGRIFVSPVESAYTISSGKPGL

SEQ ID NO: 31213 - DNA, 486 bp, Unknown
  Obtained from environmental sample
  misc_feature (1)..(486): n is a, c, g, or t
atgcgggaaataatgtgctttatcaggatgaacaaggtcaacgacaccaagagggcgctcgccgaacacggctttccggcgttcacctgccgcaagtgcttggggcgcggaaagaataacatcgaccccgcgctgataagcgccgttctcgagtcgggcgagttgcctgtgtcgcctgtcggcgagaatctgaccgagttcacgcggctcatcgccaagcggttcttcaccctcgtcgttgacgacaaggacgtgaagaaagcggtcgacgcgattatcgccgcgaatcagaccggcaatccgggagatgggaaaattttcgtcctgccgattgcggagactttctccgtgaggacgggcgagggccacactgaaatatcaaggggggagcatgagcagcaacgatcgcgagttattgggaaccttggtgaaaagggttgcggatggtccgtcaggtactcatataaaagacaaactgctggataa

SEQ ID NO: 31214 - protein, 161 aa, Unknown
  Obtained from environmental sample
  DOMAIN (4)...(120): Nitrogen regulatory protein P-II
  misc_feature (1)..(161): Xaa is any amino acid
MREIMCFIRMNKVNDTKRALAEHGFPAFTCRKCLGRGKNNIDPALISAVLESGELPVSPVGENLTEFTRLIAKRFFTLVVDDKDVKKAVDAIIAANQTGNPGDGKIFVLPIAETFSVRTGEGHTEISRGEHEQQRSRVIGNLGEKGCGWSVRYSYKRQTAG

SEQ ID NO: 31215 - DNA, 417 bp, Unknown
  Obtained from environmental sample
  misc_feature (1)..(417): n is a, c, g, or t
atggccgaaacgttggcttttattttggcttatgcaaacaaacaaagcggcttaaacgagcaatctccgctgttgaacaatgcaattcacaggggaacattcttcgaagaaataacaaagctaatgaaactggataaaaacatgtctgataaagcttatttaatgggattgataagccatttagacgctctttacaaagtttcaatacaaaatattttggagcagttgcctctagatgcagaaatttgcaaagcccttttaaacaaagaaggaaccctgggcgaattgctctcccttgcagaagccgtggaagcagacgatataaacacaattcaacaactgctagaccgtttgcttctctctatggaagatttgaactctgcgctcacaaaagcttatgaagttagcagttcctaa

SEQ ID NO: 31216 - protein, 138 aa, Unknown
  Obtained from environmental sample
  misc_feature (1)..(138): Xaa is any amino acid
MAETLAFILAYANKQSGLNEQSPLLNNAIHRGTFFEEITKLMKLDKNMSDKAYLMGLISHLDALYKVSIQNILEQLPLDAEICKALLNKEGTLGELLSLAEAVEADDINTIQQLLDRLLLSMEDLNSALTKAYEVSSS

SEQ ID NO: 31217 - DNA, 972 bp, Unknown
  Obtained from environmental sample
  misc_feature (1)..(972): n is a, c, g, or t
atgaacttgaacgaaattctaaaaagagtgctggaacaaaaaggcgatgtttcttatgcagaagctgcccagctcgctgggtatccagacaaagacttgctctatgcggccgccaatgaaattcgggaaaaattctgcgggaatgctttggatacttgttccataataaatgcccgctctggactatgcagcgaagattgcaaatggtgcgctcaaagcgcaaagcacaaaacaggcatagaaacatatcccataaaaaatgcaaacgaggttttggactgcgccattcaaaacgatataaaaggtgtaaaacgattctctatggtcacaagcgggcgcaaagtcaatagagaagatatggaaaaattttgcgaaatgtacaagagaataaaagagaaaacaggtttaaccctttgtgcttcaatgggtttgctaggcaaagaagaattgcttatgctgcgtgatgctggagttagccgctatgagtgcaatttggaaagttcaagctcgttttttccaaatctttgcacaactcatacaagcgaagaaaaaaaaacaacgctgcgtttagctgctgagtgcggtttagaactctgttccggtggaattatagggatgggggagagcatggagcagaggattgagctagcttgcgaactgcgggaattaaatgttaaatccgttccaataaacattttaaaccccataaaaggctccgctttggaaaatgcaaagcctcttgcagaagaggaaattctaaccacaatggctgtgttccgttttgtgcttccaaatgcctttatccgctttgctggcggcagaataaatatgagcgagtctttgcaaaaaaaagccttgcaatccggcatcaatgccgctttggttggcgaccttttaaccacagtaggctcaaacacagaacaggattttgaaatgtttaaaaacttgggctttaatgcaaaacgcttttag

SEQ ID NO: 31218 - protein, 323 aa, Unknown
  Obtained from environmental sample
  DOMAIN (57)...(220): Radical SAM superfamily
  misc_feature (1)..(323): Xaa is any amino acid
MNLNEILKRVLEQKGDVSYAEAAQLAGYPDKDLLYAAANEIREKFCGNALDTCSIINARSGLCSEDCKWCAQSAKHKTGIETYPIKNANEVLDCAIQNDIKGVKRFSMVTSGRKVNREDMEKFCEMYKRIKEKTGLTLCASMGLLGKEELLMLRDAGVSRYECNLESSSSFFPNLCTTHTSEEKKTTLRLAAECGLELCSGGIIGMGESMEQRIELACELRELNVKSVPINILNPIKGSALENAKPLAEEEILTTMAVFRFVLPNAFIRFAGGRINMSESLQKKALQSGINAALVGDLLTTVGSNTEQDFEMFKNLGFNAKRF

SEQ ID NO: 31219 - DNA, 618 bp, Unknown
  Obtained from environmental sample
  misc_feature (1)..(618): n is a, c, g, or t
gtgcagaacgatttttgtcccggcggcgcgttggctgttcaggacggcgacggggtcattgccccgcttaaccggttatccgccgcttttgcctcggcggggggccgcgttgcccttacgcaggactggcatccggcggggcatgcttcctttgcttcctcgcatagcggtaaaaatccgggggatattattgaccttgacaatgttcagggacaggttctctggccggatcactgcgtacaggggactaaaggcgtggcttttcacgatgaacttgatcttgacccggcttgcttgattatccgcaaaggctttcgcaaagggctggattcctattcggctttttttgaaaatgaccgttgtacagccaccggccttgaaggcggcattaagcagatgaacattcaaacggtcatcatgggcggactggcaaccgactactgcgtgttttacagcgcgatggattgcagaagactgggtttcaaaaccattgttgtcagcgatgcggtgcgaggggtggattaccctgccgggtcggtagaaaaggcaatcgcacaaatgcgggatgcgggcatcattttttccgactctgcaaaattgttgggagaaatgcgctga

SEQ ID NO: 31220 - protein, 205 aa, Unknown
  Obtained from environmental sample
  DOMAIN (1)...(195): Isochorismatase family
  misc_feature (1)..(205): Xaa is any amino acid
MQNDFCPGGALAVQDGDGVIAPLNRLSAAFASAGGRVALTQDWHPAGHASFASSHSGKNPGDIIDLDNVQGQVLWPDHCVQGTKGVAFHDELDLDPACLIIRKGFRKGLDSYSAFFENDRCTATGLEGGIKQMNIQTVIMGGLATDYCVFYSAMDCRRLGFKTIVVSDAVRGVDYPAGSVEKAIAQMRDAGIIFSDSAKLLGEMR

SEQ ID NO: 31221 - DNA, 951 bp, Unknown
  Obtained from environmental sample
  misc_feature (1)..(951): n is a, c, g, or t
atgagctatacctcacgtttttcaaagactacacggaaaaaagtctggggaataccctgcgaacaaatcagcgcggagtggggggcgcaacgcataaaggggataagtatagcaaagacaatcaaacacgctcttttcaaaaataccaaagagacaagcctgatagacgaatttctataccccaaattgggcccaggagacctatggcaaaaagccgccgcaaaggttttggaaatgggcggggagatccatcataacagccgcgttgtaggggcggccctacgtggccgccattcttcttcggcgataacaaaaatctctttagccgacggaaaatcatttgagcccgattatatcctcagttcaatgccggttaaggatttagtgaatgcactggacgacgttccgcaaaatgtaaaagaaacggctaacggcctagtatatagagattttatcactgccggagtgctcatagataaactcgaaatcgggaatatcaaagacaactggatttacgtgcaagaaaacgatgtaaaagtggggcgcctgcaaattttcaacaactggagcgaatacatggttaaagaccccggcaaagtatggctgggcatggagtacttcgcgaacgagggcgacgaactgtggaatatgaacgaaaaagcctttgcggaactagcggtgagcgaacttgaaaaaatcggcgtcgccaagaaatccgctgttttggacagcgttgtaataaaggttccaaaagcataccccgcctacttcggtacatacaaccggttcaacgaggttagagaatggttggacagtataaataacctattcctgatagggcgcaacggaatgcacaaatacaacaatatggaccactccatgctcaccgccagagaagcggtaaacgctatttgcggcggaacgacggataagtcggttattggaagataa

SEQ ID NO: 31222 - protein, 316 aa, Unknown
  Obtained from environmental sample
  misc_feature (1)..(316): Xaa is any amino acid
MSYTSRFSKTTRKKVWGIPCEQISAEWGAQRIKGISIAKTIKHALFKNTKETSLIDEFLYPKLGPGDLWQKAAAKVLEMGGEIHHNSRVVGAALRGRHSSSAITKISLADGKSFEPDYILSSMPVKDLVNALDDVPQNVKETANGLVYRDFITAGVLIDKLEIGNIKDNWIYVQENDVKVGRLQIFNNWSEYMVKDPGKVWLGMEYFANEGDELWNMNEKAFAELAVSELEKIGVAKKSAVLDSVVIKVPKAYPAYFGTYNRFNEVREWLDSINNLFLIGRNGMHKYNNMDHSMLTAREAVNAICGGTTDKSVIGR

SEQ ID NO: 31223 - DNA, 1554 bp, Unknown
  Obtained from environmental sample
  misc_feature (1)..(1554): n is a, c, g, or t
gtgctctttgtgcttgtaaataaacaacttcgtgaaagagctacatattatttgtttgagtataaatttgaccctaaaaataagaaacaaaatattgtttacgtttgtaccgtcgctttgatagtgcttttttcgtggatttgcatttatacttccgtcgccgataaacacgaaaaaaatccgagatttgctcagtacaataaatttttagtcgatgctcttatagccggcagaacatacttaaactatggaaatccggaaaagttgcttcatgtggaacgcccttatgattactattggaagataaaacaagataacactaatctaaatctagaagaagtaaaagaaatatttgattgggcttggtacaagggaaaatactattgttatttcggaatcgttccggccgtgttcctttatgtcccgtataaaatgattaccggaaattatctgtcaaatcaagcgggggtattcttattttttgcgataaccataattttactggcggtgctatggcggtattgtgttaaaaagtatatgcgagatacacaatacgcgctctatttgctttcattcttaacattgttttttgcgagcggattgtttgcggttataagatggcccgttttttactgtatagtgcaagcggcaggattcatgtttaccgttgccggggtcttattgttgcttaaatcggttgaaaatgaaaaaataaatcatcttaaattattttgcgcttgtttgtgtttggcgttggtcttcggctgtcgccccaatatggggctcgcctcgctctttgttcctattgttttgtggaaatatagaacttggaagttagctgcgttcgccatgctcccttacgtaattgtcgcaattcctttatgtttgtacaattatgtccgattcgggtcgatttttgagtttggggtaaattattgggtgacaagctttgatataaaggcaatatctcaacagagcgtactcaccaagatgtttagagtatttacatgttccgcgaattatcttttttgtccgctagaactttcgttgaagtttcctttcgttacgccattgagtgggaaaggcgtagaaattactaatgggtgcttattgtattccaacggcacaatgggagtaatcaattttccgatagtcttttgcctatttcatctattcaaaaacatttttaacaaaaataaaccgaaaatatattatctattatcggcgtttttagttagcgccatagtcataatcggtttaaattctttgttaaatagtgtctcgtttagatatctgtatgattacatgctttttatcgttcttccatcgcttttctgcgcatattattggtgtcaaagtataattgatggggggccggcccgtcaagtccccacgtttgtcggtcctacggttcgtctgagcgtggcgtatgccttaatagccgcgagtatatttgttgggacgtttctttttgtatcaacacaaaacatatattccaatcctacgttataccgttatctcgaaacggctctgggagttcttagaaatgtttaa

SEQ ID NO: 31224 - protein, 517 aa, Unknown
  Obtained from environmental sample
  misc_feature (1)..(517): Xaa is any amino acid
MLFVLVNKQLRERATYYLFEYKFDPKNKKQNIVYVCTVALIVLFSWICIYTSVADKHEKNPRFAQYNKFLVDALIAGRTYLNYGNPEKLLHVERPYDYYWKIKQDNTNLNLEEVKEIFDWAWYKGKYYCYFGIVPAVFLYVPYKMITGNYLSNQAGVFLFFAITIILLAVLWRYCVKKYMRDTQYALYLLSFLTLFFASGLFAVIRWPVFYCIVQAAGFMFTVAGVLLLLKSVENEKINHLKLFCACLCLALVFGCRPNMGLASLFVPIVLWKYRTWKLAAFAMLPYVIVAIPLCLYNYVRFGSIFEFGVNYWVTSFDIKAISQQSVLTKMFRVFTCSANYLFCPLELSLKFPFVTPLSGKGVEITNGCLLYSNGTMGVINFPIVFCLFHLFKNIFNKNKPKIYYLLSAFLVSAIVIIGLNSLLNSVSFRYLYDYMLFIVLPSLFCAYYWCQSIIDGGPARQVPTFVGPTVRLSVAYALIAASIFVGTFLFVSTQNIYSNPTLYRYLETALGVLRNV

SEQ ID NO: 31225 - DNA, 318 bp, Unknown
  Obtained from environmental sample
  misc_feature (1)..(318): n is a, c, g, or t
ttgattttagagtataaataccctgaaaatgccagtaaaatatccggcataccggaaaactggaacaggtcagattataataaagggcatcgtgcgttaaaagcgttaacatatcttgttgagaatattaaatcaaaatatattattatttcgtttaattcagaaggctttatcagcctggatgaaatgaaaaacatgctacagaaaattggcaagattgaaatactggaaacaaaatataatacttttcgaggatgcaggaatttaaataatcgtgatattcatgtaaaagaatatttgtacttggtggagaaatag

SEQ ID NO: 31226 - protein, 105 aa, Unknown
  Obtained from environmental sample
  misc_feature (1)..(105): Xaa is any amino acid
MILEYKYPENASKISGIPENWNRSDYNKGHRALKALTYLVENIKSKYIIISFNSEGFISLDEMKNMLQKIGKIEILETKYNTFRGCRNLNNRDIHVKEYLYLVEK

SEQ ID NO: 31227 - DNA, 609 bp, Unknown
  Obtained from environmental sample
  misc_feature (1)..(609): n is a, c, g, or t
gtggaaaaacgcccggctttcgcgcccctgcccggcgcggttcgtgaaacagccgttccctacggcgaagcccgttacgcgggcaaagcctttggcctttttatccttattgaatggggggaaaagctctacatcatagaccagcacgctgcccatgaacggatactctacgaccgttttctctcgcagccgattcccaaacaggaattgcttgcgcccattccctttagcgccgaaagcggcgacgaggacagttttcttgaggcaaagcgggaagagttgcgcggcctcggcgtggaaatcgaaaaggacggaaacggctggcgcatcgaagccctgcccgcggactggcggctgggcgacggtgaaacagtaaaggaaattctggaactgcgcaacgcgggtgaaaacatggccgagcactgggccgccaccctctgttgccatcaggcgataaaggacggcgattatctggacgacgcaagcgcccttagcctgggccgccaggccctggaactccccgacccccgctgtccccacggccgccctgtgtggaccgaaattagccgggaagcgctgttcaaggcggtacggcgggaaaaagggtaa

SEQ ID NO: 31228 - protein, 202 aa, Unknown
  Obtained from environmental sample
  misc_feature (1)..(202): Xaa is any amino acid
MEKRPAFAPLPGAVRETAVPYGEARYAGKAFGLFILIEWGEKLYIIDQHAAHERILYDRFLSQPIPKQELLAPIPFSAESGDEDSFLEAKREELRGLGVEIEKDGNGWRIEALPADWRLGDGETVKEILELRNAGENMAEHWAATLCCHQAIKDGDYLDDASALSLGRQALELPDPRCPHGRPVWTEISREALFKAVRREKG

SEQ ID NO: 31229 - DNA, 330 bp, Unknown
  Obtained from environmental sample
  misc_feature (1)..(330): n is a, c, g, or t
atggccgagattcccaagggagaaaagatggcgaagacaagttccgcaactcacgcgaatgtgcgttccaaaacggaatccggtaaatcaggcggcctgaaaaattttgaggaacggctggagaaacttgaaactctgggcgagcggattcgcagatccgatattcccctggacgaagccctcaaggcttttgaggaggggatcaaacttgcccgaactctggaaaaggaccttgaaaaaattgaaagccggatcgagattctgatgaacagcagtgaagcgccgccggatgaatctcctgagctggaactttttaagaccgatgactga

SEQ ID NO: 31230 - protein, 109 aa, Unknown
  Obtained from environmental sample
  DOMAIN (34)...(97): Exonuclease VII small subunit
  misc_feature (1)..(109): Xaa is any amino acid
MAEIPKGEKMAKTSSATHANVRSKTESGKSGGLKNFEERLEKLETLGERIRRSDIPLDEALKAFEEGIKLARTLEKDLEKIESRIEILMNSSEAPPDESPELELFKTDD

SEQ ID NO: 31231 - DNA, 786 bp, Unknown
  Obtained from environmental sample
  misc_feature (1)..(786): n is a, c, g, or t
ttgtcgataaaagcctggcggcagagcgtggcttcgcttccctcccttttcaggaatcgttttcgcgcggggatgctgtcaaaaagattcaacgcccggacggtcgcgcccctggtccgccgggtcctctccggctgcggcagatcattcccgccgggcccggtctgtagccgccacgcttccctgccgtccgtgctgcaaatgatttcaagccgggcaaccgcggcggcagcagccagggcttcgccccggaagccgagtgttacggatgtgttgaggtcttccagcgagcgtatcttgcttgtggcgtgggtaaggacgcacagttccaaatcttcccggcccatgccttcgccgtcgtcggctacttcagcctttttgatgcccccctcttctatggagacttcaatgttggcggcccccgcgtcaatggcgttgtcaaggaactcccgaatcagcgctgctggccggtcaattacttctccggcggctatccgcctggcttcctccggcggcaatatcctgatgcggttttgcggcatttcagtcatcggtcttaaaaagttccagctcaggagattcatccggcggcgcttcactgctgttcatcagaatctcgatccggctttcaattttttcaaggtccttttccagagttcgggcaagtttgatcccctcctcaaaagccttgagggcttcgtccaggggaatatcggatctgcgaatccgctcgcccagagtttcaagtttctccagccgttcctcaaaatttttcaggccgcctga

SEQ ID NO: 31232 - protein, 261 aa, Unknown
  Obtained from environmental sample
  misc_feature (1)..(261): Xaa is any amino acid
MSIKAWRQSVASLPSLFRNRFRAGMLSKRFNARTVAPLVRRVLSGCGRSFPPGPVCSRHASLPSVLQMISSRATAAAAARASPRKPSVTDVLRSSSERILLVAWVRTHSSKSSRPMPSPSSATSAFLMPPSSMETSMLAAPASMALSRNSRISAAGRSITSPAAIRLASSGGNILMRFCGISVIGLKKFQLRRFIRRRFTAVHQNLDPAFNFFKVLFQSSGKFDPLLKSLEGFVQGNIGSANPLAQSFKFLQPFLKIFQAA

SEQ ID NO: 31233 - DNA, 1047 bp, Unknown
  Obtained from environmental sample
  misc_feature (1)..(1047): n is a, c, g, or t
atgaaaacgatttattacacgctgcctgtaactgatacaaacggtaaagtaatcggagttttcagaatttcatttacaattccgggatttggaagacgggtttctcctattatcccgccgtttataattttttcgttaatagttgccgccgccgctttttcagcaattttggcatactcaagttcgcttgcttcatctatcggcaggctggttaatattacgcaggcgggagcgtcgctgctgtcaggccccgaagcgggattcccagttgcgccggaatttcaaagtctcgaaaaagctctgcgctcggtaactgcggaattaaattcgcgtattgaacaggcaaaagccgaaggaaaccgcctggaggcgattcttaacgggatgtcggaggctgtgtttgcggcggattccgctcttaaactgcatcttgtaaatccccgagcaagagagcttttttttcttggggaccgcgatgtaaataaactctacctgcttgaagcgactcattccgcagaactggaagacgccgcgaaaaaagcgctttcagctaacacggctttggagatggaactgactctccgtaccggcgctgaacagaactttcaggtttttgcagcgcctcttcacaattcaaacggaggaggagttgttttggttttacaggacattacacggcttgtaaaacttgaaagaatacgcaaagattttgtcgcaaatgtatcgcatgaacttcgcactccgatacagcttgttaaaggtttctctgaaactttactggatattgccgatgattccgttttaaaaaacgaagataaaaaacagatggttcattttatggagattatccgtaaaaacgccggtataatggaaaaccttaccaacgatcttctggtactcgctgatattgagaataattcttcaaacgggcgtgaaacggaagaagtcaggattaaatccctcattgacgaggctatttcttccgttgaaccgcaggcgaaaagaanacaaattgaaaattattacagactgccccggaagaattaa

SEQ ID NO: 31234 - protein, 348 aa, Unknown
  Obtained from environmental sample
  DOMAIN (120)...(224): PAS fold
  misc_feature (1)..(348): Xaa is any amino acid
MKTIYYTLPVTDTNGKVIGVFRISFTIPGFGRRVSPIIPPFIIFSLIVAAAAFSAILAYSSSLASSIGRLVNITQAGASLLSGPEAGFPVAPEFQSLEKALRSVTAELNSRIEQAKAEGNRLEAILNGMSEAVFAADSALKLHLVNPRARELFFLGDRDVNKLYLLEATHSAELEDAAKKALSANTALEMELTLRTGAEQNFQVFAAPLHNSNGGGVVLVLQDITRLVKLERIRKDFVANVSHELRTPIQLVKGFSETLLDIADDSVLKNEDKKQMVHFMEIIRKNAGIMENLTNDLLVLADIENNSSNGRETEEVRIKSLIDEAISSVEPQAKRXQIENYYRLPRKN

SEQ ID NO: 31235 - DNA, 714 bp, Unknown
  Obtained from environmental sample
  misc_feature (1)..(714): n is a, c, g, or t
ttgcgccttgccttcgcggggattcaccgcggggaagagccgccaatcacaggggccgggggatcgggaacaatttttgtttccggctgcaacctgggctgtacgttttgccagaattaccagctttccaaagggggattcggccgggccgtttcgcgggaggaatttgctgaaatttgcctaactctccaggaacacggcgcggagaacatcaatgttgttacagggagccacgctgccagagcccttgccctgggaattacggcagcccgggaaaaggggctttccattcctgttctgtggaactcatccggttatgacggtttggaaagccttgaaatattaaaagaccttgtcgatgtttacctcccggaccttaaaaccctggacgtggaaatagcaaccaggttttttaacgctccggattatggcgatcaggccgcagccgctattttgaagatgatggaataccgggaactacggttggaagaaactttgctttcaggcgtaatggtgcgccatctggtgatccccggctttctggagagtacccgtcaggttcttgcctggtttgccgaacactgtgcgggcagggccttgctttccctgatgacccagtacacgcctgtggggcaggacgccaaaacccctgggcgtttcgtttcagaggatgaatatgatgctgtcctttccatgtggacgaatacggaatag

SEQ ID NO: 31236 - protein, 237 aa, Unknown
  Obtained from environmental sample
  DOMAIN (24)...(191): Radical SAM superfamily
  misc_feature (1)..(237): Xaa is any amino acid
MRLAFAGIHRGEEPPITGAGGSGTIFVSGCNLGCTFCQNYQLSKGGFGRAVSREEFAEICLTLQEHGAENINVVTGSHAARALALGITAAREKGLSIPVLWNSSGYDGLESLEILKDLVDVYLPDLKTLDVEIATRFFNAPDYGDQAAAAILKMMEYRELRLEETLLSGVMVRHLVIPGFLESTRQVLAWFAEHCAGRALLSLMTQYTPVGQDAKTPGRFVSEDEYDAVLSMWTNTE

SEQ ID NO: 31237 - DNA, 681 bp, Unknown
  Obtained from environmental sample
  misc_feature (1)..(681): n is a, c, g, or t
atggaggagatagaaaacctcaatgcaaagattaaggaacaaagcgcccagataagcggggcttcttcggctattaccgaaatggttgccaatattaattcaattgacagcaacaccaccttggttaacaaccgaatgctggaactggttaaatcgtctcaggaagagaaaaaacggctttcggaaacagcggaagctaccaaacagattgaaacggattctttggccctggcagaaatgaacaaggttatctccaatgtggccacacaaacgaatctgttgagtatgaacgccgcaattgaggccgcccacgccggagaagcgggacgcggtttcgcggtggtggcgcaggaaattcgcaaactggcggaaactaccgcccaacaatccaaaagttcacaggacaccatcgtttccttgctggagcgtattaaaagaatagccgtagcttcaggccatgtggaagaatctttcggcaatatgctcgatatgatccacgaggttgaaggcatcaccgcaaaccttaaaaatgccactgaagaacaaggtaagggttccaatcagcttctttcgtcaatttcggtcattaactccattacccacgatgtggaaaccggcgccctgactatgaattccagcgcctccgaggcggtagcggcctgtcgtaatcttacgaattaa

SEQ ID NO: 31238 - protein, 226 aa, Unknown
  Obtained from environmental sample
  DOMAIN (9)...(224): Methyl-accepting chemotaxis protein (MCP) signaling domain
  misc_feature (1)..(226): Xaa is any amino acid
MEEIENLNAKIKEQSAQISGASSAITEMVANINSIDSNTTLVNNRMLELVKSSQEEKKRLSETAEATKQIETDSLALAEMNKVISNVATQTNLLSMNAAIEAAHAGEAGRGFAVVAQEIRKLAETTAQQSKSSQDTIVSLLERIKRIAVASGHVEESFGNMLDMIHEVEGITANLKNATEEQGKGSNQLLSSISVINSITHDVETGALTMNSSASEAVAACRNLTN

SEQ ID NO: 31239 - DNA, 402 bp, Unknown
  Obtained from environmental sample
  misc_feature (1)..(402): n is a, c, g, or t
ttggaacccttaccttgttcttcagtggcatttttaaggtttgcggtgatgccttcaacctcgtggatcatatcgagcatattgccgaaagattcttccacatggcctgaagctacggctattcttttaatacgctccagcaaggaaacgatggtgtcctgtgaacttttggattgttgggcggtagtttccgccagtttgcgaatttcctgcgccaccaccgcgaaaccgcgtcccgcttctccggcgtgggcggcctcaattgcggcgttcatactcaacagattcgtttgtgtggccacattggagataaccttgttcatttctgccagggccaaagaatccgtttcaatctgtttggtagcttccgctgtttccgaaagccgttttttctcttcctga

SEQ ID NO: 31240 - protein, 133 aa, Unknown
  Obtained from environmental sample
  misc_feature (1)..(133): Xaa is any amino acid
MEPLPCSSVAFLRFAVMPSTSWIISSILPKDSSTWPEATAILLIRSSKETMVSCELLDCWAVVSASLRISCATTAKPRPASPAWAASIAAFILNRFVCVATLEITLFISARAKESVSICLVASAVSESRFFSS

SEQ ID NO: 31241 - DNA, 873 bp, Unknown
  Obtained from environmental sample
  misc_feature (1)..(873): n is a, c, g, or t
ttgaaggcaagtatggcgatgattgacaaactgacattagctgaaaaaacccaaatactccttgaatatcctaaaatactggaaaacgccgccggcttcgcggtaagcgaagaagccgcgattattattaaaaattcaaaaccattttatgatacctgcaaagcggcggaaatcaaagaaattgtttccgccgtttacgccctgataaaatcgcgcaatgacgaaccgcgttcatggctgccttcaatcgggtttcttcttccgaaaactgaaacgcccggagcggtcctggctcttgacgaagctctggcaatagggctttttatcgagcgcgcggcggaattaacaaactggatcattaaagaccggggcggcgaagaacaggaaacaaacggcagacagaagcttcttgccatgcttaatgaagaagccttgcccaacttaagcgctgccgccgctgaaattttcaaagtgattgacagggaaggcggcatgcgcgatcttcccgcgttacgcgcaataagaaagcgcataggctcgcttgaaaaagagctgaaaacggccgttttgcgctataccgcgcaggatgaatacaagcggatgcttcaatcgcctcttccttcgcaaagggacggcaggacagtgctggctgtaaaagccaattacaggggacggatcagcggaattgtgcatgaagtttcttccagcggacagacggtttttatagagccccttgacgtagtggaaaaaaacaacgatatcctgatggaaaaaagaaaccttgacgcggaagtgcaaaaaatcctgcgcgaactacggaaaaaatcaacgcttacgccgaaaattaaaaacattgcacacaacaattattga

SEQ ID NO: 31242 - protein, 290 aa, Unknown
  Obtained from environmental sample
  misc_feature (1)..(290): Xaa is any amino acid
MKASMAMIDKLTLAEKTQILLEYPKILENAAGFAVSEEAAIIIKNSKPFYDTCKAAEIKEIVSAVYALIKSRNDEPRSWLPSIGFLLPKTETPGAVLALDEALAIGLFIERAAELTNWIIKDRGGEEQETNGRQKLLAMLNEEALPNLSAAAAEIFKVIDREGGMRDLPALRAIRKRIGSLEKELKTAVLRYTAQDEYKRMLQSPLPSQRDGRTVLAVKANYRGRISGIVHEVSSSGQTVFIEPLDVVEKNNDILMEKRNLDAEVQKILRELRKKSTLTPKIKNIAHNNY

SEQ ID NO: 31243 - DNA, 876 bp, Unknown
  Obtained from environmental sample
  misc_feature (1)..(876): n is a, c, g, or t
ttgacgcggaagtgcaaaaaatcctgcgcgaactacggaaaaaatcaacgcttacgccgaaaattaaaaacattgcacacaacaattattgaactggaatgtttaagaacaagggcaaaatattcgcttgcggtaaaggggcatttttcgaaagacgcaaaaggcggtcatgaagcgcttattcttaaaaaagcgcgtcacccgttgctgaaaaaagcggttcccatcaatatagaaatgaaaaatactacccgcaccctgatcattacaggcccgaacacgggcggaaagaccgtagccttaaaaaccttaggccttcttgccatgatgaaccagagcgctcttgccctgcctcttgaagaaggaagcgtccttcccatgtttgacggaatatacgccgacataggcgacgagcagtccatcgaccagtccctttcaactttttccgcgcacatcacaaaaatttccgcgattaccgccttcgcgacggaaaattcccttgttctccttgacgaacttggttccggcacggatccggaagaaggcggcgcaatagcaatggcggtgcttgattatctgatagaaaaaaattcgcgtatgatagttacaactcatcacgggattttaaaaaattacggctacacaaggcagagcgtggaaaacgcttcggttgaatttgacgctcagactctttcgcccacctacaaaataatcaacgggcttcccggagaaagcagggcgatagacattgccgcatccaacggccttgacggcgcaattgtaaacagcgcgagaaaatacattgatgaaaaaaaatcggacgtttcgggattgatcaaaggccttaacaaaaacaaagggagcttatcgggatga

SEQ ID NO: 31244 - protein, 291 aa, Unknown
  Obtained from environmental sample
  DOMAIN (44)...(274): MutS domain V
  misc_feature (1)..(291): Xaa is any amino acid
MTRKCKKSCANYGKNQRLRRKLKTLHTTIIELECLRTRAKYSLAVKGHFSKDAKGGHEALILKKARHPLLKKAVPINIEMKNTTRTLIITGPNTGGKTVALKTLGLLAMMNQSALALPLEEGSVLPMFDGIYADIGDEQSIDQSLSTFSAHITKISAITAFATENSLVLLDELGSGTDPEEGGAIAMAVLDYLIEKNSRMIVTTHHGILKNYGYTRQSVENASVEFDAQTLSPTYKIINGLPGESRAIDIAASNGLDGAIVNSARKYIDEKKSDVSGLIKGLNKNKGSLSG

SEQ ID NO: 31245 - DNA, 393 bp, Unknown
  Obtained from environmental sample
  misc_feature (1)..(393): n is a, c, g, or t
atgattatatccgcactgttaatcgacatccgcaaccgcttatcgaatgctcttgatgattcgacgcttgccgacaacgaggcggcattgataatcgaacaatccttgggtatcaccaaagaacggatatatttggatgattctatccgtattaataccgatgatatcgaccgtatcaatactgtcgtagaacgccggcggtcgggcgaacctttgcagtatattttcggcaaggcctatttttatgacagggaattcttcgtcaataacgatgtattgataccgcggccggacacggaaacgttggtcgataccgtcatcaatacagaaaagaaatctccggcgatgtttgccgacatcggcacgggcagcggaatcttagcggcggtatga

SEQ ID NO: 31246 - protein, 130 aa, Unknown
  Obtained from environmental sample
  misc_feature (1)..(130): Xaa is any amino acid
MIISALLIDIRNRLSNALDDSTLADNEAALIIEQSLGITKERIYLDDSIRINTDDIDRINTVVERRRSGEPLQYIFGKAYFYDREFFVNNDVLIPRPDTETLVDTVINTEKKSPAMFADIGTGSGILAAV

SEQ ID NO: 31247 - DNA, 588 bp, Unknown
  Obtained from environmental sample
  misc_feature (1)..(588): n is a, c, g, or t
gtgaccgtgcgcggcgagaccgctacgggcgcgctcaaatacgagtcgggcgtccaccgcgtgcagcgcgtcccgctgacggagcttcaggggcgggtgcacacctcggcggcgtcggtggcgtctttcccggaggcggacgagttcgaggtgcagataaacccgaacgacctgcgcatagatttatattgctcaagcggcccgggagggcaatcggtaaacacgacgtattcggcggtgcggataatgcacgtgcccaccgggctgatagtcacttgtcaggatgagaaatcgcagcataaaaataaggcgaaggcgatgaaggtgctgcagacgaggctatacgaattggaatcggccaaggtggaggctgaggagtcggcggcgaggaagagcatggtgagcaccggcgacaggagcgcgaagatccgcacatacaatttcccgcagaacagggtgacggatcaccggataaatttgacgctgtacaatttggacaagttcataaacggggatatggacgagatggttgaggcgctggctatcgcggatttgaacgagcgggttaagaacagcagcgaggggtga

SEQ ID NO: 31248 - protein, 195 aa, Unknown
  Obtained from environmental sample
  DOMAIN (44)...(157): Peptidyl-tRNA hydrolase domain
  misc_feature (1)..(195): Xaa is any amino acid
MTVRGETATGALKYESGVHRVQRVPLTELQGRVHTSAASVASFPEADEFEVQINPNDLRIDLYCSSGPGGQSVNTTYSAVRIMHVPTGLIVTCQDEKSQHKNKAKAMKVLQTRLYELESAKVEAEESAARKSMVSTGDRSAKIRTYNFPQNRVTDHRINLTLYNLDKFINGDMDEMVEALAIADLNERVKNSSEG

SEQ ID NO: 31249 - DNA, 405 bp, Unknown
  Obtained from environmental sample
  misc_feature (1)..(405): n is a, c, g, or t
gtgatgcggctggcggacagggccgaggaatttggcatgagccaccttgcccttaccgaccacggcaatatgttcggggcgatggaatttattgcggcctgcggtcataaaaaacgaaaaaaccccgtaaaaccgataatcggatgtgaagcctatgtttcccccggctcgcgccatgataaaaaaggttctgaaaacgaaaataactattaccaccttgtccttcttgcctataaccgtaccggctattttaaccttgtaaaattatgctcctacgcgtacacggaaggtttttattacaggccccggatagacgaggagcttttatccaaataccacgaggggcttatcgcgctttccgcctgcgcctcaggggaaattcccaggctatattcaggcgggtaa

SEQ ID NO: 31250 - protein, 134 aa, Unknown
  Obtained from environmental sample
  DOMAIN (1)...(133): PHP domain
  misc_feature (1)..(134): Xaa is any amino acid
MMRLADRAEEFGMSHLALTDHGNMFGAMEFIAACGHKKRKNPVKPIIGCEAYVSPGSRHDKKGSENENNYYHLVLLAYNRTGYFNLVKLCSYAYTEGFYYRPRIDEELLSKYHEGLIALSACASGEIPRLYSGG

SEQ ID NO: 31251 - DNA, 582 bp, Unknown
  Obtained from environmental sample
  misc_feature (1)..(582): n is a, c, g, or t
ttggaaaaggacgattatatcgcgcatgatattcttctctgtattggaaccggaaaggtacgcaccgaagaaaaacgaaaaaaatattacggggatcagttttattttaagacaggcgacgagatggcggaaattttcgccgattatcccgaggcggttgaaaatacggtaaaaatcgcgcggcggtgtaacgcggatgtaccgaaaataaagaccgaagaattaccgcagtatctgcctgaatttgaaatccccgaaggctttagtgagccaagtgaatacttaaggcatcttgcagccgaagggcttgagaagcgttatgcgaaagtaaaagaaagcgatttaaacaaatgggaagaaataaaaaaaagaaaagactatgaactggatacgataatcaacatgggttttaccggatactttcttattgtcgcggacttcattaattacgcaaaggggcaaaatattcccgtaggccccggacgcggctccggagccggttccatcgtggcttactccctgcgcattaccgatatcgatcccttaaagtatggtcttttattgaacgcttttacactctag

SEQ ID NO: 31252 - protein, 193 aa, Unknown
  Obtained from environmental sample
  DOMAIN (34)...(193): Bacterial DNA polymerase III alpha subunit
  misc_feature (1)..(193): Xaa is any amino acid
MEKDDYIAHDILLCIGTGKVRTEEKRKKYYGDQFYFKTGDEMAEIFADYPEAVENTVKIARRCNADVPKIKTEELPQYLPEFEIPEGFSEPSEYLRHLAAEGLEKRYAKVKESDLNKWEEIKKRKDYELDTIINMGFTGYFLIVADFINYAKGQNIPVGPGRGSGAGSIVAYSLRITDIDPLKYGLLLNAFTL

SEQ ID NO: 31253 - DNA, 903 bp, Unknown
  Obtained from environmental sample
  misc_feature (1)..(903): n is a, c, g, or t
atgatatctagactcttttttgccgtctttttgactattttatcagccattacctcagcggcgcagacccgggaaaacaggttttatatcgatttacaaaaatatccgctttacattaaagcgggttttaaccattcagacgccgtttctccctatttacaggacggctcatggctggttagggaacaatggtacggagccgtaatccgcaggcttggtttgccgggaataccaaaacgtatctttctgtggccgcggggaaagccggaaaaagaatggacttttacaattccatttacaatagacgcatccttattgaacaatgacgctccgataattccatgtttgtatttagcgactataggcatcaactgggaaatatatctgaacggaactttgctaaaaaaggaaatgcatttggcaaacgggcatatcaaagaacagcactacgagcgcaatgtaatagttcccataaacaacaatcttctgcaaaaaggcgataatgttcttgtgttccgcattgtcggagatccaacagattatacaacaggttttacatataaatcgccgtattatcttgccgactatgattttataacgcgtaaacataacgagactgcccaaataattttaatatcaatacttgccatactggggatataccacttcgtgttttttgccattttccgcgaaaaccgatacagcttagcatgcggattttttactatagaaatgagtttgtattatttattgcggactagctggatacatcanataatccccaataccgctgtggtggtcaagctggaatactttacagtttatttcataatactggctcttatggttatacggacaatctttgcaatggtcattattcaaacaagcgctattctattgtaa

SEQ ID NO: 31254 - protein, 300 aa, Unknown
  Obtained from environmental sample
  SIGNAL (1)...(20)
  misc_feature (1)..(300): Xaa is any amino acid
MISRLFFAVFLTILSAITSAAQTRENRFYIDLQKYPLYIKAGFNHSDAVSPYLQDGSWLVREQWYGAVIRRLGLPGIPKRIFLWPRGKPEKEWTFTIPFTIDASLLNNDAPIIPCLYLATIGINWEIYLNGTLLKKEMHLANGHIKEQHYERNVIVPINNNLLQKGDNVLVFRIVGDPTDYTTGFTYKSPYYLADYDFITRKHNETAQIILISILAILGIYHFVFFAIFRENRYSLACGFFTIEMSLYYLLRTSWIHXIIPNTAVVVKLEYFTVYFIILALMVIRTIFAMVIIQTSAILL

SEQ ID NO: 31255 - DNA, 837 bp, Unknown
  Obtained from environmental sample
  misc_feature (1)..(837): n is a, c, g, or t
atgcctgaggtttttcaaactgagcgtatcttcccgcatggaagcaaaaaagaaaaccgtctcttttggctgattccctctcctgaaatctttatgaaaaaaataatagcgcggcacaatgtaaatgtctatcaaatatgtaaatgtttccgcaacggcgaatcttgcggcgctttgcacaacagcgaatttaccatgcttgagtattacacaatggacgcaaactacatggattctctcgcgctgacagaagaactgttttcgcgcttagccaaagattccgtcattaccgccggcggctttgaacgcattaccgtatcggacgcattcgcaaaatgggcggggtttgatctttttaagacggtaaaagaaggcgcacccgctatggaagagcaagcccgcaaattgggacttgaacctatgccggacatgacggtacatcagctttacgatttaatttttattcactccgtagaaccgcaattaaaagcggaaaaaccaatcgctttgcttgattatcccgcgttcgtcccatgcctcgctaaaaaatcgccaaacggacaaaccgtagaacgctgggaattgtactacaacggcatagaacttgcgaattgctattcggaagaaaacgatccgcaagccgtaaaggaattttttataagcgaagaagcggagaaaaataaaaccgctgttgtaaaacacaaaattgataatgattactggaaaatgtttaaaaactttcctaactgttccggcgttgcgatagggctcgacagaatgattatggcgcttaccggaaaaacaactatcgacggggtactgccttttattgtttaa

SEQ ID NO: 31256 - protein, 278 aa, Unknown
  Obtained from environmental sample
  DOMAIN (1)...(277): tRNA synthetases class II (D, K and N)
  misc_feature (1)..(278): Xaa is any amino acid
MPEVFQTERIFPHGSKKENRLFWLIPSPEIFMKKIIARHNVNVYQICKCFRNGESCGALHNSEFTMLEYYTMDANYMDSLALTEELFSRLAKDSVITAGGFERITVSDAFAKWAGFDLFKTVKEGAPAMEEQARKLGLEPMPDMTVHQLYDLIFIHSVEPQLKAEKPIALLDYPAFVPCLAKKSPNGQTVERWELYYNGIELANCYSEENDPQAVKEFFISEEAEKNKTAVVKHKIDNDYWKMFKNFPNCSGVAIGLDRMIMALTGKTTIDGVLPFIV

SEQ ID NO: 31257 - DNA, 915 bp, Unknown
  Obtained from environmental sample
  misc_feature (1)..(915): n is a, c, g, or t
atgggaaacgacagagtgcgttttcttgccaaaatctccgtggatattaacgtggaaaaaaagcaagtttactttgccttggccgattacggcttgacttatagggataccatcattgaggaagatgtgtgggaagatgtccgcgacaaccttttgcacggcgaaacttggggtatggtcgaaattggataccgatcacccgacgaagccgatattctatgggaggacaccaaagatggggcgaaaggcaagggggcgaataaaggcaaaataaagctgacagcgttcaaaccgttctgcccatacacagttgatattgagtatttcaaagatgcacgaaaagagttcacaacttccgagtggatagatgttttgcttggtgcggttgactacaacgcaagcggatatgccgacgaggaaactaaactcacaatgcttactcgtttgcttccttttgttgaaaaaaggttaaacctaattgagcttgctccgaaaggtacggggaaatcgtatctgtttgggcgtgtaagccggttcggagcattgcctaccgacagcaagataagtcgtgctacacttttctaccataagtctaagcataccgaaggcttggtcgccaacaatgactttgtcgtgcttgatgagatacaaacgatacagttcggcgatgtagatgaaatgcgtactgttttgaaagcgtaccttgaatccggaattatcaagattgattcatacgaacgcgccgccgatgccggctttatactttgtgggaacataagcaaagaaactatggacgagggcggattttccgatatgtttagggagttgcctaagtcatttcacgagtctgccttgattgaccgtttcacggcttttattaaggttggaatattccgccgaatgatgaggacttaa

SEQ ID NO: 31258 - protein, 304 aa, Unknown
  Obtained from environmental sample
  misc_feature (1)..(304): Xaa is any amino acid
MGNDRVRFLAKISVDINVEKKQVYFALADYGLTYRDTIIEEDVWEDVRDNLLHGETWGMVEIGYRSPDEADILWEDTKDGAKGKGANKGKIKLTAFKPFCPYTVDIEYFKDARKEFTTSEWIDVLLGAVDYNASGYADEETKLTMLTRLLPFVEKRLNLIELAPKGTGKSYLFGRVSRFGALPTDSKISRATLFYHKSKHTEGLVANNDFVVLDEIQTIQFGDVDEMRTVLKAYLESGIIKIDSYERAADAGFILCGNISKETMDEGGFSDMFRELPKSFHESALIDRFTAFIKVGIFRRMMRT

SEQ ID NO: 31259 - DNA, 741 bp, Unknown
  Obtained from environmental sample
  misc_feature (1)..(741): n is a, c, g, or t
gtgatatacgccgacaatgcttcaacaacaaaaatatcggaaacagttctcacgaagatgcttccgtttttatatgaacaatatggcaatgcttctaacttatactcgttcggtggggcagcaaagcgagtcgtagaacaggatcggcggcaagttgcggaagccatcggagcgaagcagtccgaaatcgttttcacctccggcggttcagaaggaaatagctgggtgcttcaaggtatagtagtgctctataacgaagaacctattcatatcattacttccgctattgagcatccttccgtgttaaacgcttgccgcgctcttgaaaaacgcggcgttgcggtgacatatttacccgtggacagtaacggtcgcatttcggttaatgatgtcgaggcggcgttacgtcccgaaacgaaactcgtttcgataatgctcgctaataatgaagtaggtaccattcaaccgataactgagattggaaaacttctcagaaagcgcgaagttcattttcatacggatgcggtgcaggcagtcggacatattcctgtgaatgttggtgatttacaaatagatttattaacagcttccgcacataaatttaatggagcaaaagggacgggatttgtttacattaggtcaggaataactctgcccggtatgatattcggaggtaaacaagaaaacggaaatcgggcagggacagaaaatatcgcaggaatcgtcctcgtgccaatctga

SEQ ID NO: 31260 - protein, 246 aa, Unknown
  Obtained from environmental sample
  DOMAIN (2)...(246): Aminotransferase class-V
  misc_feature (1)..(246): Xaa is any amino acid
MIYADNASTTKISETVLTKMLPFLYEQYGNASNLYSFGGAAKRVVEQDRRQVAEAIGAKQSEIVFTSGGSEGNSWVLQGIVVLYNEEPIHIITSAIEHPSVLNACRALEKRGVAVTYLPVDSNGRISVNDVEAALRPETKLVSIMLANNEVGTIQPITEIGKLLRKREVHFHTDAVQAVGHIPVNVGDLQIDLLTASAHKFNGAKGTGFVYIRSGITLPGMIFGGKQENGNRAGTENIAGIVLVPI

SEQ ID NO: 31261 - DNA, 984 bp, Unknown
  Obtained from environmental sample
  misc_feature (1)..(984): n is a, c, g, or t
ttgggagccgcgatggaggtttgccccactggttggcatttgccagattccgctgaatggaataagctcataaatgttgcgggaggcaaagagagagccggaacaaagctcaagacaacgagtggctgggcaaattataaagaaagatctggtaatggtaccgaagattacggattttccgctatgcctggtggctacggcaattcagacgccaatttcaaagaagccagccaaagcggtagctggtggagtgccaccgagggcgaggttggcggaactgcttatcattataacttggcaacagatagttatgcaggcaaaaaccgcgacaataaaacttatttgcataacatccgttgcgtacaaggcaaatccccagcagagatattaaaagccaacagcggaacctttgccgactctcgcgatggcagaaaatacaagaccatcaaaataggcaaccaaacctggatggcacaaaatttgaattacaacgtaagcggcagtaaatgcggtgggaacgactgcgacaaatacggacgtctttacgattggaaggccgcgatgacctcctgcccaagcgactggcacttgcccaccgatttggaatgggatgttttgatagcaaccgtaggcggtgctgccaccgctggcgaaagattaaaagcaaaggaagggtggaatggcggcggcaatggcgatgatgacttcggttttcgggcattgccgggcggcagcagcgtcccaaattacggaggtgctggcaacttcggcggtttttggagtaccaccgaaagcaaagacaacgccaaagccaattatcggcatatgcttaacacaagcaaaagcgtggcaagcaaagatgatcccaaaacgaacttattctccgtccgctgcctacaaggcggaaccgggagcaaatgcaaaggcgaagatatcaaaaatagaggcggaggcggaagcaaaacacagcccaccggcaagtag

SEQ ID NO: 31262 - protein, 327 aa, Unknown
  Obtained from environmental sample
  misc_feature (1)..(327): Xaa is any amino acid
MGAAMEVCPTGWHLPDSAEWNKLINVAGGKERAGTKLKTTSGWANYKERSGNGTEDYGFSAMPGGYGNSDANFKEASQSGSWWSATEGEVGGTAYHYNLATDSYAGKNRDNKTYLHNIRCVQGKSPAEILKANSGTFADSRDGRKYKTIKIGNQTWMAQNLNYNVSGSKCGGNDCDKYGRLYDWKAAMTSCPSDWHLPTDLEWDVLIATVGGAATAGERLKAKEGWNGGGNGDDDFGFRALPGGSSVPNYGGAGNFGGFWSTTESKDNAKANYRHMLNTSKSVASKDDPKTNLFSVRCLQGGTGSKCKGEDIKNRGGGGSKTQPTGK

SEQ ID NO: 31263 - DNA, 903 bp, Unknown
  Obtained from environmental sample
  misc_feature (1)..(903): n is a, c, g, or t
atggcgagggccgagctaccggaaaatatgcgcaacatagaaataaagggcgcgcgcgtccacaacctcaaaaacatcgacgtcgtaataccgcgaaacagcctgacggtgatcaccggcctctcaggctccggaaagtcgtcgctcgccttcgacacgctctactccgagagccagcggcgctacgtcgaatcgctctcctcgtacgcccggcaattcttgggcctcatggagaagcccgacgtcgacaggatcgacggcttgtcgccggccatatccatcgaacagaagacctccggccacaatccgcgctcaaccgtgggtacgatcaccgagatccatgattacatgcgcctgcttttcgcccgcgtggggacgcccacctgccacaagtgcggacgcgtcatcgccagacaatccgtgcaagagataaccgacagaatcctgtcgcttgacaccggggcaaaattccaaatcctcgccccggtcgtcaacaaccgaaagggcgcgtacaaagaacttctcgcaaaactgcaaaagagcggctacgtcagggtgcgtatcgataaaaccatccacaatattgacgacgatatccgcatcgaccaaaataaaaagcacaacatcgaagttgtggtcgaccgattggtcaactccccgaccgtcgtgtcgcgtctcacggaatcaatcgaaaccgctctctccgtaagcgccgagggaacggttatagtcgatgtcgccggcaaggaggagctcctcttctcagagcgcctagcctgccccgtctgcgggatcagctgcgacgagcccagccccgccatgttctcgttcacagcccgctgggcgcctgcgaagagtgccacgggctcggctttctcatggaagtcgaccccgacctcgtag

SEQ ID NO: 31264 - protein, 300 aa, Unknown
  Obtained from environmental sample
  misc_feature (1)..(300): Xaa is any amino acid
MARAELPENMRNIEIKGARVHNLKNIDVVIPRNSLTVITGLSGSGKSSLAFDTLYSESQRRYVESLSSYARQFLGLMEKPDVDRIDGLSPAISIEQKTSGHNPRSTVGTITEIHDYMRLLFARVGTPTCHKCGRVIARQSVQEITDRILSLDTGAKFQILAPVVNNRKGAYKELLAKLQKSGYVRVRIDKTIHNIDDDIRIDQNKKHNIEVVVDRLVNSPTVVSRLTESIETALSVSAEGTVIVDVAGKEELLFSERLACPVCGISCDEPSPAMFSFTARWAPAKSATGSAFSWKSTPTS

SEQ ID NO: 31265 - DNA, 309 bp, Unknown
  Obtained from environmental sample
  misc_feature (1)..(309): n is a, c, g, or t
gtgctttttattttggtcgatgcggatatcgtcgtcaatattgtggatggttttatcgatacgcaccctgacgtagccgctcttttgcagttttgcgagaagttctttgtacgcgccctttcggttgttgacgaccggggcgaggatttggaattttgccccggtgtcaagcgacaggattctgtcggttatctcttgcacggattgtctggcgatgacgcgtccgcacttgtggcaggtgggcgtccccacgcgggcgaaaagcaggcgcatgtaatcatggatctcggtgatcgtacccacggttga

SEQ ID NO: 31266 - protein, 102 aa, Unknown
  Obtained from environmental sample
  misc_feature (1)..(102): Xaa is any amino acid
MLFILVDADIVVNIVDGFIDTHPDVAALLQFCEKFFVRALSVVDDRGEDLEFCPGVKRQDSVGYLLHGLSGDDASALVAGGRPHAGEKQAHVIMDLGDRTHG

SEQ ID NO: 31267 - DNA, 555 bp, Unknown
  Obtained from environmental sample
  misc_feature (1)..(555): n is a, c, g, or t
atgggtctggacgtggacgacgacgagatcacgcgcatagcgcgggcgatcgtggctgcggcgcacgcccgaggcaagagaacatccatcggcggtcaggtcacaaccgaaaacgccccgcttgtgcaggagcggctgcgcgcggatacgatcaacacgcggcacgtggttgttgatctcgcgccaaagggtattaccgaaaatatcgccgccgctctcctctgggaacgcgaatactatcttgagctgaacgcgtattttccaaaccggcgcaaattttaccttgatcgcatcgcgtccattgaggagcgcgtcgcgcgcgggcaagtacacggatgtactgtcccgcgctgcggcatggcgaagtcccccgagtgtatgagcacggaggggaaggtcgcgtcagtgcgcggggctaccgcagcgctcgttcctttttttttccaaaatttttctcaatccagcgtaggtattcgccgcttcggatctcttcaacccatgcctggttctcgagataccagcgaacggttgcttccagcccctgatccagattga

SEQ ID NO: 31268 - protein, 184 aa, Unknown
  Obtained from environmental sample
  misc_feature (1)..(184): Xaa is any amino acid
MGLDVDDDEITRIARAIVAAAHARGKRTSIGGQVTTENAPLVQERLRADTINTRHVVVDLAPKGITENIAAALLWEREYYLELNAYFPNRRKFYLDRIASIEERVARGQVHGCTVPRCGMAKSPECMSTEGKVASVRGATAALVPFFFQNFSQSSVGIRRFGSLQPMPGSRDTSERLLPAPDPD

SEQ ID NO: 31269 - DNA, 666 bp, Unknown
  Obtained from environmental sample
  misc_feature (1)..(666): n is a, c, g, or t
gtgttcggcagcacgcacgggcttgcctcggaggactcgccctataatccttccaccccgtataccgcgtcgaaagccgcaagtgatcatctggtgcgcgcatgggccagcacctacgggaccccggtaacggtctctatcgcgtccagaaattacgggccgtatcattttccggaagaattgattccgctcattatcaccaacgccctctccggaaaggccctgcctgttttcggcagaaaagacgatgtgcgcgattggctgtatgtgacggaccatgccgaagcgatctggcgcataataaccagggggcgcgttggcgaatcctacaacatcagcggcgaaaacgctcttaagaatacagagttggtgcagcatatctccaaggtactcgcgcgcgccacaaaccgtcaggagtcggatttttcaagcctcatcacctttgtcgaagacggcaccgaatccccggtacgctccacgctgggctgcgataagataaaaaaagaactcagttggaagcaggcgttcaatctggatcaggggctggaagcaaccgttcgctggtatctcgagaaccaggcatgggttgaagagatccgaagcggcgaatacctacgctggattgagaaaaattttggaaaaaaaaaggaacgagcgctgcggtag

SEQ ID NO: 31270 - protein, 221 aa, Unknown
  Obtained from environmental sample
  DOMAIN (1)...(113): NAD dependent epimerase/dehydratase family
  misc_feature (1)..(221): Xaa is any amino acid
MFGSTHGLASEDSPYNPSTPYTASKAASDHLVRAWASTYGTPVTVSIASRNYGPYHFPEELIPLIITNALSGKALPVFGRKDDVRDWLYVTDHAEAIWRIITRGRVGESYNISGENALKNTELVQHISKVLARATNRQESDFSSLITFVEDGTESPVRSTLGCDKIKKELSWKQAFNLDQGLEATVRWYLENQAWVEEIRSGEYLRWIEKNFGKKKERALR

SEQ ID NO: 31271 - DNA, 894 bp, Unknown
  Obtained from environmental sample
  misc_feature (1)..(894): n is a, c, g, or t
gtggtgagttgcgaggttttgcagccagagggagaaaatggcttgatagactatttggcgagcggaatttttacgggtataggcgaaaaaacagcggaaaaattggttggggtttttggggaaaatttgccaagaattttagacacaaatcctatgcaactgcgaggcgcggtgaaagggttaagcggaaagcggctagagaaattcatagatgattggggtttgcagcaagagagcagaaaatctctgctatttctctacaaactcggattcacgggcgcaaaagctatgctcgcttggaatttgtacaaaactcaaacagaagatatagtaagcgaaaatccatacactatgtgcgaagaaccttttgcctatccatttgaaatagcagacaatgctgcaaaaaaaataggctttgaagagagttccggattaaggctgcgcgctgccattttgcacgttttaagagaagctaaattcgatggcggacattcatttatgcctccagaaaatttattgcaaaatgctcttaattttttgagaataactccgagcttcccagatgatgatatttttgattacttgtattccgcactctccgatttgaaaaaggcagaaaaagttattatccaacaagagcgtgtgtggctgccggaactttacgaggcggaaaaatatataggaacgtttatccgtagagctttgaattttggggagttagaggctttgcacagcgatgcggaaataaacgcagctgcgagcagccttgaaatttcttatagcaatgagcaattaaaagccattaaagatgctgtttcaaatatgttctttgttataacgggaggaccagggactggcaaaactacaatattgaaaggcatattgcacatttga

SEQ ID NO: 31272 - protein, 297 aa, Unknown
  Obtained from environmental sample
  misc_feature (1)..(297): Xaa is any amino acid
MVSCEVLQPEGENGLIDYLASGIFTGIGEKTAEKLVGVFGENLPRILDTNPMQLRGAVKGLSGKRLEKFIDDWGLQQESRKSLLFLYKLGFTGAKAMLAWNLYKTQTEDIVSENPYTMCEEPFAYPFEIADNAAKKIGFEESSGLRLRAAILHVLREAKFDGGHSFMPPENLLQNALNFLRITPSFPDDDIFDYLYSALSDLKKAEKVIIQQERVWLPELYEAEKYIGTFIRRALNFGELEALHSDAEINAAASSLEISYSNEQLKAIKDAVSNMFFVITGGPGTGKTTILKGILHI

SEQ ID NO: 31273 - DNA, 582 bp, Unknown
  Obtained from environmental sample
  misc_feature (1)..(582): n is a, c, g, or t
ttgggttcgcgcgttgttgccataaaccgtgcttttttgcagggaaatatggagaatacgggcaacgagaccgatgttgccattgaaggcactggatttttccaagtacgcctcccagacggcgaaataggctatacccgcaacggagcattcaaaaagaatgacgaaggatatctaacaacaagccaaggttatttcctagaccccccgataaacgttccagacgatgccacttatttaaccatatcagccgcaggcgaagtggcttgcaatagatctgggcaaagcagtacagaagttttagggcaaattgagctagcccgcttcataaatccagccggtttaacagcagagggtggcagcattttccgccagagcgatgccagtggtgcgccgatagtaggcactccgggcgaggaaaactttggcaacctaagaaaccagttcttagaaagctcaaatgtgcaaatggtagaagaaatggtaaacatgatagtggcccagcgagcctacgaaataagctcaaaagccataaccaccagcgacgagatgctacaaacagcaaatagtttgaagcggtaa

SEQ ID NO: 31274 - protein, 193 aa, Unknown
  Obtained from environmental sample
  DOMAIN (153)...(191): Domain of unknown function (DUF1078)
  misc_feature (1)..(193): Xaa is any amino acid
MGSRVVAINRAFLQGNMENTGNETDVAIEGTGFFQVRLPDGEIGYTRNGAFKKNDEGYLTTSQGYFLDPPINVPDDATYLTISAAGEVACNRSGQSSTEVLGQIELARFINPAGLTAEGGSIFRQSDASGAPIVGTPGEENFGNLRNQFLESSNVQMVEEMVNMIVAQRAYEISSKAITTSDEMLQTANSLKR

SEQ ID NO: 31275 - DNA, 525 bp, Unknown
  Obtained from environmental sample
  misc_feature (1)..(525): n is a, c, g, or t
atgtgtaaggcggcgctggttttcaagaatcagggcttcggattcagtgtcagggtaaccgatacccagcgaaagcaggaaacggtctttttgggcttccggcaaggggaaggttccactcaaatactccgtagtccccactccctctttcctccattatcatcgcaagtccgccatttattggacgggattccgaaacttatcgacaaggcctttccactgcccgcccgcttccgctcctcgctgccaaaggatgtcgcggagctttccagactgctgacatcgggcaggggcgaacgcggcatttcttacatgagccaccctcccctgctctcggcgtatctgcgctatttcctcccatggaacctgtaccgattgtgccgcctcctgcctgatcttgacattggtctatcatcaggtgatagagtaattgatctcggctgcgggccgcttacattcgcctcggccctgtggatctgccgcgaggatcttcgtcccataccgctgaattctcggccaatctga

SEQ ID NO: 31276 - protein, 174 aa, Unknown
  Obtained from environmental sample
  misc_feature (1)..(174): Xaa is any amino acid
MCKAALVFKNQGFGFSVRVTDTQRKQETVFLGFRQGEGSTQILRSPHSLFPPLSSQVRHLLDGIPKLIDKAFPLPARFRSSLPKDVAELSRLLTSGRGERGISYMSHPPLLSAYLRYFLPWNLYRLCRLLPDLDIGLSSGDRVIDLGCGPLTFASALWICREDLRPIPLNSRPI

SEQ ID NO: 31277 - DNA, 516 bp, Unknown
  Obtained from environmental sample
  misc_feature (1)..(516): n is a, c, g, or t
gtggggactacggagtatttgagtggaaccttccccttgccggaagcccaaaaagaccgtttcctgctttcgctgggtatcggttaccctgacactgaatccgaagccctgattcttgaaaaccagcgccgccttacacatccggttaccgaccttaaaccggtggctcaggcagaggaaatagctcctctacaagatgcggtaagccgtatccatgttgacccaacggtcagggattaccttttaagccttgtaacggcaaccagaaacgaacctcgcctgcgagtcggtatatcgccccgcgggagtctcgccctgtaccgttcggcgcaagcctatgccgccgtgcaaaaccgcggctacgttactccggaagatgtaaaagaaatggcgggaagcgtattccgccagagacttcttttatcttccgagtctattgtacgcggaaaacagcctgagcggatcattcagacaatacttgataccgttccaatccccaaataccggacctcataa

SEQ ID NO: 31278 - protein, 171 aa, Unknown
  Obtained from environmental sample
  misc_feature (1)..(171): Xaa is any amino acid
MGTTEYLSGTFPLPEAQKDRFLLSLGIGYPDTESEALILENQRRLTHPVTDLKPVAQAEEIAPLQDAVSRIHVDPTVRDYLLSLVTATRNEPRLRVGISPRGSLALYRSAQAYAAVQNRGYVTPEDVKEMAGSVFRQRLLLSSESIVRGKQPERIIQTILDTVPIPKYRTS

SEQ ID NO: 31279 - DNA, 327 bp, Unknown
  Obtained from environmental sample
  misc_feature (1)..(327): n is a, c, g, or t
atgggctttaccctgtcgggaggcgaaaggcggcgcaccgaaatagcacgctcccttgctaccgaaccaaagttcctgcttctggacgagcctttcgccgggatcgatcctatcgcggtttacgaaataaagcagatcgtccgccgccttgcagaaaaagggatcggcattttaataaccgaccacaatgtaagggacaccctggaaataacaaccgaagcttttattatcaacgaaggctcaatcgtaacacgcggcgccaaagaagaaatcctctccaatgaaatggtcaggaagatttacctcggcagcgaattcaggatgtag

SEQ ID NO: 31280 - protein, 108 aa, Unknown
  Obtained from environmental sample
  DOMAIN (1)...(80): ABC transporter
  misc_feature (1)..(108): Xaa is any amino acid
MGFTLSGGERRRTEIARSLATEPKFLLLDEPFAGIDPIAVYEIKQIVRRLAEKGIGILITDHNVRDTLEITTEAFIINEGSIVTRGAKEEILSNEMVRKIYLGSEFRM

SEQ ID NO: 31281 - DNA, 399 bp, Unknown
  Obtained from environmental sample
  misc_feature (1)..(399): n is a, c, g, or t
atgcagtgggatggcggaaataacgccggctttaccgctgccaaaccctggctgggcattaacgcgaattacaaatatatcaattacgaatcgcagaaaaacaacccgtcttcggttttgaatttctacaaggcgctcatcgctttgcggcaaaaaagcgactgtttaaggaacggcgagtttgtacccatttttgcagatactcaccttatgtgctatcagcgtaagctgggagatgaagcgtataatgttgcgctaaatttttcttcccgaaaaaggaggctgccgaaaaaaatcgttttgcatggtacgccggtaatctccaatagcggaagggcggaattaggcggttgcctgctgccctgggaaggcgtgttgctaaaagccgctacatcctga

SEQ ID NO: 31282 - protein, 132 aa, Unknown
  Obtained from environmental sample
  misc_feature (1)..(132): Xaa is any amino acid
MQWDGGNNAGFTAAKPWLGINANYKYINYESQKNNPSSVLNFYKALIALRQKSDCLRNGEFVPIFADTHLMCYQRKLGDEAYNVALNFSSRKRRLPKKIVLHGTPVISNSGRAELGGCLLPWEGVLLKAATS

SEQ ID NO: 31283 - DNA, 702 bp, Unknown
  Obtained from environmental sample
  misc_feature (1)..(702): n is a, c, g, or t
ttgcgcgaactgaggcgcgacgtattggacaagtacgattgctttacggtaggcgaatctgtttttgtcgatttacaggacgcgaaactgttatgtgatgaaagccgaaaagagttaaacatgattttcttttttgatcatcttgaagttgaccgccgcattgcgagatatataccgaaaaaattccgcgcccgcaaattgctggaagtaatgacaaaatggcagttgggacttgactggtgcgccctgtatcttgaaaatcacgatcaaacacgaactgtctctcactttggagctttgaaaaaaagcagtataactaatgacggcgatttaaagagatcaggagagtactggcgaagaagcgcgaagatgcttgcgctttttgaactgactcttcgcggcacgccgtttatttatcagggacaggaaatcggtatgaccaattttgattttaaaagcattgacgaactcaacgatgtggaaagccgaggcatggacaaattgatgaaaaagatgcgtatacctggcttttacgctggaagtggattaaggccagctcccgggacaacgcccgcacgccaatgcagtgggatggcggaaataacgccggctttaccgctgccaaaccctggctgggcattaacgcgaattacaaatatatcaattacgaatcgcagaaaaacaacccgtcttcggttttga

SEQ ID NO: 31284 - protein, 233 aa, Unknown
  Obtained from environmental sample
  misc_feature (1)..(233): Xaa is any amino acid
MRELRRDVLDKYDCFTVGESVFVDLQDAKLLCDESRKELNMIFFFDHLEVDRRIARYIPKKFRARKLLEVMTKWQLGLDWCALYLENHDQTRTVSHFGALKKSSITNDGDLKRSGEYWRRSAKMLALFELTLRGTPFIYQGQEIGMTNFDFKSIDELNDVESRGMDKLMKKMRIPGFYAGSGLRPAPGTTPARQCSGMAEITPALPLPNPGWALTRITNISITNRRKTTRLRF

SEQ ID NO: 31285 - DNA, 516 bp, Unknown
  Obtained from environmental sample
  misc_feature (1)..(516): n is a, c, g, or t
ttgataaaacgcgctgcgcccttccatgacattggaaaacttggcataagcgacattatcctgctgaagcgcagccccctgacgaatatggaaatacaggaagttagaaagcatactaccattggcggccaggtattgaaggctgtttatgatcgtactcccagccagcattatctgaaagtggcgatgatcctcgccgaaggccaccatgagaattttgacggcaccggctatccgcagggccttgcgggagaggatattcccctgtattgcagaattctgtcggtagtgaatacgtatgatgccttaatcaccgacagggtttaccgcaaagggatttctcatgaagaggcctgcaagcaaatacttgccggacgggacaccagatttgatcccagggttgtggatgtatttgaaaaaataacggataaaattgcttccctgaacgtgacaacaaatttgtcatttaaagaccatggatggagcgtgtacaatgaaacgaatactggtagttga

SEQ ID NO: 31286 - protein, 171 aa, Unknown
  Obtained from environmental sample
  DOMAIN (2)...(103): HD domain
  misc_feature (1)..(171): Xaa is any amino acid
MIKRAAPFHDIGKLGISDIILLKRSPLTNMEIQEVRKHTTIGGQVLKAVYDRTPSQHYLKVAMILAEGHHENFDGTGYPQGLAGEDIPLYCRILSVVNTYDALITDRVYRKGISHEEACKQILAGRDTRFDPRVVDVFEKITDKIASLNVTTNLSFKDHGWSVYNETNTGS

SEQ ID NO: 31287 - DNA, 873 bp, Unknown
  Obtained from environmental sample
  misc_feature (1)..(873): n is a, c, g, or t
gtgttcagcaacggcatcatcatcctcgccatagtcagcagttttttggtgtggctgctgcatgcaaatacggacttgctgctgcctctatacgcgatgggagttttcattgggttcaccatcagccaggccagcatggtgatgcactggcggaagtggagggggtcagaaaaaaaatggctgataaaggccgccatcaatggcgttggcgcgatgacaacgggagtggtgcttgtggtcatcgtattcaacaaattcaaggcgcctgaccacctgagcggcgtatggataatcatgctgataataccggccctgatctggttgttcctgaaaatccactggcactatgaccacatcaggtcgtcgctggcttccagcagggcagagccgataatcctgtactcaaagagccatgtgatagtccttgtaaattccatacaccgagggacgctggaggccctgcgctacgccaaggccatagccggcaatggcatcgtagaggcactgaacattgattttagggacgagtctggaaacccaagcctagtgcgctttgcgctggaatcggaatggcagatgtactgcagcgaggccaacatccctctgaggttcatagaaaataggtataggcaggttgtagagccaatagtgaaggaactaggcaggatgagggaaaaagagccagagacgctattcactgttgtggtgccagaatttgtgacagagtctattttgggcaacattttgcacaaccagaccgcgctgcggataaagactgtcctaagggaaacgcccaatacggtggtggtatctgtaccctacaaaataggcgggggccatgaaagggatccgcacgtaattggcaccgcatga

SEQ ID NO: 31288 - protein, 290 aa, Unknown
  Obtained from environmental sample
  SIGNAL (1)...(22)
  misc_feature (1)..(290): Xaa is any amino acid
MFSNGIIILAIVSSFLVWLLHANTDLLLPLYAMGVFIGFTISQASMVMHWRKWRGSEKKWLIKAAINGVGAMTTGVVLVVIVFNKFKAPDHLSGVWIIMLIIPALIWLFLKIHWHYDHIRSSLASSRAEPIILYSKSHVIVLVNSIHRGTLEALRYAKAIAGNGIVEALNIDFRDESGNPSLVRFALESEWQMYCSEANIPLRFIENRYRQVVEPIVKELGRMREKEPETLFTVVVPEFVTESILGNILHNQTALRIKTVLRETPNTVVVSVPYKIGGGHERDPHVIGTA

SEQ ID NO: 31289 - DNA, 414 bp, Unknown
  Obtained from environmental sample
  misc_feature (1)..(414): n is a, c, g, or t
atggcgagcggccgagaaaacggaccaggcctttgcccgttatctaagcctggtaagccattgtatgttcccaaggccggcctcccatttgagcaagccgccgaccttatccgtgaatccggcggcattcctgtccttgcacatccaatgtctctctatgttgcctggggctgtcttcccgatctggttaaagtattaaaaaaacaggggctgatgggcattgaggcatggcaccctatcgccaaagcaaacgcctgccgccgtcttgaagaaatgggcagaagtcttggcttgtacataaccgagggaagcgactttcacgggactacgcgccttggccgtcatcttggcctttccaacaaaggccgggaaataagcgaggccgtgcttgaggcgattccggaactgctgtag

SEQ ID NO: 31290 - protein, 137 aa, Unknown
  Obtained from environmental sample
  misc_feature (1)..(137): Xaa is any amino acid
MASGRENGPGLCPLSKPGKPLYVPKAGLPFEQAADLIRESGGIPVLAHPMSLYVAWGCLPDLVKVLKKQGLMGIEAWHPIAKANACRRLEEMGRSLGLYITEGSDFHGTTRLGRHLGLSNKGREISEAVLEAIPELL

SEQ ID NO: 31291 - DNA, 1221 bp, Unknown
  Obtained from environmental sample
  misc_feature (1)..(1221): n is a, c, g, or t
atggacacattggatcagattaaaaaggcgataaaacacgccatgaacagcgagttttataaaaaatattacgcggggattaacgtaaatgacataaaatccatggatgatttcagaaaactgccctttacggacaaggaagatttaagggacgcgtatcctctcgggcttatggctgtttccgacgagaaaatagtccgtattcactcgtcatcgggcacaaccggcgctcctgtaattatcccctatacgcaaaaagacgtgcacgactgggcgcttatgttcaaacgctgttatgaaacagcgggtattaccagcaaggatcgtattcacataacgccgggatacgggctttggacggcgggtataggctttcaggctggcgccgaactgcttggcgctctggcaattccgatggggcccggcaacacggacaaacagattaaaatgatgatcgatctgcaatcgacggttatctgcgcgacatcttcctacgctctcctgttagctgaagaaattgaaaaacgcggcgttaaaaataaaatctgccttaaaaagggcgttattggctccgaacgctggggcgaaaaaatgcgcaagcgcatcgccaacgaactcggagttgagctttacgacatttacggcctgacggaaatatacggccctggaattggaattaactgccaaaagcaggacgccatgcatatgtggacggattatttttattatgagattatcgatccgaaaacaggcgaagttttacccgaaggcacaacaggcgaaattgtcataacaacgctctgcaaggaaggcgcccccctgattcgctacaggacgcatgatcttacaaaagcgattcccggcaagtgtgaatgcgggcttgagtatccgagaatcggcacgatcatcgggcggagcgatgacatggtaaaggttcgcggcgctattatttacccgagccgcgtggatgagcttcttgccgccgtcgatggggtaagcagcgaatatcaaatcatgattgatcacctgaatggaaaagacatacttactcttttctttgaaacgcgcgaaacaggcgataccgcccaccatctggaaaaaaccgtagagcatgaattcaaggaaagaatcggccttacgccaaaagcaaaagccgtcggcatgggcgaacttccaagaagtgaaaaaaaatcaacgcgggtgtttgataacaggtactaa

SEQ ID NO: 31292 - protein, 406 aa, Unknown
  Obtained from environmental sample
  DOMAIN (3)...(337): AMP-binding enzyme
  misc_feature (1)..(406): Xaa is any amino acid
MDTLDQIKKAIKHAMNSEFYKKYYAGINVNDIKSMDDFRKLPFTDKEDLRDAYPLGLMAVSDEKIVRIHSSSGTTGAPVIIPYTQKDVHDWALMFKRCYETAGITSKDRIHITPGYGLWTAGIGFQAGAELLGALAIPMGPGNTDKQIKMMIDLQSTVICATSSYALLLAEEIEKRGVKNKICLKKGVIGSERWGEKMRKRIANELGVELYDIYGLTEIYGPGIGINCQKQDAMHMWTDYFYYEIIDPKTGEVLPEGTTGEIVITTLCKEGAPLIRYRTHDLTKAIPGKCECGLEYPRIGTIIGRSDDMVKVRGAIIYPSRVDELLAAVDGVSSEYQIMIDHLNGKDILTLFFETRETGDTAHHLEKTVEHEFKERIGLTPKAKAVGMGELPRSEKKSTRVFDNRY

SEQ ID NO: 31293 - DNA, 969 bp, Unknown
  Obtained from environmental sample
  misc_feature (1)..(969): n is a, c, g, or t
atgactcttgaaaacggcggtaattttagctgcagttggagtaacatcggcaatgttttatgcagaaaaggcaaaaaattcgattctacaaaaacacattcacaaatcggcaatatctctataaagtacgacgcgcaatttacaccgggaggaaattcttatctgtgcgtatacggctggtcaaaagacccgttagttgagtattacattatagagagctatggaacttacaaaccgacaggaacggcaaaaggctctgtcacaatagacggcggaacctatgagctttatgaaacaacaagaactaatcagccttcgattgaaggaacaaaaacatttaaacaatactggtctgtacgcacgtcaaaacgcacaagcggaacaatctccgtaacagagcattttaaagcgtgggaaaaacaagggatgactcttggtaagctttatgaagtagctcttacggctgaaggttaccagagcaacggaagcgctaagataacaagccatacccttacgattggcggaagcggttcaagttccgatagttcaaacagcggatcaggtaacggtagcggaaacggaagcagtacaactacaggcgttacaaaaattgaagccgagaatatgaccaaaagcggaaaatataccggcaactgctcatctcctttcaccggagttatcctgtacgcaaacgacgacaaagtttcatttagccaatattttgcaaataacagccataattttaaacttcgcggcgcatcgtcaaacagcaaagaagctcaggttgagttgagaatcggcggaacttcctacggaacattcaagttcagcggaacatcacctgcggaaaaaaccataacggctacccacaacaagggcgggagcactgtcacaattgaacttgtgtgcgttaatgacaacgacacatgggacgcaaaaattgactggttagaaatctccgcgaagtaa

SEQ ID NO: 31294 - protein, 322 aa, Unknown
  Obtained from environmental sample
  DOMAIN (205)...(321): Carbohydrate binding module (family 6)
  misc_feature (1)..(322): Xaa is any amino acid
MTLENGGNFSCSWSNIGNVLCRKGKKFDSTKTHSQIGNISIKYDAQFTPGGNSYLCVYGWSKDPLVEYYIIESYGTYKPTGTAKGSVTIDGGTYELYETTRTNQPSIEGTKTFKQYWSVRTSKRTSGTISVTEHFKAWEKQGMTLGKLYEVALTAEGYQSNGSAKITSHTLTIGGSGSSSDSSNSGSGNGSGNGSSTTTGVTKIEAENMTKSGKYTGNCSSPFTGVILYANDDKVSFSQYFANNSHNFKLRGASSNSKEAQVELRIGGTSYGTFKFSGTSPAEKTITATHNKGGSTVTIELVCVNDNDTWDAKIDWLEISAK

SEQ ID NO: 31295 - DNA, 585 bp, Unknown
  Obtained from environmental sample
  misc_feature (1)..(585): n is a, c, g, or t
atggtacggaaagaatccgtcggtaaaaaagttttaaatctcttttcctacaccggctctttttccgtatacgcggctaacggcggagcgctttcaacagattcggttgatctttcaaatacttacttaaattgggcgcgggaaaatttttcgctcaataatttttccgccgatatacttcaaatttgggattttttcaaaggcgactcaaactgcgcccacaaacttatccgcgccgatgttcttgagttcttggaaaaagcgaaaacggcaaaaaaacagtgggacattatcgtgcttgatcctccaagtttttccaattcaaaaaaaatgacagatgattttgatttacagcgtgatttaactgaattgctcggtaaatgcataaaactgcttgcccctgagggaaaattatttttaagcgtaaatataaagcgctccgctcccgccgccgatgaacttaaagacagtttgagtcagtatgcgtcagatttgcacataacagacttgggagaaaaattaattgacgaagattttaaagacagaaaaacgccgaaagcttttctgttgaattatataaaataa

SEQ ID NO: 31296 - protein, 194 aa, Unknown
  Obtained from environmental sample
  SIGNAL (1)...(25)
  misc_feature (1)..(194): Xaa is any amino acid
MVRKESVGKKVLNLFSYTGSFSVYAANGGALSTDSVDLSNTYLNWARENFSLNNFSADILQIWDFFKGDSNCAHKLIRADVLEFLEKAKTAKKQWDIIVLDPPSFSNSKKMTDDFDLQRDLTELLGKCIKLLAPEGKLFLSVNIKRSAPAADELKDSLSQYASDLHITDLGEKLIDEDFKDRKTPKAFLLNYIK

SEQ ID NO: 31297 - DNA, 1254 bp, Unknown
  Obtained from environmental sample
  misc_feature (1)..(1254): n is a, c, g, or t
ttgccacagcttggagtgtggtttaataaggttacgggcttaactactgacagcgtccttgaagaacgggcggaaaacgccgcgtccaaaatggaaggcgatgacaaagatttattcgtcctagtacggcgttatgcgcattttcttaatgagcattccctttttgaacccgcgtgggaaactccgccttttaatgatgagggaaaagaagtttttatcttttttccggagtcactttccgattacggcgaatacagtgaattactggctgacagccgccatgtgaaaacaataagcgcgacaaataccgatgaattaaaaagcgacacgttcttttacaccaattcccgaagtgaaataaaagaagccgcgctttacatccgcgccttaaatgagaatcacggcgtaaactgggattcaatcgccgtttgtatccctaactctgaaaattatgaaccttatgtactgcgtgagtttactaacaggaatatcccctttgtaaaacgttcaagcaaactgctctgtgattatcctgcgggaggctttttccgctcaatatttgaatgtgtttcacaggatttttccttttcagcccttgtttccctaattatgaacaaggctcttccctggaaaaacgcccttcccatagaaaaacttgtacagtttgggatagataacaactgtctttattcatgggtagaggaaattgacggggaggaaaaatatatcaatgtttgggaagacgcatttaataatccaattcattattttgacagggatgttcgcgatttttttattgatcttaaaaaacgactcaatacttttcgccgctgtgaatcattcaatgagcttcgcaggcagtattttatttttcgcgaacatttttttgacatggatatatgcggtgaagaaagcgatcttattctgtcccgttgtatttctgaattaatggaacttgtggagattgaaaaaagtttccccgatgtaaaagcgccggatccttttttattttttaccgaatatttggatgaagtcccctatcttccccaacagaaactgacaggcgtggcggttcttccttacaaaaccgcggcggcggctccttttgactgccatattatactcggcgcgggacaggaaagcctttccgtcgtatattcgcgccttgatttccntccccagaaaaaaacgcgaagaattgggtatttcagacgaagacgcgtctttatgctttataaatatgcacaaatataa

SEQ ID NO: 31298 - protein, 417 aa, Unknown
  Obtained from environmental sample
  misc_feature (1)..(417): Xaa is any amino acid
MPQLGVWFNKVTGLTTDSVLEERAENAASKMEGDDKDLFVLVRRYAHFLNEHSLFEPAWETPPFNDEGKEVFIFFPESLSDYGEYSELLADSRHVKTISATNTDELKSDTFFYTNSRSEIKEAALYIRALNENHGVNWDSIAVCIPNSENYEPYVLREFTNRNIPFVKRSSKLLCDYPAGGFFRSIFECVSQDFSFSALVSLIMNKALPWKNALPIEKLVQFGIDNNCLYSWVEEIDGEEKYINVWEDAFNNPIHYFDRDVRDFFIDLKKRLNTFRRCESFNELRRQYFIFREHFFDMDICGEESDLILSRCISELMELVEIEKSFPDVKAPDPFLFFTEYLDEVPYLPQQKLTGVAVLPYKTAAAAPFDCHIILGAGQESLSVVYSRLDFXPQKKTRRIGYFRRRRVFMLYKYAQI

SEQ ID NO: 31299 - DNA, 396 bp, Unknown
  Obtained from environmental sample
  misc_feature (1)..(396): n is a, c, g, or t
atggaagtatccggatttgattttaataacccaacatcgctctatgctgataatatgcggttatcgtcaggtccggccgttcacagccccgaaaagttttcggaagcgctgaaaagagcttcaaccaacgatactgtcgttgaaaaacgcgcaggcaaagagcctattgataaagaagacaagctctaccagttgtgccttgaacttgaaacattcctagttaaaaatcttttaaccagtatgagaaacacggtacaaaaatccgggcttgtggacgacagttttgccggtaaaatgtacgaagatatgctctacgacgaatacgccaaagattttaccagaagcgccaatttcgggcttgcagagcaggcttataggcagttaaagaaatattaa

SEQ ID NO: 31300 - protein, 131 aa, Unknown
  Obtained from environmental sample
  misc_feature (1)..(131): Xaa is any amino acid
MEVSGFDFNNPTSLYADNMRLSSGPAVHSPEKFSEALKRASTNDTVVEKRAGKEPIDKEDKLYQLCLELETFLVKNLLTSMRNTVQKSGLVDDSFAGKMYEDMLYDEYAKDFTRSANFGLAEQAYRQLKKY

SEQ ID NO: 31301 - DNA, 801 bp, Unknown
  Obtained from environmental sample
  misc_feature (1)..(801): n is a, c, g, or t
atggtcagagtttatggaacaggcgcgtcgggaatgattggtcagcagtcaaatacggatgtaatcgcgaataacctcgcgaacgtgaacactcacggatacaaaaaacaacgcgcggattntgaggatcttatctatcagactgtcaaagtggcgggcactccggcgaccgaagacactgttgtcccggtcgggattcagatgggccacggcgttaaattggcggataccaagcgtgtttttacgcaaggatctccgcagcagacggaagtggctaccgacatggcgattatgggcgaaggttttttcaaggttagattatacgacggcagtacggcatatacgcgtaacggaaattttcaggtagatctcgaaggacaaatgcttgacagcaacggtaaccggcttataccggaaataataatgccggaacttttcttgccggatagtatcgttgttacaaaagacggcagggtaagcgtaaaagttccggaggaaggcgatcttgtggaagttgatgtcggcagaatagagctttaccgctttccgaacccggtaggacttaccgcggtaggagaaaatctttttaaggtaagtaacgcttcaggcgacgctattcccgctgttcccggttatgacggaatgggttttatcatgcataaatttttagaaatgtccaatgtgcagatagtgcaggaaatggttaatttgatagtcgcccagcgcgcttatgaatttaattcccgcacaattcaaaccaccgacaacatgcttggaaccgcaaccacattaaagaggtaa

SEQ ID NO: 31302 - protein, 266 aa, Unknown
  Obtained from environmental sample
  DOMAIN (7)...(35): Flagella basal body rod protein
  misc_feature (1)..(266): Xaa is any amino acid
MVRVYGTGASGMIGQQSNTDVIANNLANVNTHGYKKQRADXEDLIYQTVKVAGTPATEDTVVPVGIQMGHGVKLADTKRVFTQGSPQQTEVATDMAIMGEGFFKVRLYDGSTAYTRNGNFQVDLEGQMLDSNGNRLIPEIIMPELFLPDSIVVTKDGRVSVKVPEEGDLVEVDVGRIELYRFPNPVGLTAVGENLFKVSNASGDAIPAVPGYDGMGFIMHKFLEMSNVQIVQEMVNLIVAQRAYEFNSRTIQTTDNMLGTATTLKR

SEQ ID NO: 31303 - DNA, 1059 bp, Unknown
  Obtained from environmental sample
  misc_feature (1)..(1059): n is a, c, g, or t
gtgctacaatgcctatcggagacaatcggcgacgatttgacgtcgtttatcatggacttggagttgccggaaggcaaactcgtcgtgcacacaaacacgccgagttacgtcgggtcgcacataaacggcttcttcaacatgatgatcggtttcattaactacttgacaaagaagaccggtacgcccaccggcaagaccgcggtcttccccggatgggtgaaccccggcgacatacgcgaactcaagcgcatagccgcgctgatgaatgtgccgacggttttcttccccgatcagagcggcgtcttagacgcgcccatgaccggcaggtacgagttctaccccgaaggcggcacgacgctcgatgaaatccgcaccctcggcgacagcgacggcttgattgcgcttggggaaattatcggagtggaacccgccgaggtgctcaataagaagttcaaagtgccgtatacgctgttgccgttgcccgttggcgtcgcgtacaccgaccaatacgttctcgcgttgcggaagcagtcgcgcacggaagtcccagccgcgcttgaggcggagcgcggccggctcgttgacttgttgttggattcctctcaatacacaagcggaaaaaaagtcgcgatattcggtgatcctgatattgtcataggccttacgtcgctcgtgcttgagatgggtatggttcccaagtacgtcatcaccggaacgcccaaagaggagtttacgcgcagggttacggaactctacgataagtacggcgtaacggactgcaaggctaaagcgaacgccgactttttcgagttgcaccagtggataaagaacgagccggttgatttgctgatcggttcgacctacggcaagcagatagcgcgcgccgaggacattcctttcatccgcgcaggttttccggtgctcgacagatacggcggaccgttgctgccgacggtcggctacagcggcggcgttctgttcgtagagaggatcgtcaacgcattgttggataagttcgacaagacgtgcgctgaggaggattttgagattgtgctgtag

SEQ ID NO: 31304 - protein, 352 aa, Unknown
  Obtained from environmental sample
  DOMAIN (1)...(337): Nitrogenase component 1 type Oxidoreductase
  misc_feature (1)..(352): Xaa is any amino acid
MLQCLSETIGDDLTSFIMDLELPEGKLVVHTNTPSYVGSHINGFFNMMIGFINYLTKKTGTPTGKTAVFPGWVNPGDIRELKRIAALMNVPTVFFPDQSGVLDAPMTGRYEFYPEGGTTLDEIRTLGDSDGLIALGEIIGVEPAEVLNKKFKVPYTLLPLPVGVAYTDQYVLALRKQSRTEVPAALEAERGRLVDLLLDSSQYTSGKKVAIFGDPDIVIGLTSLVLEMGMVPKYVITGTPKEEFTRRVTELYDKYGVTDCKAKANADFFELHQWIKNEPVDLLIGSTYGKQIARAEDIPFIRAGFPVLDRYGGPLLPTVGYSGGVLFVERIVNALLDKFDKTCAEEDFEIVL

SEQ ID NO: 31305 - DNA, 507 bp, Unknown
  Obtained from environmental sample
  misc_feature (1)..(507): n is a, c, g, or t
atggaacgaaaaatacggtttgtgagtaatgatatagatgccgcggcaattgaaaacggccccagacgcgtcatgaaagagattctcatgcagttgatccgcaactctgtcgcgcacggaattgaaccgcccgatgaacgtcttgccaaaggcaaaaacgaaaccggcattataaaactcgcgattaagctggtgaataatatgatcaccatagagttgagggacgacggcagggggtttgattataaaaaaatcagcgagaaagcaatactcaataacataattaaaaaagaagacgctgataataaagatatgcttataaaagcaatatttatgccaggcttcagtactgcggaaaatgaaggaatgcatgccggcaggggtatcggcttgaatctggttcgcgaccgcgtaaaagaagtaaacggttctattcaactgcgttccgagcctgacaagggaacggcgtttttaattaccattccggcagtaaaaaataacaggtaa

SEQ ID NO: 31306 - protein, 168 aa, Unknown
  Obtained from environmental sample
  DOMAIN (20)...(164): Histidine kinase-, DNA gyrase B-, and HSP90-like ATPase
  misc_feature (1)..(168): Xaa is any amino acid
MERKIRFVSNDIDAAAIENGPRRVMKEILMQLIRNSVAHGIEPPDERLAKGKNETGIIKLAIKLVNNMITIELRDDGRGFDYKKISEKAILNNIIKKEDADNKDMLIKAIFMPGFSTAENEGMHAGRGIGLNLVRDRVKEVNGSIQLRSEPDKGTAFLITIPAVKNNR

SEQ ID NO: 31307 - DNA, 840 bp, Unknown
  Obtained from environmental sample
  misc_feature (1)..(840): n is a, c, g, or t
ttgatggccgagggcttacgtgacgagatcgccgccatgaaggacagcatgaagatcggccttttcttcatggactcgaaccttgttatacaggatcattattccaggtatctggaagaaatgctgtctgagactgaacttttcgggaggacttttaccgatgtaatcgccgattcggttacaccaaatgaattgaaatctatcaaagattattttgaaatggttatcgaacagactttcgatcaggaaatgctggacgatataaaccctctgaatgaactgcattacgtcaacgccagaaccaacgacagaaaggtattccaatgcggttttgccactgtggaacaggcgcgcggagatgtctttattctagtaacggtttatgacataaccgccaaggtagaactgcagaagcggcttgctgaagaacaaaacaagcggcaggaagaaatgcagtccgttttcgagcttattcaagtcgagccaagtgtctttgcagattttaaggaagacatagaatacgaattcaacgccattgataaagttttaaaagataaacaactatccacccatgaagcgctggtaaagatttatcaatccgttcacgccataaaatccaacgcggtaatcctgggattgaatgtgtttggcacaaaggtgcatgctcttgagtccatgataaaaaaactgcgcgagcaggaagaagaagtacccttctctgaaatgctgaaccttaccatgaatatagaaaaactttccaatgaaagggaaggattcaaaataattcttgataaactccagtcccataccaagggaggcggagtcagaaacagaatgtga

SEQ ID NO: 31308 - protein, 279 aa, Unknown
  Obtained from environmental sample
  misc_feature (1)..(279): Xaa is any amino acid
MMAEGLRDEIAAMKDSMKIGLFFMDSNLVIQDHYSRYLEEMLSETELFGRTFTDVIADSVTPNELKSIKDYFEMVIEQTFDQEMLDDINPLNELHYVNARTNDRKVFQCGFATVEQARGDVFILVTVYDITAKVELQKRLAEEQNKRQEEMQSVFELIQVEPSVFADFKEDIEYEFNAIDKVLKDKQLSTHEALVKIYQSVHAIKSNAVILGLNVFGTKVHALESMIKKLREQEEEVPFSEMLNLTMNIEKLSNEREGFKIILDKLQSHTKGGGVRNRM

SEQ ID NO: 31309 - DNA, 942 bp, Unknown
  Obtained from environmental sample
  misc_feature (1)..(942): n is a, c, g, or t
ttgcgacggtttcgcctacggcttgcgcctgagattctctcaccaggaacagccggcattttggcaaaaatattgggcgacgacgacggacctgtagaaagggatattcttttttccgtaattcaaaaagacataaactcctttgatattgaaactgaaatttcctctgtagaccttcgctgtcacagaattaacctgtgcgcagatacaaaacgcggccttttcctgcttaaaaattttatctccgcctccaacggtaaaattcctgccgccgacgaagtggaaaacatagttaaaaatcaacctgaaatattaagaacgttacccgccttctaccctatccaggtttacggcggctgcccgcaaaaatgcgcaatctgcccctatcctgtgtttacagacgtaatgggacgcaaagattttatggactgcgaaaaattcagctctctgttggacaaaatcacagctttttcaggagacgccgtaatagacctctccctatggggcgaattaagccttcatcctgaaaaaatgaagttaatagaagaagttgtccgccgtcctgaattagcattgattattgaaacttcaggcatcggctggaaaaatgaggagattgaaaaatgcgccgaattgtgcggcggtttggaaaaaagcgcaggttttagaaagaacgcccttgcccccctctcatggattgtatctcttgatacttcagatcctcaacgctacgcggatctgcggggtgcgggttttgccgaggctganactttagccaggaaacttttttccctgtttccaaatgacagttatgtgcaggcggtgcgcgtaaaaggagcggaagacgatattgaaaaattttaccgttactggaaaacggcttctccaaaaaatgaaaaaaacattatttatcaaaaatatgcggttttcgcggcgttctga

SEQ ID NO: 31310 - protein, 313 aa, Unknown
  Obtained from environmental sample
  DOMAIN (114)...(291): Radical SAM superfamily
  misc_feature (1)..(313): Xaa is any amino acid
MRRFRLRLAPEILSPGTAGILAKILGDDDGPVERDILFSVIQKDINSFDIETEISSVDLRCHRINLCADTKRGLFLLKNFISASNGKIPAADEVENIVKNQPEILRTLPAFYPIQVYGGCPQKCAICPYPVFTDVMGRKDFMDCEKFSSLLDKITAFSGDAVIDLSLWGELSLHPEKMKLIEEVVRRPELALIIETSGIGWKNEEIEKCAELCGGLEKSAGFRKNALAPLSWIVSLDTSDPQRYADLRGAGFAEAXTLARKLFSLFPNDSYVQAVRVKGAEDDIEKFYRYWKTASPKNEKNIIYQKYAVFAAF

SEQ ID NO: 31311 - DNA, 954 bp, Unknown
  Obtained from environmental sample
  misc_feature (1)..(954): n is a, c, g, or t
ttgttcttttgctgctcggatttcggcaaaaataagtccccatccgttgctatgccgactggcgcttatgaaggcactatgcacaaattcatagcactgcgcgacagtataatcgagggattgaacaatccatccgccccgcggaacccatgtcacggttgttgtggtctcatagacggtctctggccggttgataggcatgttcgttatgtgagccttggattccgttcggtttgcaatttcaagtgtttgtactgcaaagccccactgggtattccaccccctgctgatgtcgaagaactgctcggacttttgcgctttatgagggaacaccaccacattggcacggacacacagatgcaaatctctgctggcgagatttctgtccatccacttcgcgagaggattttggatgaggtgcaggactatccatgtttgatattcactaacgccagttcgtacaacgataaaatcggcaaaattctttcaaatgaggggagcgaactttatcctagcctcgactgtggtacgcgcacaacattcgcaaagctaaaaggcgttgacctctttgacaaggtttgcgaaaacattctgcgctattcatctgaaggattcgtccgtttgaaatacatcgtcttgccaggtatgaacgataacgataacgatataaacgggtttgtatctctttgccgtcagatgaaaattagggctgtggatgtttcaagggacagccttgacaggaaggcgttcgatgaccacacaatcaacatggttgcccgtatggttttgggacttaaggaagctggtgtcaacgtcgctttgcctgaacactattttgcgggtagcgccaatgaggacaagaaaaggatcgaaaagttggtgacggagatggaacgtgtgccagccgattcctctcgaactatttggcagagcggagctaccgaaaatgtctaa

SEQ ID NO: 31312 - protein, 317 aa, Unknown
  Obtained from environmental sample
  DOMAIN (73)...(230): Radical SAM superfamily
  misc_feature (1)..(317): Xaa is any amino acid
MFFCCSDFGKNKSPSVAMPTGAYEGTMHKFIALRDSIIEGLNNPSAPRNPCHGCCGLIDGLWPVDRHVRYVSLGFRSVCNFKCLYCKAPLGIPPPADVEELLGLLRFMREHHHIGTDTQMQISAGEISVHPLRERILDEVQDYPCLIFTNASSYNDKIGKILSNEGSELYPSLDCGTRTTFAKLKGVDLFDKVCENILRYSSEGFVRLKYIVLPGMNDNDNDINGFVSLCRQMKIRAVDVSRDSLDRKAFDDHTINMVARMVLGLKEAGVNVALPEHYFAGSANEDKKRIEKLVTEMERVPADSSRTIWQSGATENV

SEQ ID NO: 31313 - DNA, 753 bp, Unknown
  Obtained from environmental sample
  misc_feature (1)..(753): n is a, c, g, or t
atgaccaaagttatgatatacacacaatgctacaacgccgaaaataccgtagctcgcaccattgaaagcgtgctttcccaaactcatggggacttcctgtatcatgtggttgacaatggttcgactgattctactggggacatcatcaaatcatttgctgaccgcgacaagaggatcaaagctgtggccaatgccgcgaacaacgtctgggaacctggtaacatctatttcgaatttctggatggatgcgacgccgactctttcttctgtatgctcgattccgatgacgattacaaaccgactttcctagaatgcatgttggcattcatcaaggacaatcgcttagaccttgctgcctgcggtagcgatttccttagcaacaccaatggatcgttcttgtctgcccgggcattggagcatgacttgattctcgaaggggagtccttcggtttgcagttcccaatctaccaccagttcatgcgcacatactggggcaagctctatcgcgtttcactgctgcgtaattgggccgccgacatcaatggttacgcaagctatggcgctgacacgctccttgcccagggcgccttcggtcgcgctgcccgggtgggcatactcgccggcactctccacaactattacgtcagcacccaatctgcatcatacaacttcgacgcccgacgcatccgaagcgaccgagtgcttttcgatgcggccaaggcttttcctgatggccaaaggtcggttacataa

SEQ ID NO: 31314 - protein, 250 aa, Unknown
  Obtained from environmental sample
  DOMAIN (5)...(177): Glycosyl transferase family 2
  misc_feature (1)..(250): Xaa is any amino acid
MTKVMIYTQCYNAENTVARTIESVLSQTHGDFLYHVVDNGSTDSTGDIIKSFADRDKRIKAVANAANNVWEPGNIYFEFLDGCDADSFFCMLDSDDDYKPTFLECMLAFIKDNRLDLAACGSDFLSNTNGSFLSARALEHDLILEGESFGLQFPIYHQFMRTYWGKLYRVSLLRNWAADINGYASYGADTLLAQGAFGRAARVGILAGTLHNYYVSTQSASYNFDARRIRSDRVLFDAAKAFPDGQRSVT

SEQ ID NO: 31315 - DNA, 891 bp, Unknown
  Obtained from environmental sample
  misc_feature (1)..(891): n is a, c, g, or t
ttgcaggcactggagacctacggctttcggggcgaggccctgcccagcattgcgggcgtgacgcggttcgaaatgcagagtgcagacgacgacggccacggctacaggctaagatccgagttcggcgtgataaagggcgtggagcctgccccaagggccaagggcaccactgtgactgtcagggacatattcgcgcagttgccggctaggaggcgcttcctgaagtctgcggagacagaaaacgcccacgtatgggcaacgctcacgcgactggcgctggcaacgcccgcagtgcgctgggtgatccgccccgctaggagcatggatctgaccctgccggccgcgcaggatctgaaacagcgcatcgtcctactgtcgggcgaaaggatgtcgcgcctggtgcccttcgccgacggcgaggcaccctggcggatgcacggctacatcagcccgcccgacctgtgctaccgcgaccgcaaccatctttaccttttcgtcaacggtaggccggtcagggacaggctgatgctgtcggccctatccagcggctgggagggctttttccaaaagggcacctttcctgcggtggtcctgtttctggagataccggccgaggccgtcgacgtgaacgtgcatcctaccaagtccgaggtccgcttccgcgagccgcagcgggttttcccctggataagcagggccacgcgcgaggcctggggcgcggccaagggcgaactgcccagtttttttgccacgccgtccagacctttctatggcgggttcgatgcgccgccagcgggcacaccgaacaacgccgcgccgcagcagcaagaccgcccctatacgcagtacgcgccatacgggcaccaggacgaacacaggggaagcccctga

SEQ ID NO: 31316 - protein, 296 aa, Unknown
  Obtained from environmental sample
  DOMAIN (126)...(239): DNA mismatch repair protein, C-terminal domain
  misc_feature (1)..(296): Xaa is any amino acid
MQALETYGFRGEALPSIAGVTRFEMQSADDDGHGYRLRSEFGVIKGVEPAPRAKGTTVTVRDIFAQLPARRRFLKSAETENAHVWATLTRLALATPAVRWVIRPARSMDLTLPAAQDLKQRIVLLSGERMSRLVPFADGEAPWRMHGYISPPDLCYRDRNHLYLFVNGRPVRDRLMLSALSSGWEGFFQKGTFPAVVLFLEIPAEAVDVNVHPTKSEVRFREPQRVFPWISRATREAWGAAKGELPSFFATPSRPFYGGFDAPPAGTPNNAAPQQQDRPYTQYAPYGHQDEHRGSP

SEQ ID NO: 31317 - DNA, 801 bp, Unknown
  Obtained from environmental sample
  misc_feature (1)..(801): n is a, c, g, or t
atgtggaacaaaccgggcggttttgccgcgttcgccggagggtggattcccgaagacgattgggataatacccaacgctcatggtttaccgacgccaagaaagcgcagggaaaaatcgcttattcagaaccttatgttgattccgaaacgggagatgtcatcattacactttcgatgacggtttttgacggggaaagaacggacataggagtgtcggcggacgatgtcgcggtaaatgtcatgaaagagataattgacgcaatgcgcggttttccgggacaggaaatgtatattattaacgccgacggactttttattacccatgaagatatcgaagcggttatggaaaaagatttctttaaagaattaaagcttgataaataccgcgcgtcggtattgggttcccaagaatttatcaatattgatgacaatgtttttatttattcttccgccataccgcgcaccggctggattcttgtgtcaacaataccgtcatccgtgatctttgatgatattaataccctgatcatccgccttgttattttatgcgcggcgatgcttgcggtagttgtttttattttaatcttttttgtagcgcggaaaatcagttctccgataaaggcgatacattcggctctggaaaagttaaaggacggggatttaaccgcaaaagttgacgttaagtccgaagatgaaataggggaattgtcgggctttttcaatatgactctgggaaaaataaaataccttgtaggaacaataaaaagcaaagtcaacggggcttacccaaaccagttttga

SEQ ID NO: 31318 - protein, 266 aa, Unknown
  Obtained from environmental sample
  DOMAIN (41)...(121): Cache domain
  misc_feature (1)..(266): Xaa is any amino acid
MWNKPGGFAAFAGGWIPEDDWDNTQRSWFTDAKKAQGKIAYSEPYVDSETGDVIITLSMTVFDGERTDIGVSADDVAVNVMKEIIDAMRGFPGQEMYIINADGLFITHEDIEAVMEKDFFKELKLDKYRASVLGSQEFINIDDNVFIYSSAIPRTGWILVSTIPSSVIFDDINTLIIRLVILCAAMLAVVVFILIFFVARKISSPIKAIHSALEKLKDGDLTAKVDVKSEDEIGELSGFFNMTLGKIKYLVGTIKSKVNGAYPNQF

SEQ ID NO: 31319 - DNA, 801 bp, Unknown
  Obtained from environmental sample
  misc_feature (1)..(801): n is a, c, g, or t
gtgaacgatatcctggacttttccaaaatagaatctggcaaactcgaattatcgccggttgagtattatatgtccagcctattgaacgatataattacccttactattacccgcctgggggaaaaacccatacagttccgtttgaatataaacgacgatctgccgaacaaactgttaggcgatgatctgcgggtaaagcaagtacttaccaatctgctaactaacgccattaaatatacccgcgaaggaagcatagagctcagcgtccattgtacgcgcgaaggcaatactgtgtggatggatgcggcggtcagcgacaccggtatgggtatacccaaggatgacataaaaaacctgttccttgattactatcaagtaaccgccaattccaaccgtcacattgaaggtactggattgggcttacccattaccaaaagacttgtagaaatgatggatgggaaaatcagcgtagagagcgagtacggtaaaggctcaaagttcagttttcgcgtaaggcagggctttgttgacgatacggttctcggagcggatgtctcggataaactccgtaacttctgttactccgatgaaaagaaaattgtcggtaaaaaattggtaagggtcaatttgagttacgccagggtactggtagtagacgatatggataccaatctggacgtggcggcgggtattttaggcaattacaagatgcaggttgactgtttaagcaacggccctgccgcgattgaacgaatacgcggcgggactccggtctacaacgctgtattcatgaccacatga

SEQ ID NO: 31320 - protein, 266 aa, Unknown
  Obtained from environmental sample
  DOMAIN (60)...(174): Histidine kinase-, DNA gyrase B-, and HSP90-like ATPase
  misc_feature (1)..(266): Xaa is any amino acid
MNDILDFSKIESGKLELSPVEYYMSSLLNDIITLTITRLGEKPIQFRLNINDDLPNKLLGDDLRVKQVLTNLLTNAIKYTREGSIELSVHCTREGNTVWMDAAVSDTGMGIPKDDIKNLFLDYYQVTANSNRHIEGTGLGLPITKRLVEMMDGKISVESEYGKGSKFSFRVRQGFVDDTVLGADVSDKLRNFCYSDEKKIVGKKLVRVNLSYARVLVVDDMDTNLDVAAGILGNYKMQVDCLSNGPAAIERIRGGTPVYNAVFMTT

SEQ ID NO: 31321 - DNA, 900 bp, Unknown
  Obtained from environmental sample
  misc_feature (1)..(900): n is a, c, g, or t
atgattgcnagaagggaattcgggcatacaacaattacgcccaacctcgtcgttaaggaagcaatggagcacatgaccgggcccgacagtaaaaaagtcgatctggttgaccccaccatccttaatctggcaggcaaggacagcttgtgtctaaggctcacggtccccattattaacaagcgcctggatgaaacagtcggggtcgtaggatgccggattaatatcgatctgttacagcctctggttgagcagacaataaaaaatttcgatgaagttaccagtatggcgatttactccaacagcgggtttattttggcgaattacctgccgcagatgatagggaagcagttggttgaagttgaaacgcaatacggcgaagatttagacgaagtcgccgaggctgttaaaaacgcgcgggaatgggaagtcgccagtttcgaccccgcgctgaaaacaactatgtatatgagcatagcccccattcccctggccgcttccccgacgacatggtcggtaatgatcggttcaaccgaagcttacatcctgaaagacgtcagggcaatgaccaaatttaccatcatgctgttggcaatagtagtgttggcggcgatggcgctggtgagcgtcctcatccgcgttgacgcggcaagaaccaaagccgacgtggaaagcaggcataaaagcgcgttcctcgccaacatgagccacgaactgcgcaccccgctcaacgtggttatcgggcttaccgacttaatactggaagacaaaaaactggacgtgcatacggcgggtaatctgataaagataagcagcgcgggcaactacgcttntgagcattgtgaacgatatcctggacttttccaaaatagaatctggcaaactcgaattatcgccggttga

SEQ ID NO: 31322 - protein, 299 aa, Unknown
  Obtained from environmental sample
  DOMAIN (226)...(285): His Kinase A (phosphoacceptor) domain
  misc_feature (1)..(299): Xaa is any amino acid
MIARREFGHTTITPNLVVKEAMEHMTGPDSKKVDLVDPTILNLAGKDSLCLRLTVPIINKRLDETVGVVGCRINIDLLQPLVEQTIKNFDEVTSMAIYSNSGFILANYLPQMIGKQLVEVETQYGEDLDEVAEAVKNAREWEVASFDPALKTTMYMSIAPIPLAASPTTWSVMIGSTEAYILKDVRAMTKFTIMLLAIVVLAAMALVSVLIRVDAARTKADVESRHKSAFLANMSHELRTPLNVVIGLTDLILEDKKLDVHTAGNLIKISSAGNYAXEHCERYPGLFQNRIWQTRIIAG

SEQ ID NO: 31323 - DNA, 441 bp, Unknown
  Obtained from environmental sample
  misc_feature (1)..(441): n is a, c, g, or t
atgggtaggggaaaaataaactataacgacagggcgcatacttttaagcggatgcatggcgtaaaaatgcatacatttaagcggatgaaagaaatcctcgacaaagaatacgaggaaatgcacaaaaaaggcggaagcccgccaaaattgtctgtggaagataaattatatgcgacgcttaaatacttgcgcgagtacaggacaatggagagcattgcagccgactacggcgttagtaaaagcacaatatgcgaatctatccaatgggtggagaacactttaacgaaagacggggcattcaaattgccagacagaaaagtattgaaagaggctgacggcacaatagattatatcgtgatcgatgtaacagaaagcccagtaaacaggccaaaaaaaaccaaaaatcctattattcaggcaaaaagaagcggcatacaataa

SEQ ID NO: 31324 - protein, 146 aa, Unknown
  Obtained from environmental sample
  misc_feature (1)..(146): Xaa is any amino acid
MGRGKINYNDRAHTFKRMHGVKMHTFKRMKEILDKEYEEMHKKGGSPPKLSVEDKLYATLKYLREYRTMESIAADYGVSKSTICESIQWVENTLTKDGAFKLPDRKVLKEADGTIDYIVIDVTESPVNRPKKTKNPIIQAKRSGIQ

SEQ ID NO: 31325 - DNA, 588 bp, Unknown
  Obtained from environmental sample
  misc_feature (1)..(588): n is a, c, g, or t
ttgcggccggcactcaaggccaggtccgcgccccagagcctggcccggccggcgaagcggggttcttcctgggccagggccgctttttcgtattccctgatcagttccagccagtggctccgggttttttggcgctcggcatcggccagaaaggcctcgcggttcttgttggcccgggccagttcgccttcggcccgggcctggccggccccggtcaagaggcagaagagcgcggccgcggccagggccgcccgtggccaggccctaggggcggccggggtcatggttccagatcctcggccagaaagttttgggcttcccggtgaagctcgttcaagaggttcagggattccaggggggtcagggtttccggggccagggcggccaggcgttgcaccagggccgggggctcggggcgggcgggggccggcggcccggccaggtcgaagaggctcaactgacggaccgccggacgcaccgcgaaatcgtgtccctcggacaggtcggccagcacttccttggcccggtccagcaccttgggcggcaggcccgccaaggcggccacggccaggccgtagctgcggctga

SEQ ID NO: 31326 - protein, 195 aa, Unknown
  Obtained from environmental sample
  misc_feature (1)..(195): Xaa is any amino acid
MRPALKARSAPQSLARPAKRGSSWARAAFSYSLISSSQWLRVFWRSASARKASRFLLARASSPSARAWPAPVKRQKSAAAARAARGQALGAAGVMVPDPRPESFGLPGEARSRGSGIPGGSGFPGPGRPGVAPGPGARGGRGPAARPGRRGSTDGPPDAPRNRVPRTGRPALPWPGPAPWAAGPPRRPRPGRSCG

SEQ ID NO: 31327 - DNA, 1191 bp, Unknown
  Obtained from environmental sample
  misc_feature (1)..(1191): n is a, c, g, or t
gtgaccaaggccaacctctctctggccccggcggattggatccgcaagcagaccatcaccgggggggaacgcttcctgaccccggaacttaaagaatgggaagaaaaaatcgccagcgccggcgaaaaacgtctggccctggaagagaggttttttgaggaactgaaaaccctggtcgcggcctgggccggccccatcaaggaggccgccgccatactggctgaactggacgtcctggccgccttcgccgccggggcggaaaaatacggctggacgcggccggaactgaccgaggaggacctaatcgacatatccggcggccgccacccggtggtggaagccttgatgcctccgggccagagtttcgtggccaacgatgtgcgcctgagcccccgcgaaaaaatcctggtcataaccggccccaacatggccggaaaatccacggttctgcgccagaccgccctcatagtcctcatgaaccaggccggcagtttcgtgccggccgcctcggcccgcctctccatccgagaccgcatattcacccgggtcggcgcggccgacgacctggcccggggccgctccaccttcatggtggagatgaacgaaaccgcccgcatcctggccttggccaccccccggagcctggtggtgctggacgaggtcggccggggcacttccacttacgacggcctggccctagcctgggccatcgccgaacatctccacgacctggacggccggggcgtatccactctcttcgccacccattaccacgagttggtcaagctggccgaaagcaaacgcctggtgcgcaatttcaacgtctcggtcaaaaaaaccggcccccgcataaccttcatgcgcgaactcaagcccggcggggtcagccgcagctacggcctggccgtggccgccttggcgggcctgccgcccaaggtgctggaccgggccaaggaagtgctggccgacctgtccgagggacacgatttcgcggtgcgtccggcggtccgtcagttgagcctcttcgacctggccgggccgccggcccccgcccgccccgagcccccggccctggtgcaacgcctggccgccctggccccggaaaccctgacccccctggaatccctgaacctcttgaacgagcttcaccgggaagcccaaaactttctggccgaggatctggaaccatga

SEQ ID NO: 31328 - protein, 396 aa, Unknown
  Obtained from environmental sample
  DOMAIN (91)...(327): MutS domain V
  misc_feature (1)..(396): Xaa is any amino acid
MTKANLSLAPADWIRKQTITGGERFLTPELKEWEEKIASAGEKRLALEERFFEELKTLVAAWAGPIKEAAAILAELDVLAAFAAGAEKYGWTRPELTEEDLIDISGGRHPVVEALMPPGQSFVANDVRLSPREKILVITGPNMAGKSTVLRQTALIVLMNQAGSFVPAASARLSIRDRIFTRVGAADDLARGRSTFMVEMNETARILALATPRSLVVLDEVGRGTSTYDGLALAWAIAEHLHDLDGRGVSTLFATHYHELVKLAESKRLVRNFNVSVKKTGPRITFMRELKPGGVSRSYGLAVAALAGLPPKVLDRAKEVLADLSEGHDFAVRPAVRQLSLFDLAGPPAPARPEPPALVQRLAALAPETLTPLESLNLLNELHREAQNFLAEDLEP

SEQ ID NO: 31329 - DNA, 483 bp, Unknown
  Obtained from environmental sample
  misc_feature (1)..(483): n is a, c, g, or t
atggagactctctgggcgccttggcgtatgagctatatcaccggtgaacgggaaaagggctgttttctgtgcctgcccccggaccacctggggccggaccgtagccgtctccttctgttcagcgacccccagatcctggtgatgctgaacctttatccctacaacaacgggcatctgctcatctccccccggcggcacatcccctccctttccgccgccggggaagccgaacgcctggccctcatgaaccaggcggcccgggccaccgacatcctggaacgcttcctccggcctcagggcttcaacatcggcatcaaccagggccgggtttccggcggcagcgtcgaagaccacctccacctccacgtcaccccccgttacctgggcgacagcaattacatgaccgtcctgggccaggccagggtcatctccgaacacatcctggccacctacgacaaactggtgtccgccttcaatgaatga

SEQ ID NO: 31330 - protein, 160 aa, Unknown
  Obtained from environmental sample
  DOMAIN (24)...(129): HIT domain
  misc_feature (1)..(160): Xaa is any amino acid
METLWAPWRMSYITGEREKGCFLCLPPDHLGPDRSRLLLFSDPQILVMLNLYPYNNGHLLISPRRHIPSLSAAGEAERLALMNQAARATDILERFLRPQGFNIGINQGRVSGGSVEDHLHLHVTPRYLGDSNYMTVLGQARVISEHILATYDKLVSAFNE

SEQ ID NO: 31331 - DNA, 612 bp, Unknown
  Obtained from environmental sample
  misc_feature (1)..(612): n is a, c, g, or t
gtgcggggtgccggtgagcgccggcctggcctacgccaaccgcctgaccgaggccgggcagcgcgtggtggtggccaaccaggtgggggacccttcgaaaatcaagggcctggtgccccgggccgtctggcaggtgggcaccccggggctgcccctgaccgccgaggggacggcccccggcgaggcccactacctggccgcggtgcggccccaggccggccgcctgggcctggcggccctggaagtctccaccggggaactggtcttggggaccttcgaagattgggaaaacctccggtcggaattttcggccttgaacccccgcgaatgtctcttgccggaagattcgccgccggagttcctggagcttctgaagcaggaacacatcttccccacctttcggccggcccgggacccggccgaagggctccgggaactggagacccttttcggaacctccgccctggcggcctgggaactggacaaatggccggaagcggccggggcggccggggcggtcctggcctacgcccgggaatgcggccagggcgaattcaagcacctggccccgccgcgcctgttgtggagccagccccacctggtcttggatga

SEQ ID NO: 31332 - protein, 203 aa, Unknown
  Obtained from environmental sample
  misc_feature (1)..(203): Xaa is any amino acid
MRGAGERRPGLRQPPDRGRAARGGGQPGGGPFENQGPGAPGRLAGGHPGAAPDRRGDGPRRGPLPGRGAAPGRPPGPGGPGSLHRGTGLGDLRRLGKPPVGIFGLEPPRMSLAGRFAAGVPGASEAGTHLPHLSAGPGPGRRAPGTGDPFRNLRPGGLGTGQMAGSGRGGRGGPGLRPGMRPGRIQAPGPAAPVVEPAPPGLG

SEQ ID NO: 31333 - DNA, 573 bp, Unknown
  Obtained from environmental sample
  misc_feature (1)..(573): n is a, c, g, or t
ttgggtttcagcatagggatcgcctatacacagatgatatggtggcagttatacgcgccttcatgccctgttcggacaacaaattacgggcctgagctttatgttgattttccatttaatcgtgagtcaggcaatgccagtatattctaccaaggcattaaatttgcagtggcgcacaaatcaaacggcaaggatggcgaagatagccgcagttggaactggatctatattgaatcccccatttcaattgggcggtttctgtttgttcctcgtatatggtggtcttatgtcggaataatagaccctttttccgttagagaaattcagcgatatatgggtatatgcgacttgactatcgtaagccactggaatagtcatgttcttcgggtttatggaaggtctaatttaaacgttaaaaatttaaagggagctttgcgggtcgattatagttaccccatagccgcgacaggtttctatttttacctgcaatattttttgggatacggcgaaagcctcattgattatgaccggctggtgaacaaaattgggaccggcttggctttaagcagatga

SEQ ID NO: 31334 - protein, 190 aa, Unknown
  Obtained from environmental sample
  DOMAIN (1)...(189): Phospholipase A1
  misc_feature (1)..(190): Xaa is any amino acid
MGFSIGIAYTQMIWWQLYAPSCPVRTTNYGPELYVDFPFNRESGNASIFYQGIKFAVAHKSNGKDGEDSRSWNWIYIESPISIGRFLFVPRIWWSYVGIIDPFSVREIQRYMGICDLTIVSHWNSHVLRVYGRSNLNVKNLKGALRVDYSYPIAATGFYFYLQYFLGYGESLIDYDRLVNKIGTGLALSR

SEQ ID NO: 31335 - DNA, 417 bp, Unknown
  Obtained from environmental sample
  misc_feature (1)..(417): n is a, c, g, or t
gtgaaagagggggagtacaatattgacggactctttacgggacggcgcatactgctggccgaagacgtggagataaaccgcgagatagtgcttgcgctgcttgaaccgacacggttggagatagactgcgccgaaaacggaacggatgccgtgcgtaaattcagcgcggcgccggatgcgtacgatttaattttcatggacatccaaatgcccgaaatggacggttatgaggcgacacagcgtatcagggctattgaggcggaacgcaatgccagggcagttccgataatagcaatgacagcaaatgtattcaaggaagacattgaaaaatgtttagaggccggcatgagcgaccacgtgggaaagccgttgaatttcgatgaagttctggaaaaactaaagatttatctgaggtaa

SEQ ID NO: 31336 - protein, 138 aa, Unknown
  Obtained from environmental sample
  DOMAIN (15)...(134): Response regulator receiver domain
  misc_feature (1)..(138): Xaa is any amino acid
MKEGEYNIDGLFTGRRILLAEDVEINREIVLALLEPTRLEIDCAENGTDAVRKFSAAPDAYDLIFMDIQMPEMDGYEATQRIRAIEAERNARAVPIIAMTANVFKEDIEKCLEAGMSDHVGKPLNFDEVLEKLKIYLR

SEQ ID NO: 31337 - DNA, 636 bp, Unknown
  Obtained from environmental sample
  misc_feature (1)..(636): n is a, c, g, or t
ttgcagggatttaactgctccggttttacaaaatggctgatagacggcattctgcgccccgttacgggagcgaggttatcaatcccgccgcttaaagcgccgtttggaaaaagaggctcttcttttaccgccaaatgggaaaaagaaagggatgtctttttcggactggactggatcaggaatcttgcctcggaggcgaatgggacccttagaacttcctcgcaccgcgcgcttgaagaatttgaaatccgacgcgatgatttcgcctatgttctggtaaacgaaaacaggtcttttgtcgttcactcctaccccggctttttgtcggaagccggatacggcgttgagggacttcatcccctgctctacaccctcgcgattgacgagccgttttgtttctatcttgccgccgtaaataaagaattcgacaatccttcatcaccccgtggaactccgcgccttcgccagtatttccatgtggccgcgcttgtcccatattttgacgaaaacggattttttaaaatcgtagtttttgaaagcgcggaggaaacttcattttccgatttccgaaaacgccattcaggtcgtcatgtaaatcttgtaaaaattccaatctcacccactttcgatccgtga

SEQ ID NO: 31338 - protein, 211 aa, Unknown
  Obtained from environmental sample
  misc_feature (1)..(211): Xaa is any amino acid
MQGFNCSGFTKWLIDGILRPVTGARLSIPPLKAPFGKRGSSFTAKWEKERDVFFGLDWIRNLASEANGTLRTSSHRALEEFEIRRDDFAYVLVNENRSFVVHSYPGFLSEAGYGVEGLHPLLYTLAIDEPFCFYLAAVNKEFDNPSSPRGTPRLRQYFHVAALVPYFDENGFFKIVVFESAEETSFSDFRKRHSGRHVNLVKIPISPTFDP

SEQ ID NO: 31339 - DNA, 564 bp, Unknown
  Obtained from environmental sample
  misc_feature (1)..(564): n is a, c, g, or t
atgcctgtattttttgttattttgcttgttttacttaatatttccccggtttacagtcttgatctgcccgtctctaaaatatcggacgactcgattgtaagattaaaaattaaagacacatggatgatagagacgcctgccagagtactgtcgcagtacacaagaagagaaacgctggaaaccggagagagggtggaaatccgcaccagtgaaggcagggaagaatttatggtgcacgtatcgcgggagttgatgcgcgggacgagcgagtcaaaccgcataggcacaggacaattccccggctggattcagggttcgtggatgctgacgcggcgcaaggataccggcgcgggcacacagataaaaatatttttgcgttccgatcagcaaacctttattcaattccatccttttacttctgacaaatgccttatggacgcggttgtatacggcggctttgtcgcccattcaataccggtcgctgttccgtttgagcgtctgtatacaatgccgttaaacgatatttacaacttgttgaaaataaattccaataagatactttga

SEQ ID NO: 31340 - protein, 187 aa, Unknown
  Obtained from environmental sample
  SIGNAL (1)...(19)
  misc_feature (1)..(187): Xaa is any amino acid
MPVFFVILLVLLNISPVYSLDLPVSKISDDSIVRLKIKDTWMIETPARVLSQYTRRETLETGERVEIRTSEGREEFMVHVSRELMRGTSESNRIGTGQFPGWIQGSWMLTRRKDTGAGTQIKIFLRSDQQTFIQFHPFTSDKCLMDAVVYGGFVAHSIPVAVPFERLYTMPLNDIYNLLKINSNKIL

SEQ ID NO: 31341 - DNA, 693 bp, Unknown
  Obtained from environmental sample
  misc_feature (1)..(693): n is a, c, g, or t
atgatataccatatttttatagggtctacccttgatgaccttaaaaacgagcgcagggaaatccagcgcattattatggaacttggtcatattcccgtatccgcggaatatctggacagtacttcaaaaaactacaaaaaactgcttgaaaaaacaatatcggaatgtgatttctttatcgctgtcatcgccgatatgtacgctccaaaaggcgcgaaaatatctccgttggaaactgaatgtaatattgccgacaaaaacaatgttcctgtaatttcttttatcaaggtcgagaaggctcgcagtacagctcgcaattcagcggcgcgaaaagtaaagggagacggttttgaaaaaagactggaagcatttaaagagagacttggcaagggtataagcgagatatggcttgactctaaagacctttgccggaaattgcaaagccagcttgtccagcagatcaatcttactctgcgcaacggatgggtcaggtcggatcagactttcgcgccgtcggttgcaaatgaactgtcgcggctttcgacggagaacgaacagctcaggcaccagataaaaattgacagcaacgacattgttacaagactgcgcgtacaaatcaaaaacacatttaaggtgcttgcggtaaataaagtcatattgagttttcattatgagtctcgtgccgaattctga

SEQ ID NO: 31342 - protein, 230 aa, Unknown
  Obtained from environmental sample
  misc_feature (1)..(230): Xaa is any amino acid
MIYHIFIGSTLDDLKNERREIQRIIMELGHIPVSAEYLDSTSKNYKKLLEKTISECDFFIAVIADMYAPKGAKISPLETECNIADKNNVPVISFIKVEKARSTARNSAARKVKGDGFEKRLEAFKERLGKGISEIWLDSKDLCRKLQSQLVQQINLTLRNGWVRSDQTFAPSVANELSRLSTENEQLRHQIKIDSNDIVTRLRVQIKNTFKVLAVNKVILSFHYESRAEF

SEQ ID NO: 31343 - DNA, 606 bp, Unknown
  Obtained from environmental sample
  misc_feature (1)..(606): n is a, c, g, or t
ttgatctgttcggtatatttatccgctgcggcgcactcgcttaaatcagtttcagattacggcactttcggctttcttgattttttcaagtccttcaaagccgcgtggccttccggcatagtgatgggcctttttgtagttttactnttcgttatgatatctattgtaattccgttttacatgagcatggaatccctttttggttttcttttaggaatgatagtattctgggctgtagtttttggcgttctttccttccagttttattttacggtctgcgccagattaagcccaaaccttaaaaaagcatttaagaagtgcatgttaatctccgttgacaataccggcctttctatttttctgtttctgcacaatgtagtaggcctgatactttccgtttttctcgcgtttgttttccccggccccgccggcgttcttctgtatcttgatgaagccgttcgcctgcgcctgttaaagtacgactggcttgaagccaaccccggcgccgatcgcaaaaaaattccctgggacgagcttcttgttgaggagcgcgagaagacagggacgcgcactttgaagaatttgatttttccttggaaggattag

SEQ ID NO: 31344 - protein, 201 aa, Unknown
  Obtained from environmental sample
  misc_feature (1)..(201): Xaa is any amino acid
MICSVYLSAAAHSLKSVSDYGTFGFLDFFKSFKAAWPSGIVMGLFVVLLFVMISIVIPFYMSMESLFGFLLGMIVFWAVVFGVLSFQFYFTVCARLSPNLKKAFKKCMLISVDNTGLSIFLFLHNVVGLILSVFLAFVFPGPAGVLLYLDEAVRLRLLKYDWLEANPGADRKKIPWDELLVEEREKTGTRTLKNLIFPWKD

SEQ ID NO: 31345 - DNA, 615 bp, Unknown
  Obtained from environmental sample
  misc_feature (1)..(615): n is a, c, g, or t
atgaagaaatcggcgttttttcttttgtttctcgttctggctttcgcgcttctggcgcagcagatggaaagcgaggattcctcccaaggctctcctcttgtacagacttctgctaaagaacattttgatagaggtaaaatgttctccgatcagaacgatcttgatagcgctatttcggaattcactgaagcaataagattagatcctaatttttcagacgcttatgcctaccgcgccagagtgtataatgggaaactagattatgaccatgctcttgctgatagcaatacagctctaagactgaatcccggtaatgctattggctattttgcccgtggcagtgcgtattcaggtaagaaggattatgacaatgccatcgctgattacacacaggccataaggattgattccaattttacttttgcttatggcaatcgaggcaatgcgtattcagaaaagaaggattacgacagcgccatcgctgatttcacccagatgataaggcttaatcccaatgaggctggtgcctattacaatcggggcaatgcgtatcaatacggtaagaaggactatgacaatgccattgtggatacacccaggcctcggccgatctga

SEQ ID NO: 31346 - protein, 204 aa, Unknown
  Obtained from environmental sample
  SIGNAL (1)...(19)
  DOMAIN (38)...(71): Tetratricopeptide repeat
  misc_feature (1)..(204): Xaa is any amino acid
MKKSAFFLLFLVLAFALLAQQMESEDSSQGSPLVQTSAKEHFDRGKMFSDQNDLDSAISEFTEAIRLDPNFSDAYAYRARVYNGKLDYDHALADSNTALRLNPGNAIGYFARGSAYSGKKDYDNAIADYTQAIRIDSNFTFAYGNRGNAYSEKKDYDSAIADFTQMIRLNPNEAGAYYNRGNAYQYGKKDYDNAIVDTPRPRPI

SEQ ID NO: 31347 - DNA, 699 bp, Unknown
  Obtained from environmental sample
  misc_feature (1)..(699): n is a, c, g, or t
atgcaaataagggaatacccaagcgaccaagaatacaaagaaatgctagctcaaaaaccgagcggtgcaaacctcattattcccgttggtgtgcgaattttggcagataccgaaactccagttagcgttctttccaagtttatggacgaaagttcgctttttttgtttgaatccgttgaaggcggcgagcattggggcagatatagctttttagggttttctccgcacctggaaattcaagtttttagctctattgtaaaggtgaataaaaaaggaaaagtagaggaaattccacataatggcgaacctttggatattttgcgaaaaatagcaagtgagtactgctatgcagaacttgcaggactacccaaattcaaaggcggttttgtgggttattttgcctacgaaatggtatctttttttgaaccaagggtaaaaagcaaattatcgcccgaacaaccgttcgcgcattttattttgcccgaaatacttttagcctttgacaacgttcaccacaccttagacttaatgtctttcgctttttcagaagacgattttcaaaacgcaaaagaaagactaaacaccacattaaaaaagttctcaaatccaaatcctcaaatcataaacacaaaaaaatccacattcataccacaaccattgatgcagccagaagatttagagcgatggtggaaaaaataa

SEQ ID NO: 31348 - protein, 232 aa, Unknown
  Obtained from environmental sample
  DOMAIN (29)...(176): Anthranilate synthase component I, N terminal region
  misc_feature (1)..(232): Xaa is any amino acid
MQIREYPSDQEYKEMLAQKPSGANLIIPVGVRILADTETPVSVLSKFMDESSLFLFESVEGGEHWGRYSFLGFSPHLEIQVFSSIVKVNKKGKVEEIPHNGEPLDILRKIASEYCYAELAGLPKFKGGFVGYFAYEMVSFFEPRVKSKLSPEQPFAHFILPEILLAFDNVHHTLDLMSFAFSEDDFQNAKERLNTTLKKFSNPNPQIINTKKSTFIPQPLMQPEDLERWWKK

SEQ ID NO: 31349 - DNA, 690 bp, Unknown
  Obtained from environmental sample
  misc_feature (1)..(690): n is a, c, g, or t
ttgctagggttatacagagcacagagatttataaatccctctccctatctttactttatgaaactcggcggcacaacccttgtcggctccagtcccgaaacaatgattagggtagaaaactcagttgcaacgctgcgccccattgctggcaccagaccaaggggaaaaaccgcagaagaagattcacgccttgccgaagaacttttgaaagacgaaaaagaagttgccgaacacgttatgcttgtggatttggggcgcaatgagcttggcaggattgcaaaagcgggaacggtcaaggtcaacgattttatgattatagagaggtattcccacgttatgcacattgtgtctaacataaaagcagaacttgataattcctacgatatttttgatgttctaaaagccgcatttccagcaggcacgctctccggtgcgccaaaggttagggctatggagataattgcggaatgtgaaacaagggcaaggggcaattatggcggtgcagtgggctatatgacttttgacggaagaatggattttgcaatttgcattcgcacagcggtggtgcaaaacggcaaattgacattgcaggcaggggcaggaatagttgcagacagcgaccccgaaacggagaggcaagaaactataaataaagctaaatctgttgccaaagctttggagatgctatga

SEQ ID NO: 31350 - protein, 229 aa, Unknown
  Obtained from environmental sample
  DOMAIN (1)...(226): chorismate binding enzyme
  misc_feature (1)..(229): Xaa is any amino acid
MLGLYRAQRFINPSPYLYFMKLGGTTLVGSSPETMIRVENSVATLRPIAGTRPRGKTAEEDSRLAEELLKDEKEVAEHVMLVDLGRNELGRIAKAGTVKVNDFMIIERYSHVMHIVSNIKAELDNSYDIFDVLKAAFPAGTLSGAPKVRAMEIIAECETRARGNYGGAVGYMTFDGRMDFAICIRTAVVQNGKLTLQAGAGIVADSDPETERQETINKAKSVAKALEML

SEQ ID NO: 31351 - DNA, 306 bp, Unknown
  Obtained from environmental sample
  misc_feature (1)..(306): n is a, c, g, or t
atgttagacacaatgtgcataacgtgggaatacctctctataatcataaaatcgttgaccttgaccgttcccgcttttgcaatcctgccaagctcattgcgccccaaatccacaagcataacgtgttcggcaacttctttttcgtctttcaaaagttcttcggcaaggcgtgaatcttcttctgcggtttttccccttggtctggtgccagcaatggggcgcagcgttgcaactgagttttctaccctaatcattgtttcgggactggagccgacaagggttgtgccgccgagtttcataaagtaa

SEQ ID NO: 31352 - protein, 101 aa, Unknown
  Obtained from environmental sample
  misc_feature (1)..(101): Xaa is any amino acid
MLDTMCITWEYLSIIIKSLTLTVPAFAILPSSLRPKSTSITCSATSFSSFKSSSARRESSSAVFPLGLVPAMGRSVATEFSTLIIVSGLEPTRVVPPSFIK

SEQ ID NO: 31353 - DNA, 975 bp, Unknown
  Obtained from environmental sample
  misc_feature (1)..(975): n is a, c, g, or t
atggggcagaaggctttgcaaatgagccggcagcgccggacggacggaaagcacatgtttaccggggaaggcgaactgcaaaaaggcgttgccgctttgctcggcgtcaatatcgtctgggcgctgctgcccatgtactggacgcagctcacgcacgtgtccgcgtttgaagtactctgccaccgctcctgctggggttttctcctgatcgccgttttgctccgggcgcaaggcggactgtccgaagtcagggagatcgtgcgcaaccgccgcagcctcgccttcatggccggatgcagcatgtcgcaaatgttcggctggngattttatatctgggcggtcggctccgggcatattctggacgtggcgctcggccactataccctgcccatgctcagcgtactctgcggttttttcctgttccgcgagcggccccgccgtctgcaatggttcgccatcgccacggcggccgcaggcgtcctgggcatggtggtctggtacggctccttgccgtgggtgggcttgctcgtcgcttgcaacggcgtcctcttcgccgccatacgcaaacacgccccggtcaacgccgtgccgggcctttgcctggaactgctcatttccgcgcccgtcctgtggtcgtatctcatctacctgatatattccggcaacagcgcatttttgaccgtcagcccggcgcaggacctttggctcatcggcgcgggcatcgtgaccatcatcccgcaaatgggctatgcgtacggcctctgccgggtgcccctgacgaccatcagcctcatgcagtacctgccgcctacgggcaacgtgctggtgggcgtcctgttcctgaatgaagccttcacccgggacaaaatcttcggtttcgcgtgcatctggacgggcctcgtgatcttctcgctggacgcctggcgcttccatcaaaggaacctgaaattcctccgcaggccggcagggcaatag

SEQ ID NO: 31354 - protein, 324 aa, Unknown
  Obtained from environmental sample
  DOMAIN (175)...(305): Integral membrane protein DUF6
  misc_feature (1)..(324): Xaa is any amino acid
MGQKALQMSRQRRTDGKHMFTGEGELQKGVAALLGVNIVWALLPMYWTQLTHVSAFEVLCHRSCWGFLLIAVLLRAQGGLSEVREIVRNRRSLAFMAGCSMSQMFGWXFYIWAVGSGHILDVALGHYTLPMLSVLCGFFLFRERPRRLQWFAIATAAAGVLGMVVWYGSLPWVGLLVACNGVLFAAIRKHAPVNAVPGLCLELLISAPVLWSYLIYLIYSGNSAFLTVSPAQDLWLIGAGIVTIIPQMGYAYGLCRVPLTTISLMQYLPPTGNVLVGVLFLNEAFTRDKIFGFACIWTGLVIFSLDAWRFHQRNLKFLRRPAGQ

SEQ ID NO: 31355 - DNA, 975 bp, Unknown
  Obtained from environmental sample
  misc_feature (1)..(975): n is a, c, g, or t
gtggggtccaggcatgggtgtcgggcgttcgtgggtaacgattgcgcattggttccctcggcgatgcgcgggacggcaagcgggctcggatatttcacacatgtcggcggcggactcgtcgcgcgggttatacggggcgccgttgtgctttttggcgcgagcgaatgggaggcggcatgttattgggcgcctgcggcgattgtgctgctgtgtgtcntcgtcgtctggttcgtggggcgctctattccggagagtgaaggactgccgccgctcgaagaagtatttccggaagaagtacaccatgaactcgtcaagaccgaccgggccgatcgcgacaaatccacatggcagttggtacgcctgtatatcctgccgaatctcaacgtatggctcgtgtccattcttgatgtatgcgtgtatgccgtgcgtttcggcgtcgtgacctggattccgctgtaccttttgcaggtcaaagggctggcgcgccatgaaatggccttcgcctttctcatctttgaatgggcggccattccgtcaacgcttcttgccggcatcatcagcgataaagtctttaaaggccacaggatgccgctggcctttatcgcgttcagcatcatctttgtgacgattttcgtgtactggtcggcgacggatgtccgcatcatcagcgcatctctcgcgctgatcggatgcatggtctatattccgcagtgcatggcctatgtgcaaaccatggaaatagtgccgcaggttgccgtcggcgcggccaccggaatgcgcggcctgatgagttaccttgtcggctcaagtatgggaaccgcactcttcggcctgctggccgatcatttcggctggacggccggcttctatctgctgattgtgtttgcggtgctcggcatcctggcgtgcatcctgatgcacgtgagcgtgctgaaaatggaaagagccaacagactgcaagccgctgcggcctga

SEQ ID NO: 31356 - protein, 324 aa, Unknown
  Obtained from environmental sample
  misc_feature (1)..(324): Xaa is any amino acid
MGSRHGCRAFVGNDCALVPSAMRGTASGLGYFTHVGGGLVARVIRGAVVLFGASEWEAACYWAPAAIVLLCVXVVWFVGRSIPESEGLPPLEEVFPEEVHHELVKTDRADRDKSTWQLVRLYILPNLNVWLVSILDVCVYAVRFGVVTWIPLYLLQVKGLARHEMAFAFLIFEWAAIPSTLLAGIISDKVFKGHRMPLAFIAFSIIFVTIFVYWSATDVRIISASLALIGCMVYIPQCMAYVQTMEIVPQVAVGAATGMRGLMSYLVGSSMGTALFGLLADHFGWTAGFYLLIVFAVLGILACILMHVSVLKMERANRLQAAAA

SEQ ID NO: 31357 - DNA, 405 bp, Unknown
  Obtained from environmental sample
  misc_feature (1)..(405): n is a, c, g, or t
ttgcaaacgatttcggggcagggaggccggatcacggggcttgcgtacagtccggacggtaaaaaaatcgcctcttgtaccgcagaggaaccggcacttaagatatgggacgcggaaaccggaaggcaaataagaagcatacccattgaggatggggcgccttattctctggcatggagtcctgatggtaaacgccttgcggttggttatatatatgataagagtgatggctgtatgtatatatttaatgcggaaaccggcgcagaaatacatgatatttgggtaaacggtgctccccagtcattaacatggacacctgatggcagacggatcatcactgcctgtaattttagcgacgcacggtttatcaaggtgtttgacgctttaagcgggaaggagctgtaa

SEQ ID NO: 31358 - protein, 134 aa, Unknown
  Obtained from environmental sample
  misc_feature (1)..(134): Xaa is any amino acid
MQTISGQGGRITGLAYSPDGKKIASCTAEEPALKIWDAETGRQIRSIPIEDGAPYSLAWSPDGKRLAVGYIYDKSDGCMYIFNAETGAEIHDIWVNGAPQSLTWTPDGRRIITACNFSDARFIKVFDALSGKEL

SEQ ID NO: 31359 - DNA, 885 bp, Unknown
  Obtained from environmental sample
  misc_feature (1)..(885): n is a, c, g, or t
ttgatcgcggcggccgagaccgcgccgcagcggggcgacagcccgggcagcataatcattccagggctctgcgcctcgatttgctccaccgccgccgctatatttatggcaaagcttttggcgaacagaagcagggccaaggctccgccgccgcaaaccgccgccgaatcctcgaagccggaagagataaacgcggcaaaatcggaggaacccgaactctccccgccaagcgccgtcggaaagatcgtcgcgtggctctcaataatagccgtaatcgccgccatcccatattccatatataagagttataatatcggcgagttgccgggcggggtcctcggctacgtaacggcggggtcaacgtggctaatccctatattgatggggggtttgctattgggcggatacctctacggggtaaaggtctacgagaccgccaccgagggggcgaaggagggattcaacgtcgctgtgaggattatccctttcgtaactgtgatattcgtcgccataggaatgttgcgggcaagcggggcgcttgaactctttacatccttcgtcggaaaatacacgatgtgggaggtgcatggtaaatggataggtatgcctccggaatgcataccccacgcgctgctcaggccgctctccggcgtgggcgctttcgggtacatggcggaacttgtgaacaaagcccctgactctctcggagcgttcgtatcgtccgtactgcacgggtcaacggacacgacgttctacgtcttagccgtgtacttcggctccgtaggcatacaaagaacccgccacgcgcttgcggccggactaactgcggacttcgtggggatgctcgcggcggtaatattcgcgaacctattttacgggagatga

SEQ ID NO: 31360 - protein, 294 aa, Unknown
  Obtained from environmental sample
  DOMAIN (157)...(265): Nucleoside recognition
  misc_feature (1)..(294): Xaa is any amino acid
MIAAAETAPQRGDSPGSIIIPGLCASICSTAAAIFMAKLLANRSRAKAPPPQTAAESSKPEEINAAKSEEPELSPPSAVGKIVAWLSIIAVIAAIPYSIYKSYNIGELPGGVLGYVTAGSTWLIPILMGGLLLGGYLYGVKVYETATEGAKEGFNVAVRIIPFVTVIFVAIGMLRASGALELFTSFVGKYTMWEVHGKWIGMPPECIPHALLRPLSGVGAFGYMAELVNKAPDSLGAFVSSVLHGSTDTTFYVLAVYFGSVGIQRTRHALAAGLTADFVGMLAAVIFANLFYGR

SEQ ID NO: 31361 - DNA, 522 bp, Unknown
  Obtained from environmental sample
  misc_feature (1)..(522): n is a, c, g, or t
ttgttaacgttgatcggtgcgtgcgaatacttttgtgaagataggtacgcgatgaaaaaggtcgaaatattcaccgacggcgcctgctccggcaatccggggcccggcggctacggcgttgtcatgaggtatgaaaagcacgagaaggagctatccggcggctacgccgagaccactaacaaccgcatggagctcttgggggcgatagtcgctttagagtcgcttaaggagccctgcgacgtgaccgtcaccaccgactcgcagtacgtggtcaacggcatagagaagggttgggcgaggaagtggaaggcgatgggctggatgcggaacaagaaggagccggcgctcaacgccgacctttgggagaagctcttgcaggccgcggagcggcacaaggtgaggttcgtttggatacgcgggcacaacgggcacgcggaaaacgagcggtgcgacaaattggcggtggcggcgtcggcgaagccgggactgcctaaagacgaagggatggtggcgaagtggtga

SEQ ID NO: 31362 - protein, 173 aa, Unknown
  Obtained from environmental sample
  DOMAIN (18)...(159): RNase H
  misc_feature (1)..(173): Xaa is any amino acid
MLTLIGACEYFCEDRYAMKKVEIFTDGACSGNPGPGGYGVVMRYEKHEKELSGGYAETTNNRMELLGAIVALESLKEPCDVTVTTDSQYVVNGIEKGWARKWKAMGWMRNKKEPALNADLWEKLLQAAERHKVRFVWIRGHNGHAENERCDKLAVAASAKPGLPKDEGMVAKW

SEQ ID NO: 31363 - DNA, 900 bp, Unknown
  Obtained from environmental sample
  misc_feature (1)..(900): n is a, c, g, or t
ttgcaccaggcgcagccggtgctgctgtcgcattatnggatgtcgctcttctccattctagaacgagaaaagagccgtataaatcacgcccgcgtctcttccgacatcctgccgcttggttccgccgcgatagccggcagcggattttgcgtggacagggacggcatcgccgccgagcttggtttctcgtcggtgtcggccaacagtatggacatggtggcctctcgtgattttctcatagaggcgctgtcgtctttcgcgtctatcggcatacaccttagccgctacgcggaggacctgattatatggtcgtcgagggagttcggctttgtggagctagacgacgcgtggtcgaccggttctagcatgatgccgcagaagaagaatcccgattcgttggaattgatcaggggcaagagcgggcggctaataggcaattacgttcgcgccgccactacgctcaaaggcttggggctagcctattacaaagacctgcaggaggacaaagagcctctcttcgatagcgttaatacggtatgtatggcgataaacgtattcgcgaatgttatagccacgcttaaagtacgtgaggataagattaaacaaggcctggatccgttcctgcttgccacggacatggccgattatttagtccgcaaaggaatgccgttccgtcaagcgcataaagtggtcgggcgtttggtgggatattgcgcggagtccggtgttgcgcttacggatgtatctataggaaagctcaaggaattttcggatatgtttagtgatgacgttactgatttatactcgtgggaaaaagccgtcaattccagagccgttaaaggcggaacgagtttgtccggcgtagaggcgcaaatcgcggcggcgggaaaaattgtctga

SEQ ID NO: 31364 - protein, 299 aa, Unknown
  Obtained from environmental sample
  DOMAIN (1)...(145): Lyase
  misc_feature (1)..(299): Xaa is any amino acid
MHQAQPVLLSHYXMSLFSILEREKSRINHARVSSDILPLGSAAIAGSGFCVDRDGIAAELGFSSVSANSMDMVASRDFLIEALSSFASIGIHLSRYAEDLIIWSSREFGFVELDDAWSTGSSMMPQKKNPDSLELIRGKSGRLIGNYVRAATTLKGLGLAYYKDLQEDKEPLFDSVNTVCMAINVFANVIATLKVREDKIKQGLDPFLLATDMADYLVRKGMPFRQAHKVVGRLVGYCAESGVALTDVSIGKLKEFSDMFSDDVTDLYSWEKAVNSRAVKGGTSLSGVEAQIAAAGKIV

SEQ ID NO: 31365 - DNA, 792 bp, Unknown
  Obtained from environmental sample
  misc_feature (1)..(792): n is a, c, g, or t
atggttaatttttactctattactttttttttcaaattttcggataatttttcaaatgactttggtagcaagagaaaaaatagcaatgagcaaggagcaaagttgacaatacgctctgctttttccattgttccctgctcattgctcattgctcattgtcagggcaacaggcacaccgcaataaatgcgcccgaaccggtgagggcgttaatcgacaaatgcggaaaggtgggaggccaaatgaaagccccagttttggataaagtcttcaggccgtgggcgacaggcagaattacggccaaaggtcaaagtccatcaggcaacaggcaacaggcaacaggcaacaggcaacaggcaacaggcaacaggcaacaggcaacaggcaacaggcaacaggcaacaggcaacaggcaacaggcaacaggcaacaggcaacaggcaacaggcaacaggcaacaggcaacaggcaacaggcaacaggcaacaggcaacaggcaacaggcaacaggcaacaggcaacaggcaacaggcaacaggcaacaggcaacaggcaacaggcaacaggcaacaggcaacaggcaacaggcaacaggcaacaggcaacaggcaattatacaggcttgtaaaaaatcttgtcaaccaactaacagcgttatcaaaatcactcaaaataaaagtatcttgtcttacttttttctcttttcacttttattttttcttttgcaaagtgcctcattctattggaaaaatgccgtccgctttttggaacggttttttcatatatcaatgtaa

SEQ ID NO: 31366 - protein, 263 aa, Unknown
  Obtained from environmental sample
  misc_feature (1)..(263): Xaa is any amino acid
MVNFYSITFFFKFSDNFSNDFGSKRKNSNEQGAKLTIRSAFSIVPCSLLIAHCQGNRHTAINAPEPVRALIDKCGKVGGQMKAPVLDKVFRPWATGRITAKGQSPSGNRQQATGNRQQATGNRQQATGNRQQATGNRQQATGNRQQATGNRQQATGNRQQATGNRQQATGNRQQATGNRQQATGNRQQATGNRQQATGNRQQAIIQACKKSCQPTNSVIKITQNKSILSYFFLFSLLFFLLQSASFYWKNAVRFLERFFHISM

SEQ ID NO: 31367 - DNA, 354 bp, Unknown
  Obtained from environmental sample
  misc_feature (1)..(354): n is a, c, g, or t
ttgagtgattttgataacgctgttagttggttgacaagattttttacaagcctgtataattgcctgttgcctgttgcctgttgcctgttgcctgttgcctgttgcctgttgcctgttgcctgttgcctgttgcctgttgcctgttgcctgttgcctgttgcctgttgcctgttgcctgttgcctgttgcctgttgcctgttgcctgttgcctgttgcctgttgcctgttgcctgttgcctgttgcctgttgcctgttgcctgttgcctgttgcctgttgcctgttgcctgttgcctgttgcctgttgcctgttgcctgttgcctgttgcctgttgcctgttgcctgttgcctga

SEQ ID NO: 31368 - protein, 117 aa, Unknown
  Obtained from environmental sample
  misc_feature (1)..(117): Xaa is any amino acid
MSDFDNAVSWLTRFFTSLYNCLLPVACCLLPVACCLLPVACCLLPVACCLLPVACCLLPVACCLLPVACCLLPVACCLLPVACCLLPVACCLLPVACCLLPVACCLLPVACCLLPVA

SEQ ID NO: 31369 - DNA, 351 bp, Unknown
  Obtained from environmental sample
  misc_feature (1)..(351): n is a, c, g, or t
gtgggcgacaggcagaattacggccaaaggtcaaagtccatcaggcaacaggcaacaggcaacaggcaacaggcaacaggcaacaggcaacaggcaacaggcaacaggcaacaggcaacaggcaacaggcaacaggcaacaggcaacaggcaacaggcaacaggcaacaggcaacaggcaacaggcaacaggcaacaggcaacaggcaacaggcaacaggcaacaggcaacaggcaacaggcaacaggcaacaggcaacaggcaacaggcaacaggcaacaggcaacaggcaacaggcaacaggcaacaggcaacaggcaacaggcaacaggcaattatacaggcttgtaa

SEQ ID NO: 31370 - protein, 116 aa, Unknown
  Obtained from environmental sample
  misc_feature (1)..(116): Xaa is any amino acid
MGDRQNYGQRSKSIRQQATGNRQQATGNRQQATGNRQQATGNRQQATGNRQQATGNRQQATGNRQQATGNRQQATGNRQQATGNRQQATGNRQQATGNRQQATGNRQQATGNYTGL

SEQ ID NO: 31371 - DNA, 318 bp, Unknown
  Obtained from environmental sample
  misc_feature (1)..(318): n is a, c, g, or t
ttgcctgttgcctgttgcctgttgcctgttgcctgttgcctgttgcctgttgcctgttgcctgttgcctgttgcctgttgcctgttgcctgttgcctgttgcctgttgcctgttgcctgttgcctgttgcctgttgcctgttgcctgttgcctgttgcctgttgcctgttgcctgttgcctgttgcctgttgcctgttgcctgttgcctgttgcctgttgcctgttgcctgttgcctgttgcctgttgcctgttgcctgttgcctgttgcctgttgcctgttgcctgttgcctgatggactttgacctttggccgtaa

SEQ ID NO: 31372 - protein, 105 aa, Unknown
  Obtained from environmental sample
  misc_feature (1)..(105): Xaa is any amino acid
MPVACCLLPVACCLLPVACCLLPVACCLLPVACCLLPVACCLLPVACCLLPVACCLLPVACCLLPVACCLLPVACCLLPVACCLLPVACCLLPVACCLMDFDLWP

SEQ ID NO: 31373 - DNA, 888 bp, Unknown
  Obtained from environmental sample
  misc_feature (1)..(888): n is a, c, g, or t
atgagaaaagacgttgacgctgaaagtttcgcgtacatatattggcgcgataccggatctgaaatggttttttcaaagggcagtcttggggctttaatggaactgcgtgatgtgtcaatacaaaatgaaattcataatcttgacaacatggtgatgaattttacagaccttgtaaacgagattcacagcgaagcctatggcgcaaacggatcaacgggtaataatttcttttccgaatatccgtttgtcaccaacgttaacggaaattatgatagaaacggcgacggtgcctttgattcaagttatatttacagaattaacggtcaaaataaacttgagcctatggcccaggtgggtttggaaggcacgataaccctttcgggaaatgacaggcaggtggaggttccttactattcaacggataccgtaaacgatattataatccgcataaataattcaggcgcggaagttgtggcgcggttgaacagggaagggaagatttcttttaaaggcactcccgcagaattagttgacgggcagagggtaaatcccgattttgtcatacgtcatgttgaagatacggggcatttccttgtgggatacgccggtttgcttcttcaatcgggggcggaaggcgcttatgattggggacgcgccgatgcggtaacaagtttaaggggtactcctgaagattacgcgctcgcccctgtcgcccatccggcgggatggatagaagtaaatccaatgctcattaaagatccaacttatgtggcggcgggttttggctttaacggcagatcggctaattccggaaacgggggacgcggcggcggatatcgcttccataagaaacactcccgtaatggtcggccgtcttgccacatttga

SEQ ID NO: 31374 - protein, 295 aa, Unknown
  Obtained from environmental sample
  misc_feature (1)..(295): Xaa is any amino acid
MRKDVDAESFAYIYWRDTGSEMVFSKGSLGALMELRDVSIQNEIHNLDNMVMNFTDLVNEIHSEAYGANGSTGNNFFSEYPFVTNVNGNYDRNGDGAFDSSYIYRINGQNKLEPMAQVGLEGTITLSGNDRQVEVPYYSTDTVNDIIIRINNSGAEVVARLNREGKISFKGTPAELVDGQRVNPDFVIRHVEDTGHFLVGYAGLLLQSGAEGAYDWGRADAVTSLRGTPEDYALAPVAHPAGWIEVNPMLIKDPTYVAAGFGFNGRSANSGNGGRGGGYRFHKKHSRNGRPSCHI

SEQ ID NO: 31375 - DNA, 444 bp, Unknown
  Obtained from environmental sample
  misc_feature (1)..(444): n is a, c, g, or t
atgaaagttgacactaaggcttatggagttatagaagttgatgaaaagcaaaaagtaaaaataccgcttgggctttttggttttgaagattataaagattttgttttactggataatatcgaacaaggacagtttttctggcttcaatcaacggatgacaaggatattgcctttatattgattaatccttttcttttccgtaaagactatgaagctaatataacaaacgacgaacttgcggaaattgggttaaagtcgcctgaaaacgcccttgtttttgttatagttacaattccgcaggacggaaattcaatgactgccaacctgcagggacctataatcatcaacaaagaaaatatgacgggaatgcaggctatactgtctgattcaaaatggaaaactaagcatgacattatagctgaatttagcaagcaaggaaaataa

SEQ ID NO: 31376 - protein, 147 aa, Unknown
  Obtained from environmental sample
  DOMAIN (17)...(141): Uncharacterized BCR, COG1699
  misc_feature (1)..(147): Xaa is any amino acid
MKVDTKAYGVIEVDEKQKVKIPLGLFGFEDYKDFVLLDNIEQGQFFWLQSTDDKDIAFILINPFLFRKDYEANITNDELAEIGLKSPENALVFVIVTIPQDGNSMTANLQGPIIINKENMTGMQAILSDSKWKTKHDIIAEFSKQGK

SEQ ID NO: 31377 - DNA, 330 bp, Unknown
  Obtained from environmental sample
  misc_feature (1)..(330): n is a, c, g, or t
atgtttgacatggtaatacgtctaagggacgcgatgtaccggaacgatcaggattttataggaagccagggaatagctgggatggatcttgcggtaaataacgtggtactcagattggctgatgtaagcagtcgcaaagaacgagcggaaacggcgtggcagaggattaacgcacaaataccgaatgtaactggcatgttggaacgcgaaacgggacttgatatggtggacgctattacagaattaaaaaacgcccaattggcgcatcaggcggcgttgcagacgggggcaaagatattgcctcaaacattacttgattttttaagatag

SEQ ID NO: 31378 - protein, 109 aa, Unknown
  Obtained from environmental sample
  misc_feature (1)..(109): Xaa is any amino acid
MFDMVIRLRDAMYRNDQDFIGSQGIAGMDLAVNNVVLRLADVSSRKERAETAWQRINAQIPNVTGMLERETGLDMVDAITELKNAQLAHQAALQTGAKILPQTLLDFLR

SEQ ID NO: 31379 - DNA, 663 bp, Unknown
  Obtained from environmental sample
  misc_feature (1)..(663): n is a, c, g, or t
ttgattccgcgacggaagacgaatctttgggggcttgaaaaactgcgccggtgtggcgcaagtgtggagggagtaatgcgatttctttttaatttacttgcgggagcggtggggctgtactcactgttgatctttatacggattatttttacctggttcgctggcgcggtatacggaaagcctgtagaactgctggcccgtattaccgatccctatcttgactggtggcggcgttctttgaaactgaaaattggtttcctggacctttcgcccattgccggtatagcggccctctccgtggcccaaaccgtcttttccgttcttgcccgctatggcaggattagcctgggaataattctctatgtagcgctgcgcgcgatctggtctgcggcctcgttcattctgggcttctgccttgtgattatcattctgcgctttgtcggctatataaccaacagcaacatttatagtcccttctggcgggttattgattccatcagccagcccatactgtaccatataaaccgtgtcatcttcggcaagcgtttggttaactaccttactggcatcattgtcgcctccgtcttgttaggcgcaatcatgatcgtcggaggattcgcggtacagctgcttgcgggcctgttgtcaagactgccggtgtaa

SEQ ID NO: 31380 - protein, 220 aa, Unknown
  Obtained from environmental sample
  DOMAIN (26)...(108): YGGT family
  misc_feature (1)..(220): Xaa is any amino acid
MIPRRKTNLWGLEKLRRCGASVEGVMRFLFNLLAGAVGLYSLLIFIRIIFTWFAGAVYGKPVELLARITDPYLDWWRRSLKLKIGFLDLSPIAGIAALSVAQTVFSVLARYGRISLGIILYVALRAIWSAASFILGFCLVIIILRFVGYITNSNIYSPFWRVIDSISQPILYHINRVIFGKRLVNYLTGIIVASVLLGAIMIVGGFAVQLLAGLLSRLPV

SEQ ID NO: 31381 - DNA, 444 bp, Unknown
  Obtained from environmental sample
  misc_feature (1)..(444): n is a, c, g, or t
gtgccgcaaattcaaatggtatttcaggagccgggagcgtctgtaaatccgcagaaaaaaatcggctggcttattgaagaaccgcttgttatacataaaatgagcgataaacaggaacgaaaacacatggttgataaaatgctgctgcgcgtcggacttgatccttcatataaatcaaggcgggtacatgaactttcgggcggacagaaacagcgtgtctgtattgcgcgtgcgctaatcattaaacctcatttgcttatagcagatgaggcgataagttcccttgatgtatccgcaggcgtacaaattttaaacctgttcaagaaattgaataaagagaccggtctttctattctttttatctcacataacaaagacactgccgagtatctttgcgataaaattgctgtcatgaatgaggacggcatttcatacattgcgtaa

SEQ ID NO: 31382 - protein, 147 aa, Unknown
  Obtained from environmental sample
  DOMAIN (2)...(142): ABC transporter
  misc_feature (1)..(147): Xaa is any amino acid
MPQIQMVFQEPGASVNPQKKIGWLIEEPLVIHKMSDKQERKHMVDKMLLRVGLDPSYKSRRVHELSGGQKQRVCIARALIIKPHLLIADEAISSLDVSAGVQILNLFKKLNKETGLSILFISHNKDTAEYLCDKIAVMNEDGISYIA

SEQ ID NO: 31383 - DNA, 1086 bp, Unknown
  Obtained from environmental sample
  misc_feature (1)..(1086): n is a, c, g, or t
atgccgcagaaactctacgatacagcagaacagccaaaacgcgcgatgctcgtcagccttggcaaggaaggagacggaggtaaagaactgcgcgggcttgctgaaactctggaacttgctgtcgcgtcccatgaaataattaacgtgagggaacgtcagcccaaattcggaatgggcagcgggaaggccgcggaacttgcggaaaaagcagccgcgcttaaggccgattgcattgtttttgattgggacgtaagcccgtctcaacagcgcaactgggaggaacttgccgggatttccgtactggacaggcaggaacttatcatacagatattttcctcaagagccgccacaagagaagccgaactgcaagtacagcttgcggaattaaactacagactgccgcgccttgcccacaagtacatcgatctttcccgccagcgcggcggccattacgggacaaaaggttcgggagagacgcggctggaaaccgaccgccgaaaaatcgaacagcgcatacacaaactggaaaaagaaacggaagaagtgtcaaaacagcggcagttacagcgcaggcagagggagaggcaggggcttcccgtctgcgcgattgtaggttataccaacgcgggcaagtcttcgctgtttacacgtttaacaggagcctgcgcttttgtganggataagtatttcgctacactggacgctactacacggcgcttcgagcctgaaccgggactgaccgcccttcttgttgatacggtcggcttcataaggcggcttcnccattcgctgatcaaggcttttcgttcaacgttggaagaagcgtctcacgcagaccttttacttcacatcattgacgcatcggatgcgtcaatggaaaactgctacagcaccactgtttccgttctttctgaattgggagcaggggagatacccgttattaccgtgttaaacaagagcgacaaactttctgacaaagtacagatgcaggcggattttcaagacagtattttggtttctgcaaaaaccggaaacgggcttgatgtgctaaaacgcggtattgcggataaattacgcaatgtatga

SEQ ID NO: 31384 - protein, 361 aa, Unknown
  Obtained from environmental sample
  DOMAIN (199)...(321): GTPase of unknown function
  misc_feature (1)..(361): Xaa is any amino acid
MPQKLYDTAEQPKRAMLVSLGKEGDGGKELRGLAETLELAVASHEIINVRERQPKFGMGSGKAAELAEKAAALKADCIVFDWDVSPSQQRNWEELAGISVLDRQELIIQIFSSRAATREAELQVQLAELNYRLPRLAHKYIDLSRQRGGHYGTKGSGETRLETDRRKIEQRIHKLEKETEEVSKQRQLQRRQRERQGLPVCAIVGYTNAGKSSLFTRLTGACAFVXDKYFATLDATTRRFEPEPGLTALLVDTVGFIRRLXHSLIKAFRSTLEEASHADLLLHIIDASDASMENCYSTTVSVLSELGAGEIPVITVLNKSDKLSDKVQMQADFQDSILVSAKTGNGLDVLKRGIADKLRNV

SEQ ID NO: 31385 - DNA, 351 bp, Unknown
  Obtained from environmental sample
  misc_feature (1)..(351): n is a, c, g, or t
atggcatccgtaatgtctgaacgcatttggctcctctaccgtcaacttgacaacacgctcatagaaaatcctctggggcgcatttatgacgctctgcttatccagcttgaaaagaaccacgttgcccttaacagcagggaatcttatcagtttaatttcggtttcaaggaactgctgggtatggtaggcctttcagaaaatgaaaataaactttttgcccgtaaggttatcggtgacggaaaaatatccttcgataatgataaaatcctggtagaagatatttcggctatgtacaaagaagcgatgttttatcgcaaggcgcggaaaatagcctcaatcaacagaaaatag

SEQ ID NO: 31386 - protein, 116 aa, Unknown
  Obtained from environmental sample
  misc_feature (1)..(116): Xaa is any amino acid
MASVMSERIWLLYRQLDNTLIENPLGRIYDALLIQLEKNHVALNSRESYQFNFGFKELLGMVGLSENENKLFARKVIGDGKISFDNDKILVEDISAMYKEAMFYRKARKIASINRK

SEQ ID NO: 31387 - DNA, 738 bp, Unknown
  Obtained from environmental sample
  misc_feature (1)..(738): n is a, c, g, or t
atgagtgatgttagctattcggaatattccgctgatgaatttcaggcaaataaaaggaagaaaacaaacgcccgcagaagccccctgaacttgccccccgatcagaggcctcgtgagcggcttttgggcagggggccgtcggcgttgtccaacgccgagttgctggctatcctgttaaatacgggaagcaagggaaaaagcgtttcctgtttggcggacgaactggtaaaactgcttgataaaaacaatgaaattcccccgattccggaactcctgaaaattttcggcatgggcacatcaaaagcctgcgccgtggcggccatgctggaattcggcaggaggcgctggggggcgtccggttcgtccatcaagcaccccttcgaaatttttgccttgatacggcacaacgccgaccgcaagcaggaacgctttatcagcatttccatgaacggcgcgcacgaggcattggaagttcgggtggtaacggtcggcctggtgaaccgtaccatcgtacacccgcgcgaagtgtttgccgaccttattcaggacagggcggcggcattctgcgtggcccacaaccatccatcggggcaattgacgccttctcccgaagatgacgagatcaccatgcggcttcaggcatcggcagaccttttggggattcagtttatggatcatatcattttttctcaaagcaatttttggagctaccgccagcacaaacgtatgcccgcgtag

SEQ ID NO: 31388 - protein, 245 aa, Unknown
  Obtained from environmental sample
  DOMAIN (120)...(243): RadC, DNA repair protein
  misc_feature (1)..(245): Xaa is any amino acid
MSDVSYSEYSADEFQANKRKKTNARRSPLNLPPDQRPRERLLGRGPSALSNAELLAILLNTGSKGKSVSCLADELVKLLDKNNEIPPIPELLKIFGMGTSKACAVAAMLEFGRRRWGASGSSIKHPFEIFALIRHNADRKQERFISISMNGAHEALEVRVVTVGLVNRTIVHPREVFADLIQDRAAAFCVAHNHPSGQLTPSPEDDEITMRLQASADLLGIQFMDHIIFSQSNFWSYRQHKRMPA

SEQ ID NO: 31389 - DNA, 537 bp, Unknown
  Obtained from environmental sample
  misc_feature (1)..(537): n is a, c, g, or t
gtggattgtcagataaaggatctgtcatctgtgtcatttgacaggcaggcggcggctttacaggctgtaagttatctttttaaacagggcttttccgacatcgcgtatttgggcgaatcggatcagcgtgttaccggatttaagcaggctttccaggaaagaggggataatatatcgggactttacattgacgccgcggcggatatggcgtcaggactcaaagccgtacaaaaactgcacaaaagccggggcgccctgcccagggccatttgcgcgggttccgacgaagtagccgttggaatccttttctacctgcgtgaacaaaaaattgccgtacccgaagaaaccgcgttaatcagtattgataacattgaaatcgccgaatacaccaatccccagcttaccagtataaacgttcagaaacgggctatgggttaccgcgccgtggaaatgattgtgaatcgcgccgccggacggggagagaacgcgttgaccctgctcctgcccaccaatcttgttatacgcaaatcatcgtag

SEQ ID NO: 31390 - protein, 178 aa, Unknown
  Obtained from environmental sample
  misc_feature (1)..(178): Xaa is any amino acid
MDCQIKDLSSVSFDRQAAALQAVSYLFKQGFSDIAYLGESDQRVTGFKQAFQERGDNISGLYIDAAADMASGLKAVQKLHKSRGALPRAICAGSDEVAVGILFYLREQKIAVPEETALISIDNIEIAEYTNPQLTSINVQKRAMGYRAVEMIVNRAAGRGENALTLLLPTNLVIRKSS

SEQ ID NO: 31391 - DNA, 480 bp, Unknown
  Obtained from environmental sample
  misc_feature (1)..(480): n is a, c, g, or t
ttggaaaagaaatataaaccaaaaataacccaggatgacgtagccaaccgggccggggtaacccgcagcatggtatcttatgtgataaacggcagcgaccgctctgtcgcgcctgttacgcggcaaaaaattcttgacgccataaaagagcttggatacaggccgaataaattcgcccaggccttgagtatgggcaacaagggcgtttatgcggacaagaatatcggcatcgtgctgtgcaatgccgggatattcctgcggccatattacgcggaaatactggcgggaattcatcaggctgcccacgaaaaagattttcacatacggtttatacggttttttgatgaattaaaaaatccggttctgtttaaccagcttattcattcagaagaaatctgcggactccttctactcgcccttgatcaatgtattgaaactcaggaagacgcccagcttatgaacgtatacaggcgcagatag

SEQ ID NO: 31392 - protein, 159 aa, Unknown
  Obtained from environmental sample
  DOMAIN (9)...(34): Bacterial regulatory proteins, lacI family
  misc_feature (1)..(159): Xaa is any amino acid
MEKKYKPKITQDDVANRAGVTRSMVSYVINGSDRSVAPVTRQKILDAIKELGYRPNKFAQALSMGNKGVYADKNIGIVLCNAGIFLRPYYAEILAGIHQAAHEKDFHIRFIRFFDELKNPVLFNQLIHSEEICGLLLLALDQCIETQEDAQLMNVYRRR

SEQ ID NO: 31393 - DNA, 402 bp, Unknown
  Obtained from environmental sample
  misc_feature (1)..(402): n is a, c, g, or t
gtgatgcgggcatttcattttattgagaaaaatacccgtgttgacgccttgattaaggcgataaaggcaaatgattttccggtgtttatgcggctcattaatgattcaggaaattcatcatggaagtggctgcagaatgtttatgtcgcttcagattgcgcgcgaaaacaatgcgtttcggtaagcctggccctgacggaaatttttatcagccgccatggtttaaccggtaaggcggcctgccgcatacacgggggaggctttgccggtgtgattcaggtttttcttcccgatgaatatgttgataaatataaacaatggatgcttgacgctttacaagttactgataatccggtttttacaatctctatacgtccttatggggcaatcaaggtattttaa

SEQ ID NO: 31394 - protein, 133 aa, Unknown
  Obtained from environmental sample
  misc_feature (1)..(133): Xaa is any amino acid
MMRAFHFIEKNTRVDALIKAIKANDFPVFMRLINDSGNSSWKWLQNVYVASDCARKQCVSVSLALTEIFISRHGLTGKAACRIHGGGFAGVIQVFLPDEYVDKYKQWMLDALQVTDNPVFTISIRPYGAIKVF

SEQ ID NO: 31395 - DNA, 495 bp, Unknown
  Obtained from environmental sample
  misc_feature (1)..(495): n is a, c, g, or t
atgcttgatttttccgttacttttataattaccattatcaatatcaccattctgttctttgtattaagggcgttattgtttaagccggtaacgaaattcatggcggagaggacaaagcgggttcaggatacccttgatctggcgcagaaggacaaagaagacgccgcgaaactgcttgcggaatacgaaaacaagctgaaaaccgccgaggccgaatcgcgtgagatattaaaaaccgcgcgagagagcgccgagcgtcaggcaaagttgataattaccgaaggcaaacagaaagcccaggaaactgttgacgcggcgctaaaacagattgagatagaacgtcaggccgcgcttgcgaaattcaaacttgaagcagccgctttggttatggccgtttccgcgaaaatttcagcaaaggatttttccggcgacgacaaccgccgttatgtgaatatgctgctggacgagctttcggcgcagaaaggaaacaaataa

SEQ ID NO: 31396 - protein, 164 aa, Unknown
  Obtained from environmental sample
  DOMAIN (7)...(138): ATP synthase B/B' CF(0)
  misc_feature (1)..(164): Xaa is any amino acid
MLDFSVTFIITIINITILFFVLRALLFKPVTKFMAERTKRVQDTLDLAQKDKEDAAKLLAEYENKLKTAEAESREILKTARESAERQAKLIITEGKQKAQETVDAALKQIEIERQAALAKFKLEAAALVMAVSAKISAKDFSGDDNRRYVNMLLDELSAQKGNK

SEQ ID NO: 31397 - DNA, 351 bp, Unknown
  Obtained from environmental sample
  misc_feature (1)..(351): n is a, c, g, or t
ttgttaataaaaaaaacatgggtggaagaagccgatgaaatccgcaaaggaaaattacacgacgatattccgttgtttatgaaaactatcgagcagccgaattacataaaggcaatagaagaattcagcgtggttcttgacgagttagcttatctttttttcggcaaacaaagcgaaaaagaagattttgccgagtataccttccgcattgacgcgcaaatggggcttttctggtggtacggaagcagactaactttattaaaagagttaaaggataaaaacattgaccaaaacgataaatgcttatgggcggttttacttcttggtctgtgttatctgacaaatttttaa

SEQ ID NO: 31398 - protein, 116 aa, Unknown
  Obtained from environmental sample
  misc_feature (1)..(116): Xaa is any amino acid
MLIKKTWVEEADEIRKGKLHDDIPLFMKTIEQPNYIKAIEEFSVVLDELAYLFFGKQSEKEDFAEYTFRIDAQMGLFWWYGSRLTLLKELKDKNIDQNDKCLWAVLLLGLCYLTNF

SEQ ID NO: 31399 - DNA, 729 bp, Unknown
  Obtained from environmental sample
  misc_feature (1)..(729): n is a, c, g, or t
ttgggggctttttgcaatggttcattcaagtttgggtttccgggcggagccgacgtaatggaagatcgggactggttagctgagaattatcctgattggttaacgcattattccgtacatgataacaaaacagaatccgcaaaacttatggattataatttgggagcgtcatttttaatttctaaaggatttttactaaaagcatatgtttcttatcattatatgtattattcatgggctgcaactaaggggtcgatattataccccgactgggatattgatggagacggtagacctgatggggatcatatatatttaccgatgtatatatcatctaaagaaaaaatttgtacatacgaacagacttggcacattttttctccgggaatttcgttttatggggaatttaaccgttattttgatattgaagtcgcgtttgaaataacgccgtttatatggtgtaatgctaaagatcaacatcttcttcgtgatttggtagttactgacactttaaagaatggaatcttcattgaaccaagctttcttttttcttataaaccttcgaatctttttacggtatccctttcattcgagtatagagacataaaaaaatcccgcggtgatacaaaataccaacctgcaggagaaccgtcttttactgaaaagaaattaagcggagcgggatatgaagcgtttgatattggtattatcgccaaatataaattttag

SEQ ID NO: 31400 - protein, 242 aa, Unknown
  Obtained from environmental sample
  DOMAIN (1)...(242): Omptin family
  misc_feature (1)..(242): Xaa is any amino acid
MGAFCNGSFKFGFPGGADVMEDRDWLAENYPDWLTHYSVHDNKTESAKLMDYNLGASFLISKGFLLKAYVSYHYMYYSWAATKGSILYPDWDIDGDGRPDGDHIYLPMYISSKEKICTYEQTWHIFSPGISFYGEFNRYFDIEVAFEITPFIWCNAKDQHLLRDLVVTDTLKNGIFIEPSFLFSYKPSNLFTVSLSFEYRDIKKSRGDTKYQPAGEPSFTEKKLSGAGYEAFDIGIIAKYKF

SEQ ID NO: 31401 - DNA, 396 bp, Unknown
  Obtained from environmental sample
  misc_feature (1)..(396): n is a, c, g, or t
atgaaaacagaatgttcattacgggtaagaagctatgaatgcgacggctacaaccatgtgaataacgcgaactatcttaattatcttgaatacgggcgttatgaatttcttaaagacattggttttgattttgccaaagcgacaaaagccggctacggtctttacattgctcgaatagaaatagattacaaaaaacccgcgtttaccgacgacacattgattattaaatcgcgtcctataaaacaaggcgcggtaagcggcgttatcgcgcaggaaatttggcggggcgaagatttattaattgaggcaaaagttacatgggcgtttgtcgattcaaaaggcgctccgacaaaaatcccgccggagtttgatatgccgggacttaaacctgattaa

SEQ ID NO: 31402 - protein, 131 aa, Unknown
  Obtained from environmental sample
  DOMAIN (17)...(102): Thioesterase superfamily
  misc_feature (1)..(131): Xaa is any amino acid
MKTECSLRVRSYECDGYNHVNNANYLNYLEYGRYEFLKDIGFDFAKATKAGYGLYIARIEIDYKKPAFTDDTLIIKSRPIKQGAVSGVIAQEIWRGEDLLIEAKVTWAFVDSKGAPTKIPPEFDMPGLKPD

SEQ ID NO: 31403 - DNA, 1605 bp, Unknown
  Obtained from environmental sample
  misc_feature (1)..(1605): n is a, c, g, or t
gtgcgcggcgcgttctgccgccgcgttttacggcgcaaattcttatatcgccgcgccttcggcggtttgcttatagtaattgacatacaagaattattgaccatgagcgcggtatcggtagatagagccgccgcggatttacgcgcaagagccgatgtgatggccgtatcgacaggctacaacgcgccggtatattttatcttcaacaagatcgatttgttcgacggtttcgcggaatttttcggcgataggggtgttgccggcagactgccggttttgggcgccctgttgggcgtctatggagcgggcagcgcgtgtacgcgtacatccgccgcagcggtattcgcagatcgctttagggagatttgcgccgagctgtccgacatctgcgtacgccgggtcgtgtcttccggcaattcgggacgctgcggcaagaacgggcgtctataccgctttttgacgcgcttcgcgcttgccgaggctcctatcgccgcgtttttgacggagtttttcagaccgcgaggcaatgagagcgcgcgtttctgcggattttttttcacttcgagcaagaaagacgcgcccgtcgcgttgtcgcgaaaagttgtcggcgaggttataccccaagcgccgtatagggctgaagaggcgtgtgagggtacgtggccctactatctgaagcgggccggttcgtacgcattgacggcggtgttgtgggcggctttcgtgttgctctttgtcggcggcgggttgcgtgacgcggcgcgtatcagcgggcttcaggcggagcttacgtcgatattcggcggcggcgcggttgcggcgaatcaatttgccgcgctggaaaaattacgggtatcgcacgagtgccttcggggtacgctaggaagtccgtggcgtttgatttttaggacagagcgggcgcgtaccgcggtgcgccgcgcttacgtggccgcgtcggagcgggtggcggcgcaaccggcctcgcgtttcatggagtcctcaatcaatcggcgtatagcccggcgtgcgggcgagttctcagcctccgagagatcggcgctttacggcgagctttcggcgtatcttttattgacaggcgggaatcagataaagggtataagcgttgactccatggcctgccggatcgggtcggcgttcaaaaaaattcccggcgtggaggatgaagtggtcatggcaaatatctatatgacggtaaaattggcagcggagggaagttataaaaacgtaccggcggataacgcgatgattgaggccgcgcgtgagaaacttgccgccgcgcctcagactgcggccgtctacgccacggtaatggataagttggccgcggcgcgtagcccggttccgatgtcgcagattacgggcgggggcgggctgctcaaatatgggcgcgacgtaagcgttttgtacacgcgtgacggttgggataacgccgtattcccggagcttatcaaggcctccaaggagccgctaaaggccgattgggtaacgggcctgccgccgccgtctcaacgaggagcggatgctttcggagttcgcgtcgctctacgcggaagacttggcgcggagttggttggatttttatag

SEQ ID NO: 31404 - protein, 534 aa, Unknown
  Obtained from environmental sample
  misc_feature (1)..(534): Xaa is any amino acid
MRGAFCRRVLRRKFLYRRAFGGLLIVIDIQELLTMSAVSVDRAAADLRARADVMAVSTGYNAPVYFIFNKIDLFDGFAEFFGDRGVAGRLPVLGALLGVYGAGSACTRTSAAAVFADRFREICAELSDICVRRVVSSGNSGRCGKNGRLYRFLTRFALAEAPIAAFLTEFFRPRGNESARFCGFFFTSSKKDAPVALSRKVVGEVIPQAPYRAEEACEGTWPYYLKRAGSYALTAVLWAAFVLLFVGGGLRDAARISGLQAELTSIFGGGAVAANQFAALEKLRVSHECLRGTLGSPWRLIFRTERARTAVRRAYVAASERVAAQPASRFMESSINRRIARRAGEFSASERSALYGELSAYLLLTGGNQIKGISVDSMACRIGSAFKKIPGVEDEVVMANIYMTVKLAAEGSYKNVPADNAMIEAAREKLAAAPQTAAVYATVMDKLAAARSPVPMSQITGGGGLLKYGRDVSVLYTRDGWDNAVFPELIKASKEPLKADWVTGLPPPSQRGADAFGVRVALRGRLGAELVGFL

SEQ ID NO: 31405 - DNA, 771 bp, Unknown
  Obtained from environmental sample
  misc_feature (1)..(771): n is a, c, g, or t
atgtctgatgggccgctacagtatgatatgatcaaggaagcgacggctttcattcaaagcaagaccaaagccaaaccagaatacgggataatcttaggcaccggcttaggccgcttagccgacagcatcaacaaagaagtcgtcctcaattacgaaaacatcccgcacttcccgctgtcaacggtggagtcgcacgccggcaaactgattttcggcacgctcgccggcaaatcggtcgtcgctatgcaggggcgctttcactactacgagggctactctatgcagcagatagtcttccccgtgcgcgtgatgaaattcttaggggccgatactctcattgtgtcaaacgcttgcggcgggataaacccgctcttcccccctggaacaataatggccataaccgaccacatcaacctgctgggcgataacccgctcataggcccgaatgacgaacgaatcggcccgcgctttccggacatgtcggagccgtattcaagcgaattgctgaatatcgcctccaaggtcgcgcttgacaacgggataaaactggagcgcggagtgtacgccgccatgagcggaccgtcgcttgagaccaaggcggagtaccgaatgctcaaaacgctgggcgccgacgttatcgggatgagcaccgttccggaggtaatcgccgccgtccacgcttggatgagggtgctcgggttctcggtgataaccgactcgtgcctgcccgacgcgcttgagccggccacgcgacgaaatccctcgcgataa

SEQ ID NO: 31406 - protein, 256 aa, Unknown
  Obtained from environmental sample
  DOMAIN (25)...(256): Phosphorylase family 2
  misc_feature (1)..(256): Xaa is any amino acid
MSDGPLQYDMIKEATAFIQSKTKAKPEYGIILGTGLGRLADSINKEVVLNYENIPHFPLSTVESHAGKLIFGTLAGKSVVAMQGRFHYYEGYSMQQIVFPVRVMKFLGADTLIVSNACGGINPLFPPGTIMAITDHINLLGDNPLIGPNDERIGPRFPDMSEPYSSELLNIASKVALDNGIKLERGVYAAMSGPSLETKAEYRMLKTLGADVIGMSTVPEVIAAVHAWMRVLGFSVITDSCLPDALEPATRRNPSR

SEQ ID NO: 31407 - DNA, 366 bp, Unknown
  Obtained from environmental sample
  misc_feature (1)..(366): n is a, c, g, or t
ttgcagggaacgcaaagccattaccgatttttacccgaacaaagcaccgattttattttttccattttttcggaagaagcgggttttttaggagctctggtcattttccttcttttccttttgataattatacgcctgttgacaacgatgaaaatcactactgatccgtttgcgaaatatatctgcgcggggcttgcgggtatgtttagtttccattttatgatcaatgtcggtatgacaatggggattatgcccataacgggtattcctttgatatttatgtcatacggaggctcggcggttttctcaggcatgattggcattggacttgtgttgagtatttttataagaaggtacaaccgttaa

SEQ ID NO: 31408 - protein, 121 aa, Unknown
  Obtained from environmental sample
  misc_feature (1)..(121): Xaa is any amino acid
MQGTQSHYRFLPEQSTDFIFSIFSEEAGFLGALVIFLLFLLIIIRLLTTMKITTDPFAKYICAGLAGMFSFHFMINVGMTMGIMPITGIPLIFMSYGGSAVFSGMIGIGLVLSIFIRRYNR

SEQ ID NO: 31409 - DNA, 1371 bp, Unknown
  Obtained from environmental sample
  misc_feature (1)..(1371): n is a, c, g, or t
gtgtttcccgttcctagcatgaaaattgttcagcatcacgggagcgtggaaattatgcggggttgtcccaacggctgccgcttttgccacgccggtttctggtacagacccatgcggcaaaaaagtcccgctcttatcgcagcgcaggtactcgaaatggtaacaaagggcggctggcatgagataagcctgtcctcgctttcttcaggtgactacaacggtattgactgccttgtggagaatcttaacgacaagttccgtaatatgcacgtttctttccagcttccctcattaaaagtttcaagcttttcacttgcgctccttgaaaaaatatctgttacaagaaaaagcggtcttacttttgcggttgaaacgccgcaggacgcgtcgcataatgcgtggcagatggctgtaaacaaagaggttacgcttgattccgtttcggcaatacttaacgaggcgaaaaaacgcggctggaaaacggcaaagttttattttatgatagggcttccgcttccggcttctgaaaaaagcgaagaagaggaaattgtcaattttattgcctgtgtcggccgaagaacccgtatgcactttaacatcaacgtagggctttttatccccaaaccgcatactccatatcaatggtcgccacagttggatgccgcctcggcgataaaaaaaatggattatatacgaaacagtttaaagccgatgggacacaaggtaagcgtatcggataccctaatttcccaaattgagggtattttaagcaggggggacgaaagggcagggctgctttttgaacaggcctatcttggaggatcaaggcttgacgcgtggaatgaatatatcaacagggataagtggctttctatttttgaggaaaataaagaattgatcgattcattcctgtcattcctggacggaaaaaatgaactgccctggcagggaattgactcatgcgtatctggtgaatatatacgaaacgaaaaagaaaaatctgacaatgtacaaattactccttcatgcaagcaaaaatgcagtctgtgcggagtgtgcggtaaagaaataaaaatgacagaaaatcaggtggtcgtaacaaaaaacgcgccgtcatctgcaaatttacacgatactatcgataataataacgattgtacctatagaaatgatgaaactatcgatacttatgacgttaacccgcaagacgctaagattaacaaaaataaagccgatcctgatatttacagactattattcagtttcagtaagtctggaagcgccgtttttcacggacaccttagccttatagagattttttcaatggcttttacaagggccggcattcccgtaatgacacaaagggcttaa

SEQ ID NO: 31410 - protein, 456 aa, Unknown
  Obtained from environmental sample
  DOMAIN (16)...(187): Radical SAM superfamily
  misc_feature (1)..(456): Xaa is any amino acid
MFPVPSMKIVQHHGSVEIMRGCPNGCRFCHAGFWYRPMRQKSPALIAAQVLEMVTKGGWHEISLSSLSSGDYNGIDCLVENLNDKFRNMHVSFQLPSLKVSSFSLALLEKISVTRKSGLTFAVETPQDASHNAWQMAVNKEVTLDSVSAILNEAKKRGWKTAKFYFMIGLPLPASEKSEEEEIVNFIACVGRRTRMHFNINVGLFIPKPHTPYQWSPQLDAASAIKKMDYIRNSLKPMGHKVSVSDTLISQIEGILSRGDERAGLLFEQAYLGGSRLDAWNEYINRDKWLSIFEENKELIDSFLSFLDGKNELPWQGIDSCVSGEYIRNEKEKSDNVQITPSCKQKCSLCGVCGKEIKMTENQVVVTKNAPSSANLHDTIDNNNDCTYRNDETIDTYDVNPQDAKINKNKADPDIYRLLFSFSKSGSAVFHGHLSLIEIFSMAFTRAGIPVMTQRA

SEQ ID NO: 31411 - DNA, 762 bp, Unknown
  Obtained from environmental sample
  misc_feature (1)..(762): n is a, c, g, or t
ttggcgggccacgacggcgacgcatccatgaggcgcatggtcgacgcgattcgccatatcaaggcctcgtcggacaattccgccaagatcatcaagacgattgacgaaatcgccttccagaccgatctgctcgccatcaacgccgccgtggaagcggcccgcgccggagagagcggcaaaggcttcgccgttgtggccgaagaggtgcgcaatttggcgatgcgcagcgtcgaagccgcgaagaacacatcggagatgatcgaagagtcggttaagaacgccgacagcggcgtcaggatcgcggaggatgtggcaaagtccctctgtcaaattgtggccggcgcaggcaaagtgggcgacctgataggcgagatcgccgccgcctccaatgaacaggcgcagggcatagagcaggtgaacttagccgtggcgcagatgaaccaagtcacccagagaaacgccgccaattcagaagagtccgccggcgcttccgaggaactcaacatccaggccgccgaactttcgaacatggtgagcgaattcacgctgagcggcgataacggcaacacacaccataataagcaaaacctccgacgccagttacacacaccgcaaaggttgccctcgcttcccaataggaatgccgccggtaaggccaaagtaaccggcaacttagtagcgatgaatttcgcaacgtcagcgaaagcggtgaaagcggaagatatcattccgctggatgaggatgagttgaacgggttttaa

SEQ ID NO: 31412 - protein, 253 aa, Unknown
  Obtained from environmental sample
  DOMAIN (1)...(184): Methyl-accepting chemotaxis protein (MCP) signaling domain
  misc_feature (1)..(253): Xaa is any amino acid
MAGHDGDASMRRMVDAIRHIKASSDNSAKIIKTIDEIAFQTDLLAINAAVEAARAGESGKGFAVVAEEVRNLAMRSVEAAKNTSEMIEESVKNADSGVRIAEDVAKSLCQIVAGAGKVGDLIGEIAAASNEQAQGIEQVNLAVAQMNQVTQRNAANSEESAGASEELNIQAAELSNMVSEFTLSGDNGNTHHNKQNLRRQLHTPQRLPSLPNRNAAGKAKVTGNLVAMNFATSAKAVKAEDIIPLDEDELNGF

SEQ ID NO: 31413 - DNA, 351 bp, Unknown
  Obtained from environmental sample
  misc_feature (1)..(351): n is a, c, g, or t
atgactgtcaaatgcaagaagtgcaacgcctactgctgccgccacatcgccatcggagtggacacccctgacgacaaggaggggtacgacaatatccgctggtacctgctccacaagaacgtgtgggtctccatagaccacgacggcaattggctcgtagagttcagaacgccgtgccgcctgatcagaagcgactacaaatgcggtgactacccgaaccgcccgcttatatgcaagaactatcccgatgaaaacgatatgtgcgagggcgagacggacgagccgtcgtacaaagaactcttcaagaacgtcaaggagttcgagaggtatatgaagaagcggagcaagtag

SEQ ID NO: 31414 - protein, 116 aa, Unknown
  Obtained from environmental sample
  misc_feature (1)..(116): Xaa is any amino acid
MTVKCKKCNAYCCRHIAIGVDTPDDKEGYDNIRWYLLHKNVWVSIDHDGNWLVEFRTPCRLIRSDYKCGDYPNRPLICKNYPDENDMCEGETDEPSYKELFKNVKEFERYMKKRSK

SEQ ID NO: 31415 - DNA, 321 bp, Unknown
  Obtained from environmental sample
  misc_feature (1)..(321): n is a, c, g, or t
gtgattatggaaacaatgacaaaaggaaggaacacaatggctatgaacgtacaggcaagaacagggacaaaaaccgccaaatggcagttacaggaggcaaaagcaatgttcagcgaagtcgttaaagcgtccgttactaaaccccagatcatctcagtccggggaaaagatacggcggtaattatttccatcggcgagtaccaaaggcttgtccgcccgcggcaaaccttctttgaatttattcaaagctcccccctgcgcgatcttgaccttgaattgccgcccagattgcccgaaaaaatgagggccgttaacctgtga

SEQ ID NO: 31416 - protein, 106 aa, Unknown
  Obtained from environmental sample
  misc_feature (1)..(106): Xaa is any amino acid
MIMETMTKGRNTMAMNVQARTGTKTAKWQLQEAKAMFSEVVKASVTKPQIISVRGKDTAVIISIGEYQRLVRPRQTFFEFIQSSPLRDLDLELPPRLPEKMRAVNL

SEQ ID NO: 31417 - DNA, 735 bp, Unknown
  Obtained from environmental sample
  misc_feature (1)..(735): n is a, c, g, or t
atgttggtgcctggtaattctgcatcactgccaagcgtaaccgctcccaaatatgtctgcgttcctccggtagtaataatatttccggctatgatgctttttccggttacattgattatgttcgcttctaataaaccgcttacaaggctgaaatcttcagttattgatagaatgtcaataccgcttcctccgttaaatataccgttacctgttattgttaatgaatatgcgtttcctgtaatagtcccaagcgttacgtttgcgcctgttaattctacatcatcaccaagcgttacagctcctgtaaaagtctgcgttcctgttgtaataatatccgcgttaatattaattacgccgttacttgttacgtcaattttatccgcgtttacctccattgaaaaagttacatcatcagtacttgttatgtctatatttcccgcatataaattcttggagaaagtaactttatccgagctaattacggtaatattaccaattggagcgcctgagattccaattgtcccgttaagatttatttcccctgatgtcgccgtaagctttaagttttcattgtttccggcggttataatgttaagggaaatattttcggcatttatactgtttttacctgtatttgaggcagaatatgttttcagtgttaacacttcactatctaattcaaattcttctttaacagttatgtcagtatcaacaaaatttataccgccggtatag

SEQ ID NO: 31418 - protein, 244 aa, Unknown
  Obtained from environmental sample
  misc_feature (1)..(244): Xaa is any amino acid
MLVPGNSASLPSVTAPKYVCVPPVVIIFPAMMLFPVTLIMFASNKPLTRLKSSVIDRMSIPLPPLNIPLPVIVNEYAFPVIVPSVTFAPVNSTSSPSVTAPVKVCVPVVIISALILITPLLVTSILSAFTSIEKVTSSVLVMSIFPAYKFLEKVTLSELITVILPIGAPEIPIVPLRFISPDVAVSFKFSLFPAVIMLREIFSAFILFLPVFEAEYVFSVNTSLSNSNSSLTVMSVSTKFIPPV

SEQ ID NO: 31419 - DNA, 708 bp, Unknown
  Obtained from environmental sample
  misc_feature (1)..(708): n is a, c, g, or t
gtgttaacactgaaaacatattctgcctcaaatacaggtaaaaacagtataaatgccgaaaatatttcccttaacattataaccgccggaaacaatgaaaacttaaagcttacggcgacatcaggggaaataaatcttaacgggacaattggaatctcaggcgctccaattggtaatattaccgtaattagctcggataaagttactttctccaagaatttatatgcgggaaatatagacataacaagtactgatgatgtaactttttcaatggaggtaaacgcggataaaattgacgtaacaagtaacggcgtaattaatattaacgcggatattattacaacaggaacgcagacttttacaggagctgtaacgcttggtgatgatgtagaattaacaggcgcaaacgtaacgcttgggactattacaggaaacgcatattcattaacaataacaggtaacggtatatttaacggaggaagcggtattgacattctatcaataactgaagatttcagccttgtaagcggtttattagaagcgaacataatcaatgtaaccggaaaaagcatcatagccggaaatattattactaccggaggaacgcagacatatttgggagcggttacgcttggcagtgatgcagaattaccaggcaccaacataacacttggagttattaccggaaacccccgaccttttacataa

SEQ ID NO: 31420 - protein, 235 aa, Unknown
  Obtained from environmental sample
  misc_feature (1)..(235): Xaa is any amino acid
MLTLKTYSASNTGKNSINAENISLNIITAGNNENLKLTATSGEINLNGTIGISGAPIGNITVISSDKVTFSKNLYAGNIDITSTDDVTFSMEVNADKIDVTSNGVININADIITTGTQTFTGAVTLGDDVELTGANVTLGTITGNAYSLTITGNGIFNGGSGIDILSITEDFSLVSGLLEANIINVTGKSIIAGNIITTGGTQTYLGAVTLGSDAELPGTNITLGVITGNPRPFT

SEQ ID NO: 31421 - DNA, 927 bp, Unknown
  Obtained from environmental sample
  misc_feature (1)..(927): n is a, c, g, or t
atgtcactgccctattattttaaaaacaacacggcgatttcgctggatattccgattaagcgcacgactcttactttgttattttccgagtcttttatattaaacgaagaaaatgacgattcagataaacccgatttcggagattttcaagaaggtctttatttatcaagtaaaccgagtatatcgtggaaaataccgaccggtcttgaagtaggcaaatacgacgaattaacatatattccgaatatttacgccgtctttaatcatgaactcccttcatggccccttttagataacaaaataggaccatttttattttttaaccatactctttattttggacgcgtaaattggattggtaattttcgcgaaggtttacatgttcaaattgataattcatacagttataatttttattatccaaatattgacagaaatccgtggacttatgattacagtatagaaacaaaaggatattttatttttattaaagatcgtttagggttttccgcccgtttggcccaccgtcattggatagattcaaattatgaatatgcgggagattatttacgcggtatttatgataaagacataaacgcagaatttatactttctttaaatttggatttacatataagggttttaagatttaacgctcatgaatggtttcccgataataagtttttacgtttattaggttttgatttacatataaaccccgtaatagacggcgctttttataaacaaccgtcaaaggacgcgtcatttgatcctgaaaattttctgcttggggccggattggaatttattatttatccgcatcaattccgaagtatgtttttccgcatatcaacatgctgggatttttccgatatttcaaatggaactccgattgaattatttttaggcatggaacatcattattaa

SEQ ID NO: 31422 - protein, 308 aa, Unknown
  Obtained from environmental sample
  misc_feature (1)..(308): Xaa is any amino acid
MSLPYYFKNNTAISLDIPIKRTTLTLLFSESFILNEENDDSDKPDFGDFQEGLYLSSKPSISWKIPTGLEVGKYDELTYIPNIYAVFNHELPSWPLLDNKIGPFLFFNHTLYFGRVNWIGNFREGLHVQIDNSYSYNFYYPNIDRNPWTYDYSIETKGYFIFIKDRLGFSARLAHRHWIDSNYEYAGDYLRGIYDKDINAEFILSLNLDLHIRVLRFNAHEWFPDNKFLRLLGFDLHINPVIDGAFYKQPSKDASFDPENFLLGAGLEFIIYPHQFRSMFFRISTCWDFSDISNGTPIELFLGMEHHY

SEQ ID NO: 31423 - DNA, 756 bp, Unknown
  Obtained from environmental sample
  misc_feature (1)..(756): n is a, c, g, or t
ttgggaaaccgttataaaaatgtagaaatcatttatgtatcgaatgatatttatgacaagaccaataatatttattcgctgtatttggcaaaagattatttactgcaggatgatacgcttcttttggaaagcgatttaatttttgaaaatcgtcttatttccgatatgcttgcggatagtgaaccgacaattgccgctgttgcgcggttcgaatcatggatggatgggacggttgtgcaaataactgaaaacaaagagattgcggcgtttattcccaaaaaactatttacttttaatgagaaagatacatattacaagactgttaatatttataaattttcacgtaattttttgcaaaatacttatgtcccttttcttgaagcatattcccgttcgatgggcaataatgaatattatgagcaagttttgcgtgttatcgcgacgcttgataaatgcgagttaaaagcgtttgttttaaacggtcaaaaatggtacgagattgatgacgttcaggataaaaacatcgctgaaactatttttagcagttcgcccaaagaaaggctcaagcgaattcaaagcacttacggcggatattggcgctatccttcgatgctggacttttgttaccttgttaacccgtatttcccttcgccgcaaatgacagccgagtttaagacgtatttttccgctctgctttcctcttacccatcagggcagaatacgcagaatttactgggtgcaaaatatttaatgtag

SEQ ID NO: 31424 - protein, 251 aa, Unknown
  Obtained from environmental sample
  misc_feature (1)..(251): Xaa is any amino acid
MGNRYKNVEIIYVSNDIYDKTNNIYSLYLAKDYLLQDDTLLLESDLIFENRLISDMLADSEPTIAAVARFESWMDGTVVQITENKEIAAFIPKKLFTFNEKDTYYKTVNIYKFSRNFLQNTYVPFLEAYSRSMGNNEYYEQVLRVIATLDKCELKAFVLNGQKWYEIDDVQDKNIAETIFSSSPKERLKRIQSTYGGYWRYPSMLDFCYLVNPYFPSPQMTAEFKTYFSALLSSYPSGQNTQNLLGAKYLM

SEQ ID NO: 31425 - DNA, 351 bp, Unknown
  Obtained from environmental sample
  misc_feature (1)..(351): n is a, c, g, or t
atgaaaatggaaaccgatttaggcagaagtggcgcgtatattgacgatcttttttactgcccccatcaccccgacaaaggatttccgggcgagcgtcctgaatataagatcgactgcgattgccgcaagccgaaacccggattgatttttaaagccgccgaaaaatataacattgacctttcgaaatcatatatggtcggcgatgacatgcgtgatgttaacgcaggaaaaaacgccggttgtatttcggtattattggctaaaaaagaagaagaaaatattcttcaattcaaagatattttagaatttagtaattatttaaattcttcaataaatgaggtaataaagtga

SEQ ID NO: 31426 - protein, 116 aa, Unknown
  Obtained from environmental sample
  misc_feature (1)..(116): Xaa is any amino acid
MKMETDLGRSGAYIDDLFYCPHHPDKGFPGERPEYKIDCDCRKPKPGLIFKAAEKYNIDLSKSYMVGDDMRDVNAGKNAGCISVLLAKKEEENILQFKDILEFSNYLNSSINEVIK

SEQ ID NO: 31427 - DNA, 1071 bp, Unknown
  Obtained from environmental sample
  misc_feature (1)..(1071): n is a, c, g, or t
atgaaaaataaaaaaatagtaataaacggtgaatttttttgtaataatataagcggaattgagcgttttgcatacgaaataacaaaacgtcttgacgaaatttcagaaaaagatgaaataggaataattatcacaaaagacgcgaaaaatgttcctttttttaaaaatattaaagtaataaattataaaaaaaatcttggctctattccaaaatggcagcaatttattatgccaggaatactgcgaaaaataaaagctatatcgcttgattttggaaacagttgttcattgttttatccgggtataagttttctgcatgatatatattgtgaaatgtttccgaatgattttaaaacaaagcgggaaaagcatgagcgtttttattttagaatactaaaccgtattatcgcataccgggcaaaaaaaataattacggtttcatatttcagcagaaatcagatttcaaaggcatatcacatcaaagctgaaaaaatcgccgttatttacagtgcatggaatcattttgaacatataaagagcgattattctatttttgacgattaccctgccctgtcaaagcctttttatttttctctgggaagtctttcaaaacgaaaaaatattaagtggattgtagaatatgcggcaaagaatccggaatctctctttgttatctcaggcagcagccttaataccgttaaagtggatgaattgtcaaattctatcccggcaaacgtcattttacccggttatcttgacgacggtaaagtaaaggctcttatgacaaaatgtaaggcttttattcatccgtcttattacgaaggtttcggtcttaccccgcttgaggctttgtcctgcggggcgcggataataatttcaaaagcggctagtcttcctgaaatttacggaaataccgctcattatatcgacccttttgacactaatgttgatttagatgaacttttaaaacaacctgtggagccgcctgatgaaattttaaataaatattcctatgaaaaatcggcaaatctagtatataatataataaaagaatacaataataaaaaatga

SEQ ID NO: 31428 - protein, 356 aa, Unknown
  Obtained from environmental sample
  DOMAIN (180)...(340): Glycosyl transferases group 1
  misc_feature (1)..(356): Xaa is any amino acid
MKNKKIVINGEFFCNNISGIERFAYEITKRLDEISEKDEIGIIITKDAKNVPFFKNIKVINYKKNLGSIPKWQQFIMPGILRKIKAISLDFGNSCSLFYPGISFLHDIYCEMFPNDFKTKREKHERFYFRILNRIIAYRAKKIITVSYFSRNQISKAYHIKAEKIAVIYSAWNHFEHIKSDYSIFDDYPALSKPFYFSLGSLSKRKNIKWIVEYAAKNPESLFVISGSSLNTVKVDELSNSIPANVILPGYLDDGKVKALMTKCKAFIHPSYYEGFGLTPLEALSCGARIIISKAASLPEIYGNTAHYIDPFDTNVDLDELLKQPVEPPDEILNKYSYEKSANLVYNIIKEYNNKK

SEQ ID NO: 31429 - DNA, 894 bp, Unknown
  Obtained from environmental sample
  misc_feature (1)..(894): n is a, c, g, or t
ttggacaaacgaaagggaaaggtgggtgtttcaccttacgggatatatctggcgccgcttaccctggttgtgatgaatttgctattctacatttttatagtcagatatgattcctttggcatagtatccagggcatccgaaatggcattgcagtccattcaggaagcctatatccttttcgatgagaagaatactttcatcagcgccaatgccgccgccaaaaaattattccccgcgttggagaccatggaaaagggcggtctcatttcccagattcaggactggccgcctgaactcgctcttcacgaaaacaaggagattgccggtagtgtcaaattcgagctgcccggcgataattattacacggcgtccgccagcgccatcttttccgaaaaggcaaatttattggggcatgttgttctgattcaggatgttaccgagtcggtgatgatgaccaagaaaattcaggcagcctttgatacggtgagcgcgctgaagacgcagcaggacggcgattactttttgacatcgctgctgatcaatccgctcctgatcaaagaggtgcgcagcgacgcgctctccgtggattttcatgtccggcagaaaaagaaattcaccttcaggaagcgcgccggggagatcggcggcgacctgtgcatagcgcgcgagatagagctgaacgacaagcgatatctggcgtttaccaacggcgacgcgatgggtaagtccatccagggtgtgggcggcgcgcttgtgatggcggttatctttaacgcgtatgtcaatcgtacgccgctgcagccgcaaatgtatacaaagacgcccgaggagtggctcgtggatgtgtatgaggagctccagcgcgcgttcgtcgcgttgactcggccgatctga

SEQ ID NO: 31430 - protein, 297 aa, Unknown
  Obtained from environmental sample
  misc_feature (1)..(297): Xaa is any amino acid
MDKRKGKVGVSPYGIYLAPLTLVVMNLLFYIFIVRYDSFGIVSRASEMALQSIQEAYILFDEKNTFISANAAAKKLFPALETMEKGGLISQIQDWPPELALHENKEIAGSVKFELPGDNYYTASASAIFSEKANLLGHVVLIQDVTESVMMTKKIQAAFDTVSALKTQQDGDYFLTSLLINPLLIKEVRSDALSVDFHVRQKKKFTFRKRAGEIGGDLCIAREIELNDKRYLAFTNGDAMGKSIQGVGGALVMAVIFNAYVNRTPLQPQMYTKTPEEWLVDVYEELQRAFVALTRPI

SEQ ID NO: 31431 - DNA, 1119 bp, Unknown
  Obtained from environmental sample
  misc_feature (1)..(1119): n is a, c, g, or t
atgccaaaggagtgttttatgataattaatcacaacttgagcgcaatgttcgccgacagatcccttaaagtcactaatgttagtcttgacaaaaatatggagaaactgtccagcggcttgcgaatcaaccgcgcaggtgatgatgcttcagggctcgctgtttctgagaagatgcgaagccaaattcgcggcttgaatcaggcgtcaacaaacgcccagaacggtatctcgttcattcaggtaacggaaggctatctccaggaatctgaagacatcattcagcgtttgcgtgaactggcggtaatgtccgcacacggtatctataccgcggaagacaggctttacatccaggtcgaagtttcagcccttgtggccgaagtagaccgcatcgcttctcacgcgcagttcaacggcatgaatcttcttaccggaaggtttggccgcctgacaggtgaaaatgtggttaccgcttccatgtggttccatatcggagccaatatggatcagcgaacgcaagtgtatatcggcaccatgactgccaagggtctcgggatccgtaacgtcggtgacgattctattctttcactgtccgctccggacagtgccaaccgtgccattgggaccctcgantacgctattaagagggatcaacaaacaagagctgatctcggcgcctaccagaaccgattggaacacgcagtccgcggtcttgatgttggagcagaaaatatgcaggcatcggaatccagaattcgtgatactcaaatggcgaatgagactgtaattacaccaagaaccagattctcattcaatcgggtacagcgatgctggctcaggcgaatcaaaaaggtcagacggttctacagcttctgcggtaagctttaccgcaaagccgtctcgggaaggcgcctggtctgtccgaccgctatcagcggtcggctggccgggcctttttttgtccacagtatgaacaattctatatttgaaaatcatagaaaaattttgccacggagtacgcggagtaacacggagtttacagattatttacacgtctattttatattctttctccgtgaaactccgtgtcctctgtggttattattattaattcttccatga

SEQ ID NO: 31432 - protein, 372 aa, Unknown
  Obtained from environmental sample
  DOMAIN (199)...(275): Bacterial flagellin C-terminus
  misc_feature (1)..(372): Xaa is any amino acid
MPKECFMIINHNLSAMFADRSLKVTNVSLDKNMEKLSSGLRINRAGDDASGLAVSEKMRSQIRGLNQASTNAQNGISFIQVTEGYLQESEDIIQRLRELAVMSAHGIYTAEDRLYIQVEVSALVAEVDRIASHAQFNGMNLLTGRFGRLTGENVVTASMWFHIGANMDQRTQVYIGTMTAKGLGIRNVGDDSILSLSAPDSANRAIGTLXYAIKRDQQTRADLGAYQNRLEHAVRGLDVGAENMQASESRIRDTQMANETVITPRTRFSFNRVQRCWLRRIKKVRRFYSFCGKLYRKAVSGRRLVCPTAISGRLAGPFFVHSMNNSIFENHRKILPRSTRSNTEFTDYLHVYFIFFLRETPCPLWLLLLILP

SEQ ID NO: 31433 - DNA, 570 bp, Unknown
  Obtained from environmental sample
  misc_feature (1)..(570): n is a, c, g, or t
ttgatgcgtactgtggcggttaatatagacggcacctggaaatggaaatacaacgaaaagagggagccggttgttaccgcggacggttccattgaacggatatatactccccttccggataaagagctttttgacgcagttatgctggtacagggagctattggctataacgcgacgagaagcgatataattacagtacggaatattccttttgaccgcaataaagaattcaccgaagaagacgcggcgtatttcagaaagaaacaggtgcagacaacagtaataattttcattgcgggtttgacaatattactgcttgcttttataattttcagggcgattacccgcgaaatagagcgccgcaaacggcaggccgagaaggatcgccagatgcgcgaacaggctctgcgcgagagcgagatgatgagggccgagcaggagggtatggaagtttccatttcggtggaagaacgctcgcgcatggagcttatggagtcggtgaccaacctggcaaaagaacatccggaagactgcgccaagctgatccggacctggcttttggaggaatag

SEQ ID NO: 31434 - protein, 189 aa, Unknown
  Obtained from environmental sample
  misc_feature (1)..(189): Xaa is any amino acid
MMRTVAVNIDGTWKWKYNEKREPVVTADGSIERIYTPLPDKELFDAVMLVQGAIGYNATRSDIITVRNIPFDRNKEFTEEDAAYFRKKQVQTTVIIFIAGLTILLLAFIIFRAITREIERRKRQAEKDRQMREQALRESEMMRAEQEGMEVSISVEERSRMELMESVTNLAKEHPEDCAKLIRTWLLEE

SEQ ID NO: 31435 - DNA, 1035 bp, Unknown
  Obtained from environmental sample
  misc_feature (1)..(1035): n is a, c, g, or t
atggcaaaaacaagcgcagcagcggcaacagcagacggcgccgcgccggcgggcggcgccaagaagaaaaagggcggaaaggaatttaccggacgtcaaaaatccgcaatcttcctcgttaccataggatcggagctttccgcggagatattcaagtacctgcgcgaagacgaaatagaaacccttacctttgagattgcgaggcttgaaaccatagagcccgagcaaaaggacgccatcttgcaggagttccaggaactcatgatggcgaaccagtttatctcaaccggcggcattgacttcgccagggaactgcttgaaaaatccctgggcagccagaaggctatcgacataattaaccgattgacttcaagccttcaggtgcggcctttcgattttattcgaaggacagaccctgcccacctcctcaactttatacagcaagagcatccccaaaccatagccctgatcctggcgtaccttgagccgaacaaggcttcgattattctgcagaacctcccgcacgaggtgcagagcgacgtggcgcgccgtatcgctaccatggacaggacaagccctgaagtcttaagggaggttgaaagggttcttgaaaagaaactttccaccctgtcaagcgaagattattcggcggcgggcggtgtcgagagtattgttgaaatcctcaacctggttgaccgcgcttctgaaaagcagattattgaggcgctggaagacgaagacccggaacttgccgaagagatcaagaagcggatgttcgtgtttgaagacattgttatgcttgacgaccgttccatccagaaggtaatgcgcgaagttgattcccaggagctggcgaaggcccttaagagcgtagatacggaagtgcaggacaagatattcaggaacatgagtaagagagccgcaagcatgcttaaggaagacatggagtacatgggcccggtacgcttgaaagacgttgaggaatcccagcaaaagatagtttctattatccgccaccttgaagataccgngtga

SEQ ID NO: 31436 - protein, 344 aa, Unknown
  Obtained from environmental sample
  SIGNAL (1)...(19)
  DOMAIN (240)...(343): FliG C-terminal domain
  misc_feature (1)..(344): Xaa is any amino acid
MAKTSAAAATADGAAPAGGAKKKKGGKEFTGRQKSAIFLVTIGSELSAEIFKYLREDEIETLTFEIARLETIEPEQKDAILQEFQELMMANQFISTGGIDFARELLEKSLGSQKAIDIINRLTSSLQVRPFDFIRRTDPAHLLNFIQQEHPQTIALILAYLEPNKASIILQNLPHEVQSDVARRIATMDRTSPEVLREVERVLEKKLSTLSSEDYSAAGGVESIVEILNLVDRASEKQIIEALEDEDPELAEEIKKRMFVFEDIVMLDDRSIQKVMREVDSQELAKALKSVDTEVQDKIFRNMSKRAASMLKEDMEYMGPVRLKDVEESQQKIVSIIRHLEDTX

SEQ ID NO: 31437 - DNA, 972 bp, Unknown
  Obtained from environmental sample
  misc_feature (1)..(972): n is a, c, g, or t
atgatcagatggccgaaactatggatcggaatatctgcggagatattcaaattccttcgggaagatgaaattgaaacccttacctttgagattgccaggcttgaaaccatagaaccggaacaaaaggacgccatcttgcaggagttccaggaactcatgatggcgaaccagttcatctcgacaggcggcattgacttcgcgagggaactgcttgaaaaatctctgggcagccagaaggccatcgacatcattaaccgccttacttcgagccttcaggtgcggcctttcgattttatacgaagaaccgacccggcccaccttctcaactttattcaacaagagcatccccaaaccatagcgctgattctggcgtaccttgagccgcaaaaggcttcgatcattctgcagaatcttccccacgaagtgcagagcgacgtagcccggcgtattgctaccatggacagaacaagcccggaagttttaagggaagtcgaacgggttcttgaaaagaaactttccaccctgtcaagcgaagattactcggcggcgggcggcgttgagagcatagtggaaattctcaaccttgttgaccgcgcttcggaaaaacagatcattgaggctctggaagacgaagacccggaacttgcggaagaaatcaagaagagaatgttcgtgtttgaagacattgtcatgctcgacgaccgttcgatccaaaaagtaatgcgggaagttgattcgcaggagttggccaaggccctcaagagcgtggatacggaagttcaggacaagatattcagaaacatgagtaagagagcggcaggcatgcttaaggaagacatggagtacatgggcccggtacggctaaaggacgttgaggaagcgcagcagaagattgtttcgattatccgccaccttgaagacgtcggtgaaattgttattgcccgttcgggtgaagacgagatggttgtttaa

SEQ ID NO: 31438 - protein, 323 aa, Unknown
  Obtained from environmental sample
  DOMAIN (205)...(314): FliG C-terminal domain
  misc_feature (1)..(323): Xaa is any amino acid
MIRWPKLWIGISAEIFKFLREDEIETLTFEIARLETIEPEQKDAILQEFQELMMANQFISTGGIDFARELLEKSLGSQKAIDIINRLTSSLQVRPFDFIRRTDPAHLLNFIQQEHPQTIALILAYLEPQKASIILQNLPHEVQSDVARRIATMDRTSPEVLREVERVLEKKLSTLSSEDYSAAGGVESIVEILNLVDRASEKQIIEALEDEDPELAEEIKKRMFVFEDIVMLDDRSIQKVMREVDSQELAKALKSVDTEVQDKIFRNMSKRAAGMLKEDMEYMGPVRLKDVEEAQQKIVSIIRHLEDVGEIVIARSGEDEMVV

SEQ ID NO: 31439 - DNA, 846 bp, Unknown
  Obtained from environmental sample
  misc_feature (1)..(846): n is a, c, g, or t
ttgcgttacggaaactccgccgaagaaaaccgcaagttaaaaaacaccgcgtcccttgcccacaaggatatcattggcacaagctgcgcgatgcaaggcgtccgggatatggtcaggcaggccgcgttaagcgacgcgcgtatccttattaccggagagaacggaaccgggaaggaaatagtggcaagggcgattcatctcggctcttcccgctgcgagcgcccttttgtgggcttgaactgcgccgccatacctgacactctcctggaaagcgagcttttcggccatgaaaagggagcttttaccgacgccgtctcccgccggaaagggcgctttgaaatcgccggcggcggcacgctttttcttgacgagattggcgatatgtcgctttcggcgcaggcaaaggtactgcgggttattcaggagcaaaaaattgaaagggtaggcggcgagaagaccatagaaaccgacgtccgccttatcgcggcgtcaaacaaagatttagaaaaagcctgcgcccagggcttgttccggcaggatttgtacttcaggttgaatgtcatacctattcatatccccccgctacgggaacgaaaagaggatattacacttttgctcatgtattttctgaaagagcaggggattgaaaacctgcggctggaagacggcgcgattgaacttctgctttcgcatgattggccgggaaacgtcagggaattgaaaaacctcgcggaacgcatagcggtaatgcacgcgggcggcagtataaccggacaggacatgaccgggcttttgcgcatggggaacggaggcgaaaatacaaaatctgaaaaccccgcgctgtaa

SEQ ID NO: 31440 - protein, 281 aa, Unknown
  Obtained from environmental sample
  DOMAIN (24)...(241): Sigma-54 interaction domain
  misc_feature (1)..(281): Xaa is any amino acid
MRYGNSAEENRKLKNTASLAHKDIIGTSCAMQGVRDMVRQAALSDARILITGENGTGKEIVARAIHLGSSRCERPFVGLNCAAIPDTLLESELFGHEKGAFTDAVSRRKGRFEIAGGGTLFLDEIGDMSLSAQAKVLRVIQEQKIERVGGEKTIETDVRLIAASNKDLEKACAQGLFRQDLYFRLNVIPIHIPPLRERKEDITLLLMYFLKEQGIENLRLEDGAIELLLSHDWPGNVRELKNLAERIAVMHAGGSITGQDMTGLLRMGNGGENTKSENPAL

SEQ ID NO: 31441 - DNA, 690 bp, Unknown
  Obtained from environmental sample
  misc_feature (1)..(690): n is a, c, g, or t
gtgcccgaggaggccggattgatctcgatcctcttcggggacagggtgggcacgaactaccttgggtacgggagcgaacgcggggtcaccatgaacggcagggcgcaccacacttccgccgtttgccgcgccgtgagggacgccttcgtctgggccgacctgccctacggcagcgcggataacgcggaggaggcgttggccaacgccaaaaggctgacggactgcggcgcggactgcgtgaaaatcgagggttggggcgaaaagaccgagatcgtcagacggctcgccgaaaacggcgtcaccgtctgcgcccacataggctacaacccgcagcagcacaacagaccgcagctcttcggcaaagagacaggccaagccctagaactctttgacagcgccgccgccctctgcgacgccggagcgaaactcatagtgctcgagatgatcccgaaagagctatcccgcaaaatcagcgccgccgtcccaatcccaaccataggcataggcagcggcaacgcctgcgacggacaggtgctcgtggtaaacgacctactgggcctgtcgagaagactcttcaagcacgtgcgccgcttcgcaaaccagcgcgagaagatgttcgaagccttcaaggactacatagacgccgtaaagtcgcgggagttcccgggggacgacaattcgtggaaataa

SEQ ID NO: 31442 - protein, 229 aa, Unknown
  Obtained from environmental sample
  DOMAIN (1)...(225): Ketopantoate hydroxymethyltransferase
  misc_feature (1)..(229): Xaa is any amino acid
MPEEAGLISILFGDRVGTNYLGYGSERGVTMNGRAHHTSAVCRAVRDAFVWADLPYGSADNAEEALANAKRLTDCGADCVKIEGWGEKTEIVRRLAENGVTVCAHIGYNPQQHNRPQLFGKETGQALELFDSAAALCDAGAKLIVLEMIPKELSRKISAAVPIPTIGIGSGNACDGQVLVVNDLLGLSRRLFKHVRRFANQREKMFEAFKDYIDAVKSREFPGDDNSWK

SEQ ID NO: 31443 - DNA, 777 bp, Unknown
  Obtained from environmental sample
  misc_feature (1)..(777): n is a, c, g, or t
atggctgtatttatagaacccagaattttgaaaggctttcgcgattttttgccttcccaggaaatcgcaaggcggaaccttttagaaaagatagaaagctcttttcgcttgtacggatttctgccgattgatacgccggcgcttgaatactccgagattttgcttggcaagggcgggggcgaaacggaaaaacagatttaccgttttaaggatcacggggaaagggatgttgccctgcgctttgaccttacagtccccttcgcgcgttttcttgccgaacacagggaggcgctggtctttcctttcaagcgctaccacattgcaaaagtctggcgtggggagaacacccagcgcgggcgctaccgggaatttacccaatgcgattttgacaccataggaagcgacagcgccgaggcggattttgagatacttcttatgatgaggaatactttgctcgcaatttcaggcgggaatgttatcatacaccttaaccaccggggagtcttcaaccgcttcctttcccgcctcaacgtactggataagtccgttgatgtgctcagggccgttgataagctcgccaagatcggcagggacgcggagcgcgagctgctttccgaatcggtaggggagggcaatgcgaatgagatattaaactacatcgaaatatcaggaagctttgatgaaaaactttctgcaatgatagatgccgctggccatggttccgaaacggataggcttaagcaaatcggcaggtttattcatgacacggcgaaatga

SEQ ID NO: 31444 - protein, 258 aa, Unknown
  Obtained from environmental sample
  DOMAIN (23)...(185): tRNA synthetase class II core domain (G, H, P, S and T)
  misc_feature (1)..(258): Xaa is any amino acid
MAVFIEPRILKGFRDFLPSQEIARRNLLEKIESSFRLYGFLPIDTPALEYSEILLGKGGGETEKQIYRFKDHGERDVALRFDLTVPFARFLAEHREALVFPFKRYHIAKVWRGENTQRGRYREFTQCDFDTIGSDSAEADFEILLMMRNTLLAISGGNVIIHLNHRGVFNRFLSRLNVLDKSVDVLRAVDKLAKIGRDAERELLSESVGEGNANEILNYIEISGSFDEKLSAMIDAAGHGSETDRLKQIGRFIHDTAK

SEQ ID NO: 31445 - DNA, 843 bp, Unknown
  Obtained from environmental sample
  misc_feature (1)..(843): n is a, c, g, or t
atggatgaacttgaaaacctgaatataatgggttatgccgtcggcagaggttacgcgcgtcacgctctggacaaactgggaataggcgtgcgggaattgcgttattttgagtataaatccgccggtgaaacttttacaagggattccatgtcggaagcggatcgcaggcagtacaatgattatcttgacgacacgtttaatcttacccgcgacaccttaaaaaaagcgcgtaactggacggacgaagaatttaattctgtcttaaacaaaggttttctttattcggcaaggagcgcgcgcgaggacggccttgtcgattatgccggcagaagagacgttatgtatcaggctcttatggaaattgagggaacctttgtcggttcgttcaaattgtacggcgcatccgattctagcataatgggctttaataacgcgtattcacttccaaaagcgcgtagttttttcaaaaaaagaccgccgcttgtcgccgtagtttacgcaaacggggaaacttccatgagacagggcatggaagcggtaaaacttgcgaaaattatcattgaattggggcaaaaaacggaagttaaggcaatcgtcataaaggttaattcgcccggcggaagcgcggaagccgccgaccttgttgacaacgcggtgcgttacgcgaaacaatttaagcctgttgttgtaagcatgggtcaggtagcggcttccggcggctattgggtgtcgatgaacgcctcgcatatcgtggcaaatccgtattcgatgactggttccataggcgtaataggaaactggttttacgacaaaggcctaacagcaaacttgggcttaacatag

SEQ ID NO: 31446 - protein, 280 aa, Unknown
  Obtained from environmental sample
  DOMAIN (3)...(122): Peptidase family S49
  misc_feature (1)..(280): Xaa is any amino acid
MDELENLNIMGYAVGRGYARHALDKLGIGVRELRYFEYKSAGETFTRDSMSEADRRQYNDYLDDTFNLTRDTLKKARNWTDEEFNSVLNKGFLYSARSAREDGLVDYAGRRDVMYQALMEIEGTFVGSFKLYGASDSSIMGFNNAYSLPKARSFFKKRPPLVAVVYANGETSMRQGMEAVKLAKIIIELGQKTEVKAIVIKVNSPGGSAEAADLVDNAVRYAKQFKPVVVSMGQVAASGGYWVSMNASHIVANPYSMTGSIGVIGNWFYDKGLTANLGLT

SEQ ID NO: 31447 - DNA, 624 bp, Unknown
  Obtained from environmental sample
  misc_feature (1)..(624): n is a, c, g, or t
ttgggtgtcgatgaacgcctcgcatatcgtggcaaatccgtattcgatgactggttccataggcgtaataggaaactggttttacgacaaaggcctaacagcaaacttgggcttaacatagatgtcattcagcgcggcgaccacgcggatttaatgacgggagttttattcccgcgccgtgatttgacggattctgaagaaaaaaggtacagggaatacattatcgatctctacaatgtttttataattaaagcggcctccggcagaaagatgtatactgaaaaactggaaaccgtcgcgcaaggcagaattttttcgggtcttagggcaaaagaagccggccttgtcgacagcaccggcgggcttgccgacgctctgcgcatagctcttgagttagctgacatccccaaaaaaacggccgttaaatacgaagaataccccaagcctaaattcttcgaaaaattaatggaaagccttcccatggcgtcagttttttttgccaaaagcaaaaaaaccgaaaccgttgaattcctcgcggattttcttttgccggatgctgacctccgttaccggctggaaaataacggcagggtaatgcctattttacctattgattttaagtaa

SEQ ID NO: 31448 - protein, 207 aa, Unknown
  Obtained from environmental sample
  DOMAIN (20)...(136): Peptidase family S49
  misc_feature (1)..(207): Xaa is any amino acid
MGVDERLAYRGKSVFDDWFHRRNRKLVLRQRPNSKLGLNIDVIQRGDHADLMTGVLFPRRDLTDSEEKRYREYIIDLYNVFIIKAASGRKMYTEKLETVAQGRIFSGLRAKEAGLVDSTGGLADALRIALELADIPKKTAVKYEEYPKPKFFEKLMESLPMASVFFAKSKKTETVEFLADFLLPDADLRYRLENNGRVMPILPIDFK

SEQ ID NO: 31449 - DNA, 318 bp, Unknown
  Obtained from environmental sample
  misc_feature (1)..(318): n is a, c, g, or t
atgaaacttgatccaatcctttcaaaagcaagcaggcttatccgttcacgcaaatacgagcttgcgcggcggaccctggagcctgaggttaaccgctaccacggctcgtttcgctattactacctccttgggaatacctgcctgcgcgccggggattacggcggagcgctgacttatttccgcctcgcgcatgaggtgaacagccgcgacccccttgcgattattggcctggccgccctttatttgcgccgaggcgagacggaccgcgccgttgattattaccttgaagcgcttgaactgaagccgaataacgtatag

SEQ ID NO: 31450 - protein, 105 aa, Unknown
  Obtained from environmental sample
  DOMAIN (37)...(70): Tetratricopeptide repeat
  misc_feature (1)..(105): Xaa is any amino acid
MKLDPILSKASRLIRSRKYELARRTLEPEVNRYHGSFRYYYLLGNTCLRAGDYGGALTYFRLAHEVNSRDPLAIIGLAALYLRRGETDRAVDYYLEALELKPNNV

SEQ ID NO: 31451 - DNA, 1083 bp, Unknown
  Obtained from environmental sample
  misc_feature (1)..(1083): n is a, c, g, or t
atgattttggcgganccatcgaaaaggtcggaagcaaatggcggggccgcttcaaaagccggggacaaattcgccatccagccggccctgaacatccccggcgaagacgggaaaccgcagttatggtccccgggctattcttttgaattcatgggcggcgacgccacttttattattattcccaatgaagtcatggagatgggctgtctcttgaattataaagcggataatttctatatggcctcgcttgccgagcctgtttcatgcgtggtcggcgcttttaacgcccagtaccataccacaaacggctcttacgtccattcgatgggcattgccgataaaggttcaatggccctgcttgccgcggctggccccatggggctttgcgcgatagactatgccgtccacaacccgcgcaggcggccttcgcgcattgtggtcacggacattgacaatgaccgcctggaaagggccctgaagcttctgcctccgcaagaggccgagaaaaacggcattgagttaatgtacgcgcgtatttcagacagcatggaaaatcccgtggaatctttcaggcgcttcaacggcggcaaattatatgacgatgtttttgtctttgttcctgaaagctccgtgctggaaatgggggacagccttttggggcgcgacggatgcctgagcttttttgccggccccacggaaaaggatttttccgcaagcctgaatttttacgatgttcactatgaatcgcaccacgtcgtgggaacctcaggcggcaatgccgatgatatgaaagaggccattgaattaatggctgacggagtcatcaatccggtttttatgatcacccatataggcggcctggattcggcggcgaaagccacgctggatcttgacaaaatccccggctggaagaaacttatatatacccacaaaaaacaggagttagccgccattgatgattttgccatgatgggcggcgatgatcccctgtttgccgaactgtcaaagatatgcggcaggcacagtggattatggaacaccgaagctgaaaattattttttggagaacgcggcggaaatatga

SEQ ID NO: 31452 - protein, 360 aa, Unknown
  Obtained from environmental sample
  DOMAIN (114)...(272): Zinc-binding dehydrogenase
  misc_feature (1)..(360): Xaa is any amino acid
MILAXPSKRSEANGGAASKAGDKFAIQPALNIPGEDGKPQLWSPGYSFEFMGGDATFIIIPNEVMEMGCLLNYKADNFYMASLAEPVSCVVGAFNAQYHTTNGSYVHSMGIADKGSMALLAAAGPMGLCAIDYAVHNPRRRPSRIVVTDIDNDRLERALKLLPPQEAEKNGIELMYARISDSMENPVESFRRFNGGKLYDDVFVFVPESSVLEMGDSLLGRDGCLSFFAGPTEKDFSASLNFYDVHYESHHVVGTSGGNADDMKEAIELMADGVINPVFMITHIGGLDSAAKATLDLDKIPGWKKLIYTHKKQELAAIDDFAMMGGDDPLFAELSKICGRHSGLWNTEAENYFLENAAEI

SEQ ID NO: 31453 - DNA, 672 bp, Unknown
  Obtained from environmental sample
  misc_feature (1)..(672): n is a, c, g, or t
atgacagattcggccgagcttctttttgccggccctactgccgtttccggctttatctggtcagctattttcagcggagacaaggcattgggactttctttaatactccttgacaccctgcttgccccgcttattgttcctgtgactctttcaattcttctgggaacaaaaatagagatggacatgagcggtattgccatttctcttatttttatggttgtggttcccacgataatcggagtcgcgttaaacgaaacaagcaggggggcgataccgcaaaaaatatgtccgtgccttgatccgctagccaaatgctgcctgatgcttgttattgcggctaactcggcggcaatagcccatgtcgtaaggtttgacgatcctcttgtttggggtgtggcgctgctctgctttattttaacaattgcgggattctttgctgcaaggcttaacggtattgcggcgcggtgtaattatgaaaaaagcgccgcccttattattgccggcggtttaaaaaataacagcgccgttatgacaatcgccgtaacatttttcccggaggccgccgttttacccacattaataagcattatcatacagcagacaatagccgctacaataggcaaattccttattcgccgaattcataacgcagaacagattcgtcaagaataa

SEQ ID NO: 31454 - protein, 223 aa, Unknown
  Obtained from environmental sample
  misc_feature (1)..(223): Xaa is any amino acid
MTDSAELLFAGPTAVSGFIWSAIFSGDKALGLSLILLDTLLAPLIVPVTLSILLGTKIEMDMSGIAISLIFMVVVPTIIGVALNETSRGAIPQKICPCLDPLAKCCLMLVIAANSAAIAHVVRFDDPLVWGVALLCFILTIAGFFAARLNGIAARCNYEKSAALIIAGGLKNNSAVMTIAVTFFPEAAVLPTLISIIIQQTIAATIGKFLIRRIHNAEQIRQE

SEQ ID NO: 31455 - DNA, 636 bp, Unknown
  Obtained from environmental sample
  misc_feature (1)..(636): n is a, c, g, or t
gtggcggatcttggaatcctggagaggaacccttaccttttttttggaatcgcaaaaggggctaaattagncgctgcagctctttctcaggacatgaaaaatattaccacgtcggtatcaatttcaatctcaaacatctgcgccgcacttttacgccataaccgtccttctcccgttttaagaacattaagccccattacaacggcgcggtacacggggataattataatcgccctggacgagctccccgttttcggattaaagaaaaccgccatgcccattccctgcctgtttccaaaaatttgggacagcgaaatgaaccttatctatgaacgctatatgctggaacctcaatcacaagcgcaagatgtcgcaatggttctgttttcggctgcgaaaaatatttttcaaaataacccttccggtttatctgacggattacgtgaaattgtgggagaccggccattgcgcattttcgcgcgcggcgtattcggaattaaccctacagaccttatcattgaaagaagcgacgctcttgtaattatttcttccgaagaaaaccgccgcctgttgtctcagggcaaagttgtttttattcttgacgaatctgttctgcgttatgaattcggcgaataa

SEQ ID NO: 31456 - protein, 211 aa, Unknown
  Obtained from environmental sample
  misc_feature (1)..(211): Xaa is any amino acid
MADLGILERNPYLFFGIAKGAKLXAAALSQDMKNITTSVSISISNICAALLRHNRPSPVLRTLSPITTARYTGIIIIALDELPVFGLKKTAMPIPCLFPKIWDSEMNLIYERYMLEPQSQAQDVAMVLFSAAKNIFQNNPSGLSDGLREIVGDRPLRIFARGVFGINPTDLIIERSDALVIISSEENRRLLSQGKVVFILDESVLRYEFGE

SEQ ID NO: 31457 - DNA, 564 bp, Unknown
  Obtained from environmental sample
  misc_feature (1)..(564): n is a, c, g, or t
ttggagggagtttatatgaacgaaaaagtagcccatgttcctgaaaggataaaagaattaagggagattcttgaaataagtgtccttgatatggcaaaagatacggaaattccttttgaaacttacagtaaatacgaaaagggcgaattggacataccgatcagcgttttatatacgatagccggacggcttggaacggacgttacagttcttcttaccggagaagaggcaagaatggacagcgccgcggtctgcagaaacggtaagggggttcaaattgagcgttatcccggatatgaattttcaagtcttgcgtataactttaggcatagaaccatggaaccgttgcttgtaacgcttgattcttcaaaacccccggcggcgcaggtttctcattcgggacaagaatttaatttagtgattgaaggacaggtaaaagtaacggttgtaaaaaccgaacatattttaaattcgggagactcaatttattttgacgcgcgtctgccccattcgcaaatagcggtaaacggaagggcgcgatttttaacggtaattcaggaataa

SEQ ID NO: 31458 - protein, 187 aa, Unknown
  Obtained from environmental sample
  DOMAIN (116)...(185): Cupin domain
  misc_feature (1)..(187): Xaa is any amino acid
MEGVYMNEKVAHVPERIKELREILEISVLDMAKDTEIPFETYSKYEKGELDIPISVLYTIAGRLGTDVTVLLTGEEARMDSAAVCRNGKGVQIERYPGYEFSSLAYNFRHRTMEPLLVTLDSSKPPAAQVSHSGQEFNLVIEGQVKVTVVKTEHILNSGDSIYFDARLPHSQIAVNGRARFLTVIQE

SEQ ID NO: 31459 - DNA, 792 bp, Unknown
  Obtained from environmental sample
  misc_feature (1)..(792): n is a, c, g, or t
gtggcttacctatacgaaacacatcttcacacttctcccgtcagtaaatgcgctatatcgcatggttctgattatattgccggttatcaggataagggatattcgggaataattgtaaccgatcatttttttaacgctaattgttcgttatccaggaggcttccgtggaatgattgggtaaacagtttttgccaggggtatgaagacgcgcgaaatgagggggcacgcaggggatttgacgttttttttggctgggaagagacatttgacagcagtgatgattatcttgtttacggacttgataaggattggctgttaaaacaccctgaagtccgtaattggacaaggggagagcagtaccgcaccgtaaaagaatcgggaggttgcgttgttcaggcgcatccgttcaggcagagggtatacattccaaaagtcgtactttccaccggctgtgttgacgcggttgaggtcgccaatggcggacatgaagatccgtcctatgacgcgcttgcctgccgttatgcgaaaaatataggaaagaccgctaccgccggctccgacatacatgacgcgtctgatatttactataacgaactttttggggtgtatgttgaaaaaaaatttaacagtatttctgattatgtgnatgtaattttgaataataaaatatcgggcttaaaagtaaatgaagggcggcttgattattttgggacggaaacaattaagctgccgtttgaaatacgcgatgaaaatgacagagttacaggaagggattggagggagtttatatga

SEQ ID NO: 31460 - protein, 263 aa, Unknown
  Obtained from environmental sample
  DOMAIN (5)...(192): PHP domain
  misc_feature (1)..(263): Xaa is any amino acid
MAYLYETHLHTSPVSKCAISHGSDYIAGYQDKGYSGIIVTDHFFNANCSLSRRLPWNDWVNSFCQGYEDARNEGARRGFDVFFGWEETFDSSDDYLVYGLDKDWLLKHPEVRNWTRGEQYRTVKESGGCVVQAHPFRQRVYIPKVVLSTGCVDAVEVANGGHEDPSYDALACRYAKNIGKTATAGSDIHDASDIYYNELFGVYVEKKFNSISDYVXVILNNKISGLKVNEGRLDYFGTETIKLPFEIRDENDRVTGRDWREFI

SEQ ID NO: 31461 - DNA, 819 bp, Unknown
  Obtained from environmental sample
  misc_feature (1)..(819): n is a, c, g, or t
ttggaaaaagaaaaaagagattatatactcggcaaggttcccgactttacagagataagttttgacaacggaagatcgtttataaagacaagaaaagctttggctaaagacgttgattaccgcttccgcttggaagacagtgaaatgcccgaaggctaccactacatcgttataagaacaacaatgaagaacggcgaaacagcggtaacaagaatgattgttcaaattgacaaaacattccccgaagtccgccttatatctcccgaagccggaagcagatacaacgagaaaatcgtatactcggcgtccgctacggatgatatcgaacttgtaagcctttcctaccaccttcgcaaaggcgacaaggcgctgtacgaagtgccgggattcttacaaggactctattttgaaggcataataccgccgtttataaaacaaatcgcccccgatgtaatacctaatatcttcggcggaggagccacatataccgacttcggacttggattaagcttctttgacgacaacgtaaaacttcaagcgcaatacggtatgatgactcaatccctttgggaagctttgggaggcaaagacgaggtacgttacggcggaaatgtaataggatttaaaatcatagcgagtatttactcgcttccgctggctcgttattggggacccgattttgaatggttgttcttaacattagcgttcggagccaacttctcgtactttgaaatagcgcagagcggttctcccacatggatgagcgcggttctgttccagatggaattcccgaaagtagaatccaaacgactgcgataa

SEQ ID NO: 31462 - protein, 272 aa, Unknown
  Obtained from environmental sample
  misc_feature (1)..(272): Xaa is any amino acid
MEKEKRDYILGKVPDFTEISFDNGRSFIKTRKALAKDVDYRFRLEDSEMPEGYHYIVIRTTMKNGETAVTRMIVQIDKTFPEVRLISPEAGSRYNEKIVYSASATDDIELVSLSYHLRKGDKALYEVPGFLQGLYFEGIIPPFIKQIAPDVIPNIFGGGATYTDFGLGLSFFDDNVKLQAQYGMMTQSLWEALGGKDEVRYGGNVIGFKIIASIYSLPLARYWGPDFEWLFLTLAFGANFSYFEIAQSGSPTWMSAVLFQMEFPKVESKRLR

SEQ ID NO: 31463 - DNA, 1065 bp, Unknown
  Obtained from environmental sample
  misc_feature (1)..(1065): n is a, c, g, or t
atgactgcctttctcccactaaatcgcataaatgccgcttatgagccagaactctcggaagccgtttcaagggttgcaaaatctggttggtatttgaggggaaaagaaacagaaaaatttgaaagcgaatttgccgcattttgcggaatgaagcattgcacaggagttgcaagcggactagatgccttaacattaatttttggtgcttacaaaattcttggaaaattaaaagacggcgaccacgttatagttccagcaaacacatacatagcctctattatggctatttcaaaaaataatttaattcctgttttagttgaaccaagcgaagaaactttcaacataaataccgttcatttaaccaaaaatgtaaaagccattttaagcgtaaatttatacggcaggcaggcggaaattgccaaagaaaaagatttgcttttaattgaagactgcgcccaaagtgcaggtataaaacccattggcgatgcagcagcgtttagtttttacccaactaagaatttgggcgcacttggagatgggggagcggttgtttccaacgatgaagaattgaataatgttgttaaagcactcggtaactatggttctcaaaaaaaatacatcaacgactatttaggctgcaactcccgcctagacgaaattcaagcggcagcactcagcgttaaattgcgggggttaaatgaagacaataaaaaacgctgtgaaatagcaatgcgctacattgcagagataaaaaatcaggatattgttttgccacaaaaagagggaaataatgtttggcatttattcgttatccgttgcaaaaatagagatgccttgcaaaagcatttatttgaaaacggaatagaaacgatgatacattatcccattccaccacatttgcaaaaagcatacaaaggcggaaatttgctatacgataaacttccaataactgaaaagctcgcaagtgaggttttgagcttgcctattcaccaagccattacagaagatgaaatagaaaaagttattaattcgctatccaagcctctccagaaccagaaaccgtag

SEQ ID NO: 31464 - protein, 354 aa, Unknown
  Obtained from environmental sample
  DOMAIN (12)...(346): DegT/DnrJ/EryC1/StrS aminotransferase family
  misc_feature (1)..(354): Xaa is any amino acid
MTAFLPLNRINAAYEPELSEAVSRVAKSGWYLRGKETEKFESEFAAFCGMKHCTGVASGLDALTLIFGAYKILGKLKDGDHVIVPANTYIASIMAISKNNLIPVLVEPSEETFNINTVHLTKNVKAILSVNLYGRQAEIAKEKDLLLIEDCAQSAGIKPIGDAAAFSFYPTKNLGALGDGGAVVSNDEELNNVVKALGNYGSQKKYINDYLGCNSRLDEIQAAALSVKLRGLNEDNKKRCEIAMRYIAEIKNQDIVLPQKEGNNVWHLFVIRCKNRDALQKHLFENGIETMIHYPIPPHLQKAYKGGNLLYDKLPITEKLASEVLSLPIHQAITEDEIEKVINSLSKPLQNQKP

SEQ ID NO: 31465 - DNA, 456 bp, Unknown
  Obtained from environmental sample
  misc_feature (1)..(456): n is a, c, g, or t
atggcaatagtgcagattttcaacaacaaaaaggtaattgcaaaatacaatattccttttattgtccatcgctttgaatatatagcagaaatgaaaaagggtattcacaagggcgaaaccattgaggaacatgattttgaaatggtgtggcaagaaacaacttttcaaaagaggaaagtcataaaaatagcaagcgatgctattggcagaaccgcaatacgcaccttaaaagcgggcgagcctttggtggacaatgctttaagcaccccttatgccgttaaagcaggcgatgctgttaggctttttgcaaaatttggcgaggctgttgttcaaacaagtgccattgcacaaaaaaatgcgtttaaggggcaaaccatttcggttagaaatatagataccggcaaggatattatggctacggtttctggttctggagaggcttggatagcgaattaa

SEQ ID NO: 31466 - protein, 151 aa, Unknown
  Obtained from environmental sample
  DOMAIN (2)...(151): FlgA family
  misc_feature (1)..(151): Xaa is any amino acid
MAIVQIFNNKKVIAKYNIPFIVHRFEYIAEMKKGIHKGETIEEHDFEMVWQETTFQKRKVIKIASDAIGRTAIRTLKAGEPLVDNALSTPYAVKAGDAVRLFAKFGEAVVQTSAIAQKNAFKGQTISVRNIDTGKDIMATVSGSGEAWIAN

SEQ ID NO: 31467 - DNA, 807 bp, Unknown
  Obtained from environmental sample
  misc_feature (1)..(807): n is a, c, g, or t
atgtattttctccagatatggttttccatgagcgatgaaggccttgaagatgccatatacgacagcaaagcattcagctccttcatgggcgtgtctctggattccgtccccgatgcaaccgttctgggcaatttccgtaaaattgtaaacgacaacggtcttggcggcaagatgctttcccttgtgaatgcaaagatagagaagaatggtttgataatgcatggcggaacgataatggatgccaccatccacgaggcacccaagtccacgcgcaatgcgaaccaatcacgcgaccccgagatgtccagcacgaagaagcatggcagctggcatttcggagccaaatcccacataggcgttgatgcaggaacaggtcttgttcacagcgttgagattacgccggccaacgtgcacgacataaaggttgcccacaagcttatacgctccgatgacaagacagccggaggcgatagcggttatgttggcttggagaatcgcgaggagatgaagagcgacccgtttctatcccaagtgaagtgcgagatagtgaagcgtccatcattttggaagaaaaaagagttgagcaagcttgcggaggaatttgacagaaatgaagagcgtaggctcataagcaaaaggcagaaagtggaatatgtgttccatgtcatcaaggatatattcaaattcaaaaagcttccctacaagggcattgccaagaacgcggaacgccttctggcatcatttgccaatgccaatctttatatgcttgccatagcaggccgcaggttctgccagcagacgggttga

SEQ ID NO: 31468 - protein, 268 aa, Unknown
  Obtained from environmental sample
  DOMAIN (76)...(253): Transposase DDE domain
  misc_feature (1)..(268): Xaa is any amino acid
MYFLQIWFSMSDEGLEDAIYDSKAFSSFMGVSLDSVPDATVLGNFRKIVNDNGLGGKMLSLVNAKIEKNGLIMHGGTIMDATIHEAPKSTRNANQSRDPEMSSTKKHGSWHFGAKSHIGVDAGTGLVHSVEITPANVHDIKVAHKLIRSDDKTAGGDSGYVGLENREEMKSDPFLSQVKCEIVKRPSFWKKKELSKLAEEFDRNEERRLISKRQKVEYVFHVIKDIFKFKKLPYKGIAKNAERLLASFANANLYMLAIAGRRFCQQTG

SEQ ID NO: 31469 - DNA, 540 bp, Unknown
  Obtained from environmental sample
  misc_feature (1)..(540): n is a, c, g, or t
atgattggaacaacaaatatatttaagcctacccacattcaaagaaaagcccttgcgcttttgaaaggcggggcgaaacatattttgctgttcggcggttcacgttctggaaaaacaaccgtacttgtgatggcgattatctaccgggcgctgcggtttgcggggtcaaggcatttgatttgccgttaccgcgcgaaggacgcccggtcttcggttatgcgggaaaccttgctgccgtggcttgataatacggtgggaaaaagtggctatacctaccttgcccatgaaagcatgataacgcttttcaacggctcggaaatttggattggcggtttgggagaccgtgagcaagcggacaagatacttgggcatgagtacaacacgatttatttcaacgagatcagccaactttcttatgccgcagttactacggcctattcacgggctggctatgagaaatcaagggctgccggaacctgttttactatgactgcatccggggcagccccttgcattgggcatataaagtatttgtcctga

SEQ ID NO: 31470 - protein, 179 aa, Unknown
  Obtained from environmental sample
  misc_feature (1)..(179): Xaa is any amino acid
MIGTTNIFKPTHIQRKALALLKGGAKHILLFGGSRSGKTTVLVMAIIYRALRFAGSRHLICRYRAKDARSSVMRETLLPWLDNTVGKSGYTYLAHESMITLFNGSEIWIGGLGDREQADKILGHEYNTIYFNEISQLSYAAVTTAYSRAGYEKSRAAGTCFTMTASGAAPCIGHIKYLS

SEQ ID NO: 31471 - DNA, 717 bp, Unknown
  Obtained from environmental sample
  misc_feature (1)..(717): n is a, c, g, or t
ttgcattgggcatataaagtatttgtcctgaaacgccaatttctcactggcgaaccattagaaaaatcggaactgtaccagtccatgctgctcaatccagaggataacagggaaaacctgccggaagattatatagccgacattcttgacgtgcttcccgaaaaacaaaaagcccgcttccgtgatgggctttgggttaaggcggagggcgttatctatgaccgctttgacgaaacgatgattgtcaatgccgccgacctgccaaaagaatttgaccgattggcggcggggcaggattttggattgaatatcacgtttgtaaaaatcgggtgggttggcgatgtgatttatgtcatcggcgattacggggctttcaacatgactacccaaagttttaatgaggaactttcggcaaggggcttgtttgagggcggtacttttccggtgtactgcgatccggctggcggggaacgcatacaggaaattacgggcgggattaaagcaaacaattccgtggacagcggcattgattttatcagcgcaaaaattgagcgcaaacaattttttgtgtgcgaaaagtgtaccggggtgctttccgaaatttgggattactgccgtgatgaggcggggcagattgtaaaggttaatgaccatttccttgacgctttgcgttacgccattttttctgacgtacagcagggggtgattttatcgtga

SEQ ID NO: 31472 - protein, 238 aa, Unknown
  Obtained from environmental sample
  misc_feature (1)..(238): Xaa is any amino acid
MHWAYKVFVLKRQFLTGEPLEKSELYQSMLLNPEDNRENLPEDYIADILDVLPEKQKARFRDGLWVKAEGVIYDRFDETMIVNAADLPKEFDRLAAGQDFGLNITFVKIGWVGDVIYVIGDYGAFNMTTQSFNEELSARGLFEGGTFPVYCDPAGGERIQEITGGIKANNSVDSGIDFISAKIERKQFFVCEKCTGVLSEIWDYCRDEAGQIVKVNDHFLDALRYAIFSDVQQGVILS

SEQ ID NO: 31473 - DNA, 444 bp, Unknown
  Obtained from environmental sample
  misc_feature (1)..(444): n is a, c, g, or t
ttgaaagttggcaaaaccagactctatttagacaattgttgctttaacagaccgtatgatgatcaagccaacctcaatattcgcctggaagcagaggcaaaactctttatacagaacgagatattagaaaaaaattatgagcttgcatggtcttttatgatggattatgaaatttccgctaatccgttttatgacagacaatttgcttttatgaagtggaaaaatatagctgttttggatattgaccctgcggaaataatattaatgaaaggcagagaaataatgcaaaagaatataaaacaaaaagacgcaatacatatagcttgtgcaataaaagcagaatgtgattattttttaacaacagatagaaaagtattaaataaaaatattcctgaaataaagctaataaacccgcttgattttatacgtcaattttacacatag

SEQ ID NO: 31474 - protein, 147 aa, Unknown
  Obtained from environmental sample
  misc_feature (1)..(147): Xaa is any amino acid
MKVGKTRLYLDNCCFNRPYDDQANLNIRLEAEAKLFIQNEILEKNYELAWSFMMDYEISANPFYDRQFAFMKWKNIAVLDIDPAEIILMKGREIMQKNIKQKDAIHIACAIKAECDYFLTTDRKVLNKNIPEIKLINPLDFIRQFYT

SEQ ID NO: 31475 - DNA, 507 bp, Unknown
  Obtained from environmental sample
  misc_feature (1)..(507): n is a, c, g, or t
ttggcgcgttgtattttaaaacttattgattatgagggagaaattcttcttgacggacaggagcagaaaaaaccgccgccgattcaaatggtttttcaggagaccggcgcgtcattaaaccccggcaaaaatatcggctggcttatggatgagcctcttttcattcacagaattggaaataaagaagagcgcaggcgcaagatcgacagaatgttactgcgcgtcggacttgacccgtcctacaaaacgcgccgcgttcatgagttaagcggcggtcaaaaacagcgcgtctgcatcgcccgcgcattgattctctcccctcgccttctaatcgccgatgaagcgattagttctcttgacgtatcagcgggcgcgcagatactgaacctgttcagggaactgcataaaagtatggagttgacgattctttttatttcgcataacaaggatgctgttgagtatatttgcgacagaatggcggttatggagaatggggggttactttga

SEQ ID NO: 31476 - protein, 168 aa, Unknown
  Obtained from environmental sample
  DOMAIN (2)...(165): ABC transporter
  misc_feature (1)..(168): Xaa is any amino acid
MARCILKLIDYEGEILLDGQEQKKPPPIQMVFQETGASLNPGKNIGWLMDEPLFIHRIGNKEERRRKIDRMLLRVGLDPSYKTRRVHELSGGQKQRVCIARALILSPRLLIADEAISSLDVSAGAQILNLFRELHKSMELTILFISHNKDAVEYICDRMAVMENGGLL

SEQ ID NO: 31477 - DNA, 531 bp, Unknown
  Obtained from environmental sample
  misc_feature (1)..(531): n is a, c, g, or t
ttgggttgctatgcccaaggcagcaaatgctacaataataatccagcctactgcaatacatacggccgactttacgactgggcaattgcaatgaatcttccttccaaatgcaacagcacccccacaagcgatgccgactgtgccataaaaaccccgaatcatcaggggatatgccctagcggttggcatatcccgggcggcgatgaatggttcgagctggtgaactatgttgaaagcgacaggggatgcagcaactgtgctggcaaataccttaaagctgttagcggttggaatgctcctattcaaggagaatctagcaatggtgaggacacgtttaggtttgcggcactgccgggcggcggctattacgatggcaatttcgagggtgttggctacaacggcttatggtggagtgcccaggagctccttgctgacgaagcctacgtcctgagcatcacatctagagagttcgctatgttgcgccaaaacagtaaggaccgcggcttcagcgtccgttgcgtgaaggattga

SEQ ID NO: 31478 - protein, 176 aa, Unknown
  Obtained from environmental sample
  misc_feature (1)..(176): Xaa is any amino acid
MGCYAQGSKCYNNNPAYCNTYGRLYDWAIAMNLPSKCNSTPTSDADCAIKTPNHQGICPSGWHIPGGDEWFELVNYVESDRGCSNCAGKYLKAVSGWNAPIQGESSNGEDTFRFAALPGGGYYDGNFEGVGYNGLWWSAQELLADEAYVLSITSREFAMLRQNSKDRGFSVRCVKD

SEQ ID NO: 31479 - DNA, 426 bp, Unknown
  Obtained from environmental sample
  misc_feature (1)..(426): n is a, c, g, or t
gtgctttttgttggggtctatgttgatgtcgtcgtcgatattataaatgacgccgtcgacgcgcgccctgacgtacccgctcttttgcagcttaacgagcagctctttgtacgcccccttcctattgctgacgacgggggcgaggatttggaatttcgccccggcgtcaagcgacaatatcctgtccgttatctcttgcacggattgcctggcgattacgcgcccgcacttatggcaggtgggcgtacccacgcgggcgaagagcagccgcatatagtcgtggatttcggtgatcgtgcccaccgtggagcgcgggttgtggccggaggtcttctgttctatggatatggccggcgacaggccgtcgatcctatcgacgtcgggcttttccatcagccccaaaaactgccgggcgtaagaggatag

SEQ ID NO: 31480 - protein, 141 aa, Unknown
  Obtained from environmental sample
  misc_feature (1)..(141): Xaa is any amino acid
MLFVGVYVDVVVDIINDAVDARPDVPALLQLNEQLFVRPLPIADDGGEDLEFRPGVKRQYPVRYLLHGLPGDYAPALMAGGRTHAGEEQPHIVVDFGDRAHRGARVVAGGLLFYGYGRRQAVDPIDVGLFHQPQKLPGVRG

SEQ ID NO: 31481 - DNA, 708 bp, Unknown
  Obtained from environmental sample
  misc_feature (1)..(708): n is a, c, g, or t
atggacccgctgatggtcaacgccattttggaaattgatcccgcgattaccttttccattatcgaccgtcttttcggaggcacgggcgaaggcacaaaatcccagcatgaattgacagatattgagcagtccgtaatggaaggaattatagtccgtattctgggaaatatgcgcgaagcgtggacgacggttatcgacctgcgcccgcgcttggggcagattgacactaaccctcagtttgcgcagattgttccgcctacggaaatggtagtccttgtaactttggaaaccaaagtaggcgatgtggaaggcatgatgaacttctgtattccctaccttacgatagagcctattatcagcaagctgtccgcccaattctggtattcatcggtacggcgcaacgctacgacagagaacctcaatgtactaaaggagaagcttacaacggtcgatgttaatataacggccgaaatcggaaagattaatgttcctgtaagggacgttctttccttacagataggggatgtaatacggctctacaatacacgcatcggcgatccctattcattaaatatcggttcaaggaaaaagtttctgtgccgccccggcgtacttggaaagaaaatggcggtgcagataacgcagaagattgccgagcttggacaagaagaatttgaagagctcgtatctgaaggagatgaattatga

SEQ ID NO: 31482 - protein, 235 aa, Unknown
  Obtained from environmental sample
  DOMAIN (143)...(220): Surface presentation of antigens (SPOA) protein
  misc_feature (1)..(235): Xaa is any amino acid
MDPLMVNAILEIDPAITFSIIDRLFGGTGEGTKSQHELTDIEQSVMEGIIVRILGNMREAWTTVIDLRPRLGQIDTNPQFAQIVPPTEMVVLVTLETKVGDVEGMMNFCIPYLTIEPIISKLSAQFWYSSVRRNATTENLNVLKEKLTTVDVNITAEIGKINVPVRDVLSLQIGDVIRLYNTRIGDPYSLNIGSRKKFLCRPGVLGKKMAVQITQKIAELGQEEFEELVSEGDEL

SEQ ID NO: 31483 - DNA, 1713 bp, Unknown
  Obtained from environmental sample
  misc_feature (1)..(1713): n is a, c, g, or t
atgctcctagccaccatcagtaacaatcccagcttcgtcagagtatattccatctggaaaccaaacgccatggacggcatggacgccagttatataggccgtccgggttcaacagaaacggggcagtacgcgatgacctacacaagggaaaacggccaggttgaggtagccagaaacctcgtcgttgacgaagttaccgcctggataaacggccccgacgggcacaaagacaaagttgatcaccccacgccttttacggtgaacggaaaagacacctttatcatcagaatgggggtttccataagcaaaaccgcaaccggcgaagtagtcggacacctggctgtcctgtttgacatcgcgcccatacagaccgaggtggaaagcacccttaaacagttcgacgaaatagcccagatgtccctttactcaggcaacggattcatcctggggaacctgaacgccgacagggtaggaaaaatgctgaccgaagcggaaagattatacggcgtccatcaggaagccgccaatcaggccgttctcgacggcaagccatttagctgttcaagcttttcaaatacgctgcattcaaacgtaaaaattgaaatgatgcctttccggataggcagttcggacaataactggagcgtaatgattgcgacaacggaatcgtacatcatgcaggaagtcaacgagatggtaaggtttaccattgtccttgcgggaatagccctgatagccgcggtggtaatcgtctaccttgccctgagtaccactaccaagccaatcgtcagggtggcggacacgctcaaggacatttcagaaggtgaaggcgatttgacgcggagtattaccgtcagttccaaagacgaaatcggcgaccttgccctttacttcaataaaactcttgaaaaaatcaaagaactggtatttgtcattaaaaagcagtcgggcgaattgaataatataggcaacgaccttgccagcaatatgaccgaaaccgccgcggcggtaaaccagatcaccgccaacattcagagcgttaaaagcagagtcataaaccagagtgccagcgttacggaaaccaacgcgactatggaacaggttattgccaacataaacaagctaaacgaccatgtggaagcccagagcagaaacgtatcgcaggcgtcatccgccattgaggaaatggttgccaacatcagctctgttaccaacacgttggtcaacaactccaccaatgtaaaaacattgcaggaagcctccgaagtgggaaagaccggcttgcaggaagttgcggcggacattcaggaaatatcccgcgaatccgaaggcctgttggaaattaacgcggtaatggaaaacatagcaagccagaccaaccttctttcgatgaacgccgcgatagaagcggcgcacgccggagaagccggaaaaggcttcgcggtagtagccgatgaaatccgcaaactggcggaaagttccggcgagcagtcaaaaacaatcagcttggtgttgaaaaagatagcggaatctatcanaaaaataacgggctccaccgaaaacgtactgaacaaattcgaatcgattgacaccggagtaaagacagtatcgatgcaggaagaaaacatccgcaacgcgatggaagagcagggagaaggcagcaagcnaattctgcaaagcgcaggctctttaagcagcttacgcagcaggtaa

SEQ ID NO: 31484 - protein, 570 aa, Unknown
  Obtained from environmental sample
  DOMAIN (380)...(570): Methyl-accepting chemotaxis protein (MCP) signaling domain
  misc_feature (1)..(570): Xaa is any amino acid
MLLATISNNPSFVRVYSIWKPNAMDGMDASYIGRPGSTETGQYAMTYTRENGQVEVARNLVVDEVTAWINGPDGHKDKVDHPTPFTVNGKDTFIIRMGVSISKTATGEVVGHLAVLFDIAPIQTEVESTLKQFDEIAQMSLYSGNGFILGNLNADRVGKMLTEAERLYGVHQEAANQAVLDGKPFSCSSFSNTLHSNVKIEMMPFRIGSSDNNWSVMIATTESYIMQEVNEMVRFTIVLAGIALIAAVVIVYLALSTTTKPIVRVADTLKDISEGEGDLTRSITVSSKDEIGDLALYFNKTLEKIKELVFVIKKQSGELNNIGNDLASNMTETAAAVNQITANIQSVKSRVINQSASVTETNATMEQVIANINKLNDHVEAQSRNVSQASSAIEEMVANISSVTNTLVNNSTNVKTLQEASEVGKTGLQEVAADIQEISRESEGLLEINAVMENIASQTNLLSMNAAIEAAHAGEAGKGFAVVADEIRKLAESSGEQSKTISLVLKKIAESIXKITGSTENVLNKFESIDTGVKTVSMQEENIRNAMEEQGEGSKXILQSAGSLSSLRSR

SEQ ID NO: 31485 - DNA, 762 bp, Unknown
  Obtained from environmental sample
  misc_feature (1)..(762): n is a, c, g, or t
atggagattatacgctcgcgccggctccggtgttgctttttggaaggtactactacaatcaacgaagttacctcccgtttgcagggcggttatataattaccctggtggacagttttggagacgcttacgatgcgcttaaaaaaggggaagtcgacgcgttttttgacgaaagccccacagaagccgtctttgatgtatacgatgatataatagccgaagattttctccccgtgatttacagtcctgtttccctgagcacaaaaaaccctgatttccagcctgtcatatcaattgtgcaaaaggctctgcacaacggctgtatagatcaattaatcggcctttataagcaaggagaaaacgaataccaccggcataaactttttatgcgcctgaccgaagaagaaaaaaagtatatacgcaatcacccggtggtatcaattgcggccgaatacgataattacccgatcagtttttacaataaatatgaagacaaatggcagggaattgcccatgatgtattgagagagttggaatcgcttaccggtttaaattttgaaataaccaatgataaaaatacggaatggcctgaactgctaagctcgttgggaaacggaaaaacatccatgataaccgagcttttattttcggaagatcgcattggattattcctgtggcccaagtccgtgatcatgacagataattacgcgcttatttccaatcggactacccaacatcagtataaacgacatcctgcgcattaa

SEQ ID NO: 31486 - protein, 253 aa, Unknown
  Obtained from environmental sample
  misc_feature (1)..(253): Xaa is any amino acid
MEIIRSRRLRCCFLEGTTTINEVTSRLQGGYIITLVDSFGDAYDALKKGEVDAFFDESPTEAVFDVYDDIIAEDFLPVIYSPVSLSTKNPDFQPVISIVQKALHNGCIDQLIGLYKQGENEYHRHKLFMRLTEEEKKYIRNHPVVSIAAEYDNYPISFYNKYEDKWQGIAHDVLRELESLTGLNFEITNDKNTEWPELLSSLGNGKTSMITELLFSEDRIGLFLWPKSVIMTDNYALISNRTTQHQYKRHPAH

SEQ ID NO: 31487 - DNA, 696 bp, Unknown
  Obtained from environmental sample
  misc_feature (1)..(696): n is a, c, g, or t
atgcaggctaccagaaggcttggattaacggcttttttggttagggaagaccataaagaaacggaggtgttttctctaataggccccaaaaaatttgatattccctggcgtgttttggagaaccaaggctggattgcgcaggcaaaatgttatgaggtaagggtgccaatggattcagaacagagaatatcttatgctgttgcccctcttcgcgaaaaaatttccatagcgggctgcaatccagaaaagttcagcattgtgaaaaatttgctagaaaagcacagcgaagaaaatgaccgcattttaataatagggcagtatatagagcagttggaagcactcgcaaaagaaatcaatgtccctttgataacaggaaaaaccccgaacaaagagcgagaccggatttacgatagctttagaagcggagaaattaggattttgatggtgagcaaggtggggaattttgcaatagatttgccagatgcaagcgttttaatccaaatttcaggtaccttcggtagcaggcaagaagaagcccagaggctaggcagggttttgcgcccaaaaaaagacggccgccccgcaatgttctattcccttgtgacaaaagattcccgtgagcaggaatttgctatgaaccgccagctgtttttggcggaacagggctatgggtatgagatagtcagtgcggattaa

SEQ ID NO: 31488 - protein, 231 aa, Unknown
  Obtained from environmental sample
  DOMAIN (112)...(189): Helicase conserved C-terminal domain
  misc_feature (1)..(231): Xaa is any amino acid
MQATRRLGLTAFLVREDHKETEVFSLIGPKKFDIPWRVLENQGWIAQAKCYEVRVPMDSEQRISYAVAPLREKISIAGCNPEKFSIVKNLLEKHSEENDRILIIGQYIEQLEALAKEINVPLITGKTPNKERDRIYDSFRSGEIRILMVSKVGNFAIDLPDASVLIQISGTFGSRQEEAQRLGRVLRPKKDGRPAMFYSLVTKDSREQEFAMNRQLFLAEQGYGYEIVSAD

SEQ ID NO: 31489 - DNA, 915 bp, Unknown
  Obtained from environmental sample
  misc_feature (1)..(915): n is a, c, g, or t
gtgggcataggcgaatttttggatctcattccatttgggaaatgggcaaaaaaatgcgggctggatttaatccagcttttgccggtaaacgacacaggcgaagaaccaagcccttatagcgcaagaagtgcattcgcccttaatcccgtatatatacgcttgcaagaaatagaaggcgcagaggagattttaggcgaagaaccggataaacacaataaaaaatttatgaaacatccgcgcattccttatgtggaagtggttcgttacaaacgccacgccttgcgcgagattttcaacaaaagaaggcacgaaattctgggaaatgagcatttcacaaaatggctggaacaaaacgaatgggttaactcttatgccgttttttgcgccctcaaagccgaaaaccacgaagctgcatggaaacattgggaaaaaaaagaaaaaccaaaagcaagcgatgttatgtttcaaaaatggatgcagtgggttgcagaagaacaattcttgaaagccgtttcggaactcaacaaattaggtattcgcttaaaaggcgatattcccattttaataaacgaagacagcgcagatgcttggcattacccgcagtttttcagcttggacaaccgtgccggagccccaccagatatgttctgctacagtgggcaaaactgggcattcccaacctacaaatgggataaccttgaaaaggaaaattttagctggtggcgcgacagaattaaacacgccgcaaaattttaccacgcatatcgcatagaccacgttcttggatttttcagaatatgggtggtgccagaacaggaattcaccggaattttggggcattttgtcccgtcccattccatttatatgagcgaacttgcgcaagccggcatcccaagggaaccgtgcattatttaa

SEQ ID NO: 31490 - protein, 304 aa, Unknown
  Obtained from environmental sample
  DOMAIN (2)...(304): 4-alpha-glucanotransferase
  misc_feature (1)..(304): Xaa is any amino acid
MGIGEFLDLIPFGKWAKKCGLDLIQLLPVNDTGEEPSPYSARSAFALNPVYIRLQEIEGAEEILGEEPDKHNKKFMKHPRIPYVEVVRYKRHALREIFNKRRHEILGNEHFTKWLEQNEWVNSYAVFCALKAENHEAAWKHWEKKEKPKASDVMFQKWMQWVAEEQFLKAVSELNKLGIRLKGDIPILINEDSADAWHYPQFFSLDNRAGAPPDMFCYSGQNWAFPTYKWDNLEKENFSWWRDRIKHAAKFYHAYRIDHVLGFFRIWVVPEQEFTGILGHFVPSHSIYMSELAQAGIPREPCII

SEQ ID NO: 31491 - DNA, 957 bp, Unknown
  Obtained from environmental sample
  misc_feature (1)..(957): n is a, c, g, or t
atggcgcgtagagtgggagggccgagtgaaaaaaagtcggctttccgcattgactttttccgcgcaatgactatattaatatcggatgtaaattcagccccgaaaaggatngtcgccatgtacattgcccgccacattgaaaaagcggtgaaaaaattatcgaagatgtttggggccgtgcttgttaccggggcgtgtcaggtcggcaagaccacgcttctcaaagaggtagcgtcaggcgtccgatatgtcaccctcgacgacccgattatgttgcaatcggcgattgacgagagcgggacgttctttaagaataatcccccgcccgtatttgtggatgaaatacagtacgctccggcgctgttcccgcagatgaaaattctgctcgacgcgaagaaacagaaagggcagttttatctatcaggttcgcaacagtttcagatgatgaaaaaaatcggcgaatcgttggccggtcggctcggtatcgtcaacctgttgggtttttcgttgagggaactaaagggggagagtttttcggaaccctttttgcctacggaaaactattttcataaacgttcgcggacaaatacggacgttttgtatgacgaagtatgggagcgtatcctgaggggcgctatgccggaattatgcgcgaatcctgaaattgaccatcagatgttctacgggtcatacgtaaaaacatatttggaacgcgatgtaagagatttggcgcaagtcggcgacgagctgaaatttttacgttttcttaccgtggctgcggcaaataccgggcagcttctcaacttatcctcttttgcccgcgatgtggcgataagtgttcccaccgcggagcgttggctctccgttttaaccgcttcgggcttggcgtatctcttacaaccataccacaacaacatcgcaaagcgagcggtcaagacgcctaagctgtattcctga

SEQ ID NO: 31492 - protein, 318 aa, Unknown
  Obtained from environmental sample
  misc_feature (1)..(318): Xaa is any amino acid
MARRVGGPSEKKSAFRIDFFRAMTILISDVNSAPKRXVAMYIARHIEKAVKKLSKMFGAVLVTGACQVGKTTLLKEVASGVRYVTLDDPIMLQSAIDESGTFFKNNPPPVFVDEIQYAPALFPQMKILLDAKKQKGQFYLSGSQQFQMMKKIGESLAGRLGIVNLLGFSLRELKGESFSEPFLPTENYFHKRSRTNTDVLYDEVWERILRGAMPELCANPEIDHQMFYGSYVKTYLERDVRDLAQVGDELKFLRFLTVAAANTGQLLNLSSFARDVAISVPTAERWLSVLTASGLAYLLQPYHNNIAKRAVKTPKLYS

SEQ ID NO: 31493 - DNA, 435 bp, Unknown
  Obtained from environmental sample
  misc_feature (1)..(435): n is a, c, g, or t
atgttaaccgacatgataaagaaaggcggcataatggcctccacccatgttggcggcttctccggggcctttatccctgtctccgaggatgaaggtatggttaacgcggtgaagaaaggcgcgatcagccttgacaagcttgaggctatgacctcggtttgctctgtcggcctggacatgatcgccctgcccggcgacacaagcgccgccaccatctcggcgatcatcgccgatgaaatggctattggcatggtgaacaacaaaaccaccgcggcgcggattattcccgtgcccggcaaaaaagccggcgactgggctgagttcggaggcctcctcggcggcgctcccgtcatgccggtaaactccgcgggaagcgacgcttttatcaatcgtggcgggagaataccggctccggttcactcgttcaggaattag

SEQ ID NO: 31494 - protein, 144 aa, Unknown
  Obtained from environmental sample
  DOMAIN (1)...(144): Uncharacterized ACR (DUF711)
  misc_feature (1)..(144): Xaa is any amino acid
MLTDMIKKGGIMASTHVGGFSGAFIPVSEDEGMVNAVKKGAISLDKLEAMTSVCSVGLDMIALPGDTSAATISAIIADEMAIGMVNNKTTAARIIPVPGKKAGDWAEFGGLLGGAPVMPVNSAGSDAFINRGGRIPAPVHSFRN

SEQ ID NO: 31495 - DNA, 840 bp, Unknown
  Obtained from environmental sample
  misc_feature (1)..(840): n is a, c, g, or t
ttgattgcatttgttcaacgggagaagctacacgcgaataaaatacgcgaaaaaattatgcgtaccgctggttctcttgtaaaaacgggctgtgatattgagactgagtacggtattccgattattaacaagcgcgtctccgtaactcctatctctcttgtggcggcttcctgtgatgaagaagattttactccgtttgcgaagactttggattccgttgcgaaagagttgggtgttgattttatcgggggattttccgcccttgttcaaaaaggattaactacaggcgataagaggctgattaattctttgcctgccgcgctttcgcaaacggacagggtatgcgcttccgttaataccgcgtcaagcaagagcgggattaacatggacgcggtaaggctgatgggggagataattaagaaaaccgccgaagcgactgcggacagggacggaataggctgcgctaaacttgtggttttttgcaacgctcctgaggataatccatttatggcgggcgcgtttcacgggccgggggaagccgagagcgttcttaatgtgggagtttcgggaccgggcgtaataaaggcggctcttgagaactgccgcgggaaaaattttgacgaattggcggatactataaaaaagacggcgtttaagattacgcgcatgggtcagcttgtgggaatggaggcggctaagaggataggggttcctttcggcattttggatctgtccttagcgccgacgcctgaggtaggcgattcggtcgcccgcatccttgaagagatgggcttgaaancgcgggaacccacggcaccacggcggccctcgccatgttaa

SEQ ID NO: 31496 - protein, 279 aa, Unknown
  Obtained from environmental sample
  DOMAIN (1)...(279): Uncharacterized ACR (DUF711)
  misc_feature (1)..(279): Xaa is any amino acid
MIAFVQREKLHANKIREKIMRTAGSLVKTGCDIETEYGIPIINKRVSVTPISLVAASCDEEDFTPFAKTLDSVAKELGVDFIGGFSALVQKGLTTGDKRLINSLPAALSQTDRVCASVNTASSKSGINMDAVRLMGEIIKKTAEATADRDGIGCAKLVVFCNAPEDNPFMAGAFHGPGEAESVLNVGVSGPGVIKAALENCRGKNFDELADTIKKTAFKITRMGQLVGMEAAKRIGVPFGILDLSLAPTPEVGDSVARILEEMGLKXREPTAPRRPSPC

SEQ ID NO: 31497 - DNA, 438 bp, Unknown
  Obtained from environmental sample
  misc_feature (1)..(438): n is a, c, g, or t
ttggccgagtccggctttgacactgccgacagcctcaataccgtattcagatcggaaccgtcaatggacagcatcgggccgccggatataaaaatcgaaggcagatcaagccgcgccgccgccatcagcatacccggcacgattttgtcacagttgggtataaaaaccagcgcgtcaaagccgtgggccttaaccatacactcaatgctgtcggcgatgatttcacgggaacagagggaatacttcattccctcatgccccatcgccagcccgtcgcacacaccgatgacgttaaattccagcggaacaccgccgttcatcaacacgccgtctttcgccgcccgcgctatattctgcaaatggatatgccccggcacaacctcgttaaaagagttaacaattcccaccagaggacgttcaaactgggcgtcagtatag

SEQ ID NO: 31498 - protein, 145 aa, Unknown
  Obtained from environmental sample
  misc_feature (1)..(145): Xaa is any amino acid
MAESGFDTADSLNTVFRSEPSMDSIGPPDIKIEGRSSRAAAISIPGTILSQLGIKTSASKPWALTIHSMLSAMISREQREYFIPSCPIASPSHTPMTLNSSGTPPFINTPSFAARAIFCKWICPGTTSLKELTIPTRGRSNWASV

SEQ ID NO: 31499 - DNA, 684 bp, Unknown
  Obtained from environmental sample
  misc_feature (1)..(684): n is a, c, g, or t
gtgtttgcccacggattcaatatcgttacggggcaaatcgttccgccaaaagatgttaatgttattatgatcgcgcccaaaggcnccggccacacggtgcgaagccaatatcaggaaaacaagggcgttccctgcctcatcgccgtggaaaataacgcgaccggcaacgccaaagaaatcgcccttgcctacgcttcggcgattggcggcggcagaggcggcattctggaaaccacgtttaccgaagaaactgaaactgatctgttcggcgaacaatgcgtcctgtgcggcggcgtttcggcgctgatgaaagccggttttgaaacactggtaaacgcgggctatcagccggaaagcgcgtattttgaatgtgtccatgaaatgaaactgattatcgacctggtcattaaaggcggcttgtcctttatgcgttattcgatcagcgacaccgccgaatacggcgattattccgtgggcgaccggatcatcacgcagtccaccaaggatgaaatgaagaaggtgcttgccgaaattaaagacggttcctttgccaagcggtggctggatgaaaacgctcagggacgacccactttcaccaaacggcgcaaggaagaaagcgaattgcttcttgagaaagtcggatctgagttgcgcaagaacatgagctgggctgaaaaaaagtga

SEQ ID NO: 31500 - protein, 227 aa, Unknown
  Obtained from environmental sample
  DOMAIN (1)...(74): Acetohydroxy acid isomeroreductase, catalytic domain
  misc_feature (1)..(227): Xaa is any amino acid
MFAHGFNIVTGQIVPPKDVNVIMIAPKGXGHTVRSQYQENKGVPCLIAVENNATGNAKEIALAYASAIGGGRGGILETTFTEETETDLFGEQCVLCGGVSALMKAGFETLVNAGYQPESAYFECVHEMKLIIDLVIKGGLSFMRYSISDTAEYGDYSVGDRIITQSTKDEMKKVLAEIKDGSFAKRWLDENAQGRPTFTKRRKEESELLLEKVGSELRKNMSWAEKK

SEQ ID NO: 31501 - DNA, 699 bp, Unknown
  Obtained from environmental sample
  misc_feature (1)..(699): n is a, c, g, or t
ttgaaattgagggcttggtggataaatccgacaaagcacaaaaaattgaatatgaagttgaatttttcacgttataacataagggattttagaatgcagaaatttaaacaagcagtggcagcagtggcaattacaggagttttttgcgcggtatttgccgccgagccagcgggaattttcacagacccaagggacgacaaaacgtacaagactgtgaagataggtaatcagacgtggatggcggagaatctgaatacaaaaaccgatggtagctggtgctacaatgaagatgaatccaactgtgaaaaatatggcaggctgtacgagtggaaggaagcattggaggtttgccccacaggttggcacttatcgtctcgtaaggattggagcgatttaatcacaaagatgagcggctacaaaggagcgggtgcgaaattgaaagcgaaaagcggttgggagggaagcggcaacggaactgacgattacggattttcggctatgcccggtggctaccgcaacagcaactctgatttccgcaatgctggcagcaacggctactggtggacgaataacggttctggcaaaacacaagcctactatagaggcatgaactccgataaggctgtgcgcgaggaaactgtatccgtagatgaatctaagcagggttctctcttctcggtgcggtgcgtagcggattaa

SEQ ID NO: 31502 - protein, 232 aa, Unknown
  Obtained from environmental sample
  misc_feature (1)..(232): Xaa is any amino acid
MKLRAWWINPTKHKKLNMKLNFSRYNIRDFRMQKFKQAVAAVAITGVFCAVFAAEPAGIFTDPRDDKTYKTVKIGNQTWMAENLNTKTDGSWCYNEDESNCEKYGRLYEWKEALEVCPTGWHLSSRKDWSDLITKMSGYKGAGAKLKAKSGWEGSGNGTDDYGFSAMPGGYRNSNSDFRNAGSNGYWWTNNGSGKTQAYYRGMNSDKAVREETVSVDESKQGSLFSVRCVAD

SEQ ID NO: 31503 - DNA, 1221 bp, Unknown
  Obtained from environmental sample
  misc_feature (1)..(1221): n is a, c, g, or t
ttgcttgttgacagcccagttacttttccccttcaatttgttactataataatgaggagtttccgccgcagtatgaaaagccataatttccgccctgcgctcttgtcttcctctcttcccttttctctcttgtatttctcttttctcttttcttttgttgtttcctgctccggaagcaaaacaaggcaaataacctacgagttcaccaatgtgcgccggggcacgattgagcgtactgtttcttccagcggcaccataaaccccgtatccacggttaaggtgctgccccagatgagcggcaaggttgaaaaaatattcgtcgattacaatgatccgatccgcaagggtgatattctcgcggaactgaataccgatatgctcaaacttaaacgggaacagcagtacgccgcggtactcaaggcccgggcgaattatgagctgcagcggctcaattaccggaatcaggagcttctggcggagaagaaccttatttccgagtacgagctgaaaaccagcaagaccaccctggacaaccaggcggcggatcttgccgttgccgagtcaaacctcagggtgatcgaaaccgagataaaccagtacgcctatatcacttcccccattgacggcatcgtgcttgaccggaggatcaacatcggcgacacggttgttgacagttcaagcaacaattcatcgtcgattttcaccctcgcggagaatttaagggagatgcagatagaagccggcgtcggcgagcttgacgtcgcgtccatccaaaaggggcagcaggtgcggtttaccctggaaagtatgccgggcaggagtttctccggtgaggtggaaacgctccgcatggttcccgtcgtgtcgaataacgttgtttcctataccgtgatcgtcaaagtcgagaatcttgacggttccctgcttccgggaatgacctgcgccgtggactttattgtggagcgcggcgaanacgtccttatggtttccaacgcggcgctgcgctaccagcccacgggcctaagcgaggaaaaaatctccgatatggtttttgacgcgggccttgtaaacatgaacgaagagcagcggcaggcggcgattgaggcgagggcgcangcaaaggcgcagcgaaccgaaaagtcgcaggcggcaggacagaacgccagcgcgggactgcagggcctcatgctggggagcggcgggcagagcgcgcccgtatga

SEQ ID NO: 31504 - protein, 406 aa, Unknown
  Obtained from environmental sample
  DOMAIN (90)...(349): HlyD family secretion protein
  misc_feature (1)..(406): Xaa is any amino acid
MLVDSPVTFPLQFVTIIMRSFRRSMKSHNFRPALLSSSLPFSLLYFSFLFSFVVSCSGSKTRQITYEFTNVRRGTIERTVSSSGTINPVSTVKVLPQMSGKVEKIFVDYNDPIRKGDILAELNTDMLKLKREQQYAAVLKARANYELQRLNYRNQELLAEKNLISEYELKTSKTTLDNQAADLAVAESNLRVIETEINQYAYITSPIDGIVLDRRINIGDTVVDSSSNNSSSIFTLAENLREMQIEAGVGELDVASIQKGQQVRFTLESMPGRSFSGEVETLRMVPVVSNNVVSYTVIVKVENLDGSLLPGMTCAVDFIVERGEXVLMVSNAALRYQPTGLSEEKISDMVFDAGLVNMNEEQRQAAIEARAXAKAQRTEKSQAAGQNASAGLQGLMLGSGGQSAPV

SEQ ID NO: 31505 - DNA, 351 bp, Unknown
  Obtained from environmental sample
  misc_feature (1)..(351): n is a, c, g, or t
atgaaattcaaagatatcgtaagcgccctgaacgcccgcgtggtggccaaatccacggcgttcgacgactgcgcggtcgaaagcgtgatagtgtccgaccttatgagcgacgtccttatgatggagaagaccgcgccgctgatcgtcagctcgctctcctccgaccagaccatccgcaccgcctccatggtagacgccgtgggcgtggtcatagcccaaaacaagcccctgcccgacaaaatggcgggtttggcggaggaactggacgtcacgctgctccacacgcaactcgaaaagtttgagtgctgcgtcctcctggggaagttgctcgatagggacggtgccgcttga

SEQ ID NO: 31506 - protein, 116 aa, Unknown
  Obtained from environmental sample
  misc_feature (1)..(116): Xaa is any amino acid
MKFKDIVSALNARVVAKSTAFDDCAVESVIVSDLMSDVLMMEKTAPLIVSSLSSDQTIRTASMVDAVGVVIAQNKPLPDKMAGLAEELDVTLLHTQLEKFECCVLLGKLLDRDGAA

SEQ ID NO: 31507 - DNA, 984 bp, Unknown
  Obtained from environmental sample
  misc_feature (1)..(984): n is a, c, g, or t
ttgacaccgaagacagcgccccttgtcgaaacctcgcactcgtcgctactcaccctagaaatcgtctttaaactcaaagtgcgggacgtaatgacgaccgacgtcatcaccgccacgcgcgcggacacgttgcgccacgcgcaaaaactcatgcaggagcaccacatctcaggcgtgccggtcgtcgaggacggacggctcttcgggctggtgagcgtagacaacatcctgcgcgcactcgacttcgggtacatcgaggacacggtcgagggccggatgacgcgcaacctggtggttctcgacgccgatatgccgctgaccttcgccctatcatggttcgagcgatacgacttcagccgcttccccgtgcttgacaaagaggaaaagatggtgggcatagtcaccgccggcgacatcatatccaagatattggtagagatgaacaaagaggtcaacaagatggagagcgacaacgtgctcacgccgtcagccgcagccgccgcgagcaccgccggcggacggtactatagggagttccccataataaagttcgacttcgagcgcggcggcagcgcgtcaaacgaaatcagacgcgtgcttaaagaaagaaaactaagccccaaaatcatacgccgcgtagccatagcgagctacgaactggagataaatctggtggcgcactccgacggcggaaaactatcgtgctacatcggcgacgacaagatcgagatcatcgccaaagacaccggcccgggaatacccgacgtggaacaggccatgcaggaggggttctccaccgccacggactggataaggagcttgggcttcggggcggggctgggactgcccaacgtcaaacgagcctcggacagcttcgacatcagctcgcaggtggggctggggaccatcgtgaaatcaacggtcttcctcgacgaggcggcgctcaaagagtacgccggaaagaatgccttggagcggcggtaa

SEQ ID NO: 31508 - protein, 327 aa, Unknown
  Obtained from environmental sample
  DOMAIN (208)...(311): Histidine kinase-, DNA gyrase B-, and HSP90-like ATPase
  misc_feature (1)..(327): Xaa is any amino acid
MTPKTAPLVETSHSSLLTLEIVFKLKVRDVMTTDVITATRADTLRHAQKLMQEHHISGVPVVEDGRLFGLVSVDNILRALDFGYIEDTVEGRMTRNLVVLDADMPLTFALSWFERYDFSRFPVLDKEEKMVGIVTAGDIISKILVEMNKEVNKMESDNVLTPSAAAAASTAGGRYYREFPIIKFDFERGGSASNEIRRVLKERKLSPKIIRRVAIASYELEINLVAHSDGGKLSCYIGDDKIEIIAKDTGPGIPDVEQAMQEGFSTATDWIRSLGFGAGLGLPNVKRASDSFDISSQVGLGTIVKSTVFLDEAALKEYAGKNALERR

SEQ ID NO: 31509 - DNA, 810 bp, Unknown
  Obtained from environmental sample
  misc_feature (1)..(810): n is a, c, g, or t
ttggccgagaaaccggggtttgatttcgacactgttatcggggcgaatgttgatatgatagtaggtgccattgattacttttccaggcatggtttttatgtgcctgatgattaccatgcactggggttcgataattcattgagaagccttttctccgaatgtccccttacgacagttatgtctttctataaaaagatgagtagtgaagcatttcgggttctaattgattatatgggaaaaaaggatctttttgatggcggatctttggtttcaattccgatagaagatgtcattctgcctacaaaacttgtaatccgcaattcctgcggctgcggcagttccagttatcaacttgttaaacaggagcctgttgtaaattcttgcgagcctgatgaagcagcgatgatagccaaggttaatgaatatttggaattgagtgaaaaggaaataaaagtttttattgcaccaattatccgcgcatggcttggaatttcccataatgggcctgattcatcttcatccgctgaagcaatcttttttcaccgctttgagaaagtcgttaccaggttttttaacatggataaagattcagggctttttataaggctgctacaagacttattcgattcaggtgttgtttcagcatcacaattcaggaagtttgaacctgttatgttgagaattatccttaaaatctcgggacgtttatcgattcaagaacagtatagaagaaaaaaccaggacatcacgctaaattcgcttaggtttgaattgctgggaaaccaaggacagagattccctgataaatag

SEQ ID NO: 31510 - protein, 269 aa, Unknown
  Obtained from environmental sample
  misc_feature (1)..(269): Xaa is any amino acid
MAEKPGFDFDTVIGANVDMIVGAIDYFSRHGFYVPDDYHALGFDNSLRSLFSECPLTTVMSFYKKMSSEAFRVLIDYMGKKDLFDGGSLVSIPIEDVILPTKLVIRNSCGCGSSSYQLVKQEPVVNSCEPDEAAMIAKVNEYLELSEKEIKVFIAPIIRAWLGISHNGPDSSSSAEAIFFHRFEKVVTRFFNMDKDSGLFIRLLQDLFDSGVVSASQFRKFEPVMLRIILKISGRLSIQEQYRRKNQDITLNSLRFELLGNQGQRFPDK

SEQ ID NO: 31511 - DNA, 918 bp, Unknown
  Obtained from environmental sample
  misc_feature (1)..(918): n is a, c, g, or t
gtgggaagctattcacttggcggtattaattccataaaagaacaatcatttcccgcagatatttttttccctgagcctttgagacacctgttttctcacggggtgtttatgatccagcccttgtttatagaagatcgcgctctgggatattttatccacaccgtttccggcaacaatggctcaatttatgaagagcttcgttccacaataagttacgccttaaaaggcattttccaatttgaagaaatagtgaagacccaagagaaggtattggagagtattgaacaaaaccgcatgttatttctgcagaaagaagcggcccaggctgcttccgaagcaaaaacccagtttctggccaatgtatcgcatgaaataaggactccaatgaatgcggttctgggtatggcagaattaatgctttcggaaaatctgaacaaccgccagcggcattatgcggaagacattaaaacatccacgatgtcactgttgaatataatcaataaaattctggatctctccaaaatacaatcggggaaaatggacttgacccccgttcattacgattttattgctttggtggacaatattggctcaatgatgcgttttctcatcaaaaacaaagatgtcgcttttgacatagaaatgcagggaaatataccgagatacctgtatggggacaatacaaggctcaggcaaattcttttaaacatattgagtaatgcggcaaaatttacagaaaaaggttatgtgcgcttaaccgtttcggtttctgatagcgacatctgttttaccgtcacggatacaggcatgggaataaagaaagaagatatcctgaatctttttgacgctttcatacaggctgatgcggtaaggaaccgtgattacnagggaaccgggaatggggctgacaattactaa

SEQ ID NO: 31512 - protein, 305 aa, Unknown
  Obtained from environmental sample
  DOMAIN (225)...(305): Histidine kinase-, DNA gyrase B-, and HSP90-like ATPase
  misc_feature (1)..(305): Xaa is any amino acid
MGSYSLGGINSIKEQSFPADIFFPEPLRHLFSHGVFMIQPLFIEDRALGYFIHTVSGNNGSIYEELRSTISYALKGIFQFEEIVKTQEKVLESIEQNRMLFLQKEAAQAASEAKTQFLANVSHEIRTPMNAVLGMAELMLSENLNNRQRHYAEDIKTSTMSLLNIINKILDLSKIQSGKMDLTPVHYDFIALVDNIGSMMRFLIKNKDVAFDIEMQGNIPRYLYGDNTRLRQILLNILSNAAKFTEKGYVRLTVSVSDSDICFTVTDTGMGIKKEDILNLFDAFIQADAVRNRDYXGTGNGADNY

SEQ ID NO: 31513 - DNA, 537 bp, Unknown
  Obtained from environmental sample
  misc_feature (1)..(537): n is a, c, g, or t
gtgactcttgaagaacacatagaccgtattgtacacgcaggcgagatagagcttgcgggtgaggtatatagagggaagtatgaattgaatgatggaaaatcaataaaaaggtttatacttgatagattacgcttgaatgaaaaagggaaaaataaagtttatactaacgttgatactggcgagaaaattagcattagcggtaactccgcgggcaaattagcaagccattacaaatatggagaaacgtatcaaaagaccatagcccatattccacgtataatagaaaatatgcaatttttggaagaaatgccacccgataaagaaaattccaagtttggcaattattcctattacattaccagagcaaacatagatggagaatcgcataccatactaagcatagtcgggcataatgaatatggggtatattatgaccaaaacgtatttgaaggaacaccgaaagaagtatttaaagaagcaaaaacttctaatgacaataaatatagccgattaaaagagatattgaaagataactaa

SEQ ID NO: 31514 - protein, 178 aa, Unknown
  Obtained from environmental sample
  misc_feature (1)..(178): Xaa is any amino acid
MTLEEHIDRIVHAGEIELAGEVYRGKYELNDGKSIKRFILDRLRLNEKGKNKVYTNVDTGEKISISGNSAGKLASHYKYGETYQKTIAHIPRIIENMQFLEEMPPDKENSKFGNYSYYITRANIDGESHTILSIVGHNEYGVYYDQNVFEGTPKEVFKEAKTSNDNKYSRLKEILKDN

SEQ ID NO: 31515 - DNA, 711 bp, Unknown
  Obtained from environmental sample
  misc_feature (1)..(711): n is a, c, g, or t
gtgttaggattgggttntgagttttctatctttaccccaatgaaagttcaaactcccccattgccaaaaggaaccagagatttctatcctgctgatatgagggtgcaaaatcatattttcaatatatggcggcaagccgctttaagatatggctacgaggaatacgagggtcctatctttgagcatttggaactttacacaggcaaaagcggcgaggaaattgtttcgcaactttacaacttcacagacaaaggcggcagggcactcgcgctccgccccgaaatgacacccacgcttgcaaggcttgttatacaaaagggggcagaacttaaaaagccttttaaatggttctccataccccgcctgtttcgctatgaacgtgcccaaaaagggcggctccgcgaattttttcagctcaatttagacataataggaactgaaagcataagcgcagaagcagatttaatctctgcgatttgcgctatgctccttgattttggattaaccgaaaacgattttgcaattggaatctcaagccgccgcttgctcgccgcatttttggaaagtttggaagcggcagaaccaaacttaatctaccctatcttagacaaacgcttaaaaatgcctgccgaagaatttgaaaaggagttattgaatgctggtttaagcgatgaaaaagcaaagaaattaaacgcttttagaattgcgtaa

SEQ ID NO: 31516 - protein, 236 aa, Unknown
  Obtained from environmental sample
  DOMAIN (35)...(197): tRNA synthetase class II core domain (G, H, P, S and T)
  misc_feature (1)..(236): Xaa is any amino acid
MLGLGXEFSIFTPMKVQTPPLPKGTRDFYPADMRVQNHIFNIWRQAALRYGYEEYEGPIFEHLELYTGKSGEEIVSQLYNFTDKGGRALALRPEMTPTLARLVIQKGAELKKPFKWFSIPRLFRYERAQKGRLREFFQLNLDIIGTESISAEADLISAICAMLLDFGLTENDFAIGISSRRLLAAFLESLEAAEPNLIYPILDKRLKMPAEEFEKELLNAGLSDEKAKKLNAFRIA

SEQ ID NO: 31517 - DNA, 663 bp, Unknown
  Obtained from environmental sample
  misc_feature (1)..(663): n is a, c, g, or t
atgcggtatctgggtaaatccgcttatactgcctatcttgaaagtacggatttaaaatacggttatttagatgctgttactaaacgcgcggaagaaatggagcgcgaagaaagggaaacccttgcaagactgcgggctattgccaacgcgccagccgccgcgcctactcctccggcgcagaagccaagcgtcaatcccgcgcaggcgttagccgacagcgccattgccgccttcggcagaaaggactacgacaaggcgattgctgattacacccaggcgatacggcttgaaccgaattatgcgggagcctatctaaaccggggaattgtgtatgacaagaagcgcgactttgaaaaggcaattgctgactacaaccaggcgatacggcttaaccccaatgacccggatgcctataaactgcggggcgcggtatattacgaaaaaggcgaactggacaacgcaatcgcggaatatacccaggtgatacggcttgctccccaagacccggccggctataaactgcggggcacggcgtacttccaaaaaagagaccttgaccgtacaatagctgactatgaagcggcattgcggcttaacccaaatgataactctgcaaaagatattcttgatatggtaaaaatgctaaggcaattgaaaaaataa

SEQ ID NO: 31518 - protein, 220 aa, Unknown
  Obtained from environmental sample
  DOMAIN (169)...(202): Tetratricopeptide repeat
  misc_feature (1)..(220): Xaa is any amino acid
MRYLGKSAYTAYLESTDLKYGYLDAVTKRAEEMEREERETLARLRAIANAPAAAPTPPAQKPSVNPAQALADSAIAAFGRKDYDKAIADYTQAIRLEPNYAGAYLNRGIVYDKKRDFEKAIADYNQAIRLNPNDPDAYKLRGAVYYEKGELDNAIAEYTQVIRLAPQDPAGYKLRGTAYFQKRDLDRTIADYEAALRLNPNDNSAKDILDMVKMLRQLKK

SEQ ID NO: 31519 - DNA, 825 bp, Unknown
  Obtained from environmental sample
  misc_feature (1)..(825): n is a, c, g, or t
ttgtcaaaggcgatacctggacagcttacctgtatatttgtcgatcacggccttatgcgcttaaacgaaggcgatgaaatagagagagcgttttcaaaacgaaaccttaacttcatccgtgtgaacgcgcaaaaacgtttccttgccaaactggaaggcgtaaccgaacctgaaaaaaaacgcaagataatcggcgaggaatttatccgcgtgtttgaggaagaatccgcaaagttaggtgacattccatttttggcgcagggaacgatataccccgatgtcgttgaatcgggcggcaagcacggcgctgttatcaagagccatcacaacgtgggcgggcttcccgaaaacctgaattttacagagatagtggagccgctgtcgcgtcttttcaaggacgaggtacgcgaactgggcagaaaacttaaactgccgtcgtcgcttgttaaccgccagccctttccagggcccgggcttgccatccgcgtcatgggcgaaataacagaagaaaagctggatattttacgccgcgccgacgcaatactgcgcgaggaactggacgctttgaaacgcagacccaatcaatacttctgcgtcatgaccggcacgcgctccgtgggcgttaaaggcgacgacaggacttatgattttgtaatagccgtcagggccgtaataactgacgattttatgacttgcgaatacgctccgctaccgcacaatttattaagccgaatatcttcacggatcacaagcgagataccgcaggcgagtcgcgttgtttacgatattacatcaaagcccccggcaacggtggaatgggagtag

SEQ ID NO: 31520 - protein, 274 aa, Unknown
  Obtained from environmental sample
  DOMAIN (183)...(273): GMP synthase C terminal domain
  misc_feature (1)..(274): Xaa is any amino acid
MSKAIPGQLTCIFVDHGLMRLNEGDEIERAFSKRNLNFIRVNAQKRFLAKLEGVTEPEKKRKIIGEEFIRVFEEESAKLGDIPFLAQGTIYPDVVESGGKHGAVIKSHHNVGGLPENLNFTEIVEPLSRLFKDEVRELGRKLKLPSSLVNRQPFPGPGLAIRVMGEITEEKLDILRRADAILREELDALKRRPNQYFCVMTGTRSVGVKGDDRTYDFVIAVRAVITDDFMTCEYAPLPHNLLSRISSRITSEIPQASRVVYDITSKPPATVEWE

SEQ ID NO: 31521 - DNA, 795 bp, Unknown
  Obtained from environmental sample
  misc_feature (1)..(795): n is a, c, g, or t
ttgtttacgatattacatcaaagcccccggcaacggtggaatgggagtagaattatgactaaatatgtttttgttacaggcggcgtcgtatcgggacttggcaaggggattaccgccgcgtcgttgggcaggctgctcaaacagcggggcttaaaggtcgcggcgcagaaacttgacccctatatgaatgtcgatccgggaacaatgagcccgttccagcacggcgaggtctttgttaccgacgacggcgcggagaccgatcttgacctggggcattacgagcgttttatagatgaaaacctgacgaaactcagcaacctgacatccggccaggtgtacaggaatgtgcttgatcgcgagcgcgcgggcggttatctgggtagtaccgtacaggttattccccatgtcaccagtgaaataaaaagttttatttatgccggcgcggaaaaaagccgcgccgatgttctgattaccgagatcggcggcacaaccggcgacattgaaagccagccttttttagaggctatccggcagatttcccttgaaaaaggccgcgagaactgcctgttcatccatgtgacgttgatcccgtatttaaaagcatcgggcgaacacaaatcaaaacccacacagcactcggtcaaggaactacgcgccattggtatttcacctaacatcatcatcgcacgggctgacgagccctatagcgacagtattactgataaaatatcgcttttttgcaacgtgaaagccgattgcgtcatagataacattaccatttccattcctttatga

SEQ ID NO: 31522 - protein, 264 aa, Unknown
  Obtained from environmental sample
  DOMAIN (20)...(264): CTP synthase N-terminus
  misc_feature (1)..(264): Xaa is any amino acid
MFTILHQSPRQRWNGSRIMTKYVFVTGGVVSGLGKGITAASLGRLLKQRGLKVAAQKLDPYMNVDPGTMSPFQHGEVFVTDDGAETDLDLGHYERFIDENLTKLSNLTSGQVYRNVLDRERAGGYLGSTVQVIPHVTSEIKSFIYAGAEKSRADVLITEIGGTTGDIESQPFLEAIRQISLEKGRENCLFIHVTLIPYLKASGEHKSKPTQHSVKELRAIGISPNIIIARADEPYSDSITDKISLFCNVKADCVIDNITISIPL

SEQ ID NO: 31523 - DNA, 870 bp, Unknown
  Obtained from environmental sample
  misc_feature (1)..(870): n is a, c, g, or t
atggacggagcaagtaaatttatttcaggtaacgtaaaggtgggagtttttattattatcattgaaatgctgggcgggttcattattggttccgcgctgtatggacagcaaagcgggataagcacatatgtagcccttgccatcggagacggacttgtcacccagcttcccgcgcttcttgtttccactgccatggcgttaattgttacaagggcagccgcgacgggcgttcttgccgatcaaattgtcgagcaaatcctaaagcgcgattcatcactttattgggtatgcgccgcggtggtcgccgtcctcggttttctgcccggtttcccgtggtatttgcttttaccaatggccgcattaatcgcctttcacgcgtataccaggggccgcgatcagaaaaaggcggttgccatcagtcagaaaacgggaaaagcccgtggtgaacaaggcgaaaaaccggcggaatttccccccattgtcccgttggacgccctctcgctggaacttggctacgggcttgtgccgttagttgaaaaggaaaaaggagcggaacttctggagagggttatgaacgtaagaagccagtccgcttatgatcttgggcttgtcatacccaaagtgcgcataattgacaattccatgctcgccccttccgaatattgttttaaaattaaaggggtggattctgggcgcggtaaaatccgtcttggttactatatgtgcatcaatcccggaatggttacggcggaattggatggcgagaagacgatagatcccgcttttgggattcccgcgatttggatgaacagtcaaggagggacgaagcggaacgtgcggggtataccgtggtggatccccccatcataa

SEQ ID NO: 31524 - protein, 289 aa, Unknown
  Obtained from environmental sample
  DOMAIN (1)...(288): FHIPEP family
  misc_feature (1)..(289): Xaa is any amino acid
MDGASKFISGNVKVGVFIIIIEMLGGFIIGSALYGQQSGISTYVALAIGDGLVTQLPALLVSTAMALIVTRAAATGVLADQIVEQILKRDSSLYWVCAAVVAVLGFLPGFPWYLLLPMAALIAFHAYTRGRDQKKAVAISQKTGKARGEQGEKPAEFPPIVPLDALSLELGYGLVPLVEKEKGAELLERVMNVRSQSAYDLGLVIPKVRIIDNSMLAPSEYCFKIKGVDSGRGKIRLGYYMCINPGMVTAELDGEKTIDPAFGIPAIWMNSQGGTKRNVRGIPWWIPPS

SEQ ID NO: 31525 - DNA, 987 bp, Unknown
  Obtained from environmental sample
  misc_feature (1)..(987): n is a, c, g, or t
atgaacattaatgccaagatagaagtaaaaaacctgtctaaacaatacggaaatgtgcaggcggtttctgacgtctctttttccgtaggggatcagcaggtgttgggtttcctgggacctaacggcgcgggaaaaactaccatcatgaaaattcttaccggttttcattttccgtcaaacggaacagcttttgtggacggtatttccgtggaagaacagccgctggaaataaaaaaacgtattggctatctgccggaaaatgtgccgttatacggcgacttaaccgttgacgaatatttaagttttgcggcggacgcgcgttttattcccgtgcaggaacgacctgcggcaattaacgcaagccttgaagcgtgcggcttaacaaattaccgctctcgcaaaatagaaacgctttccaaaggctatcgccagcgcgcagggctggcgcaggcaattcttcacgacccgccgattttaatccttgacgaacctactaccggtcttgacccgaaccaaattatagaaattcgttctctcataaaagaacttggaaaacgcaagaccgtaattctttccacgcatattttgcaggaagtggaagcaatctgcactcaggttttgattattaacgatgggcgtattgcggcgcagggaagtcccgaagaaattgccggaaccatgaagggcggcgatacttgggaacttatcctgaaaggagctggctacgatgccgatacaggcgcggtcagcggtaagttgtcttcgttaggcaacatttccaatgtggcgacggaaactacggcggacggatatgtttgcgccaatttctttattccggagacgcaggacggcgcgagtacgggagagcgtatttttgactgggctgtttcgcagaatttaaaaatactcggtatgagcagaaaaaaaataagtatagaagatatctttgtaaaacttacaagtgatgaaaaggagcgcaataaatga

SEQ ID NO: 31526 - protein, 328 aa, Unknown
  Obtained from environmental sample
  DOMAIN (32)...(212): ABC transporter
  misc_feature (1)..(328): Xaa is any amino acid
MNINAKIEVKNLSKQYGNVQAVSDVSFSVGDQQVLGFLGPNGAGKTTIMKILTGFHFPSNGTAFVDGISVEEQPLEIKKRIGYLPENVPLYGDLTVDEYLSFAADARFIPVQERPAAINASLEACGLTNYRSRKIETLSKGYRQRAGLAQAILHDPPILILDEPTTGLDPNQIIEIRSLIKELGKRKTVILSTHILQEVEAICTQVLIINDGRIAAQGSPEEIAGTMKGGDTWELILKGAGYDADTGAVSGKLSSLGNISNVATETTADGYVCANFFIPETQDGASTGERIFDWAVSQNLKILGMSRKKISIEDIFVKLTSDEKERNK

SEQ ID NO: 31527 - DNA, 456 bp, Unknown
  Obtained from environmental sample
  misc_feature (1)..(456): n is a, c, g, or t
atgacttcgatagaaaaacaaaaaacagcatgcttcctggatcttactcaagattttattacttcaggctacaagggagaaaagagggaatatcattttgaagacgacgcgcccgcggctcaaaacgggacaagtaatattgataccgccggtaaaatcgaaagtatcgaaaaaatcgcaggggaaatacgggcttgttacaactgctctcttggcaagacaagaaccaacgccgcgcccggagagggagtattacaacctcttgtcatggttataggagaggggcccggagcggatgaagacgcgcagggacggccatttgtcggcaaggccggacagcttttggacaaaatgctcggcgctattaatctttcgcgtaacacccactgctttatcgccaatgtggtaaagtgcagaccgcccaataaccgcgacctttcccggaagaaaccatag

SEQ ID NO: 31528 - protein, 151 aa, Unknown
  Obtained from environmental sample
  misc_feature (1)..(151): Xaa is any amino acid
MTSIEKQKTACFLDLTQDFITSGYKGEKREYHFEDDAPAAQNGTSNIDTAGKIESIEKIAGEIRACYNCSLGKTRTNAAPGEGVLQPLVMVIGEGPGADEDAQGRPFVGKAGQLLDKMLGAINLSRNTHCFIANVVKCRPPNNRDLSRKKP

SEQ ID NO: 31529 - DNA, 603 bp, Unknown
  Obtained from environmental sample
  misc_feature (1)..(603): n is a, c, g, or t
atgaagaacgacgccgtatactacaacatgggaaattgctactaccgcctgatgaaacccggcatggcgcgcctatactatgagaaagcggcggctctctccccgaacgatccggacatagaggccaacatcaacttcatcacgtctataatagttgacagacaggcaagcgacaatcgccaagaatcggacttcctgacctccgtgctctacggcatacacaccctgcttccgttgaatatccaactcatagcggtatgcgccctgctgttcctattggcgataattgcctcggctatgctctttaagcggggccttgcgcgtttgtggttagcctacggcgcggccctgtgcgcgttgctgataatagtggtgggaacgtccgccggctacaaaatctacgcgttggagaacaatcagtacgcgataatcctgtcggcatccatagatgctaaaaaccaaccctccggcagccaaaccctgttcaccgcgcacgagggaacaaaactgcaaatccgcaaaacggtgggcgagtggagcctggtgagcctgtcaaacggggccggcggttgggtgttaacaaataccttggggaaaatataa

SEQ ID NO: 31530 - protein, 200 aa, Unknown
  Obtained from environmental sample
  DOMAIN (4)...(37): Tetratricopeptide repeat
  misc_feature (1)..(200): Xaa is any amino acid
MKNDAVYYNMGNCYYRLMKPGMARLYYEKAAALSPNDPDIEANINFITSIIVDRQASDNRQESDFLTSVLYGIHTLLPLNIQLIAVCALLFLLAIIASAMLFKRGLARLWLAYGAALCALLIIVVGTSAGYKIYALENNQYAIILSASIDAKNQPSGSQTLFTAHEGTKLQIRKTVGEWSLVSLSNGAGGWVLTNTLGKI

SEQ ID NO: 31531 - DNA, 1110 bp, Unknown
  Obtained from environmental sample
  misc_feature (1)..(1110): n is a, c, g, or t
atgaaaatagaaatttattctcccacaataagacgcaaggaaatggactctgttttaaccgcgatggtggaagaaaaaatcggtcccggagagcgaggcagattgttaattcaaacagcgaaagaacagcttcattttgattatgcactcgcgttaaggagtcccgctgtcgccctgtataccgcgcttaaagctctcaatacaggcgaaggacaggcggcttcaaaagcggcggtaatttccgcgctttctcctcggtattatcttcaggttttacaagatttaaatataacgcctttgcactgcgatgtaacttatgacttcccatgtatgagcatggaattaatcgaaaatacaatcgctaaaaaaccgcaggggcttgaagtgtgcgctatcgttcttcatcacacattgggctttgtgccggataccgcttccattgcagagttgggaattccggtaatcgaggatatttcgcaaagttacggaagctggcttaagaccgaaaaaaatgacgagcaggaaaaagacgcgcctgaggcttcagcggagaagaaggaaaaagaagaacccgcggtaaagtttgacggaatgttttgcatcataggtcttgaagaaagggatatgctcacctcaggcggaggagctttgctttttgcgatgaacagaaaagatggaatgttattgcgcagctttgcggggttacccgacgagtattttcttcccgacattaattccgctcttgccattgttcagtttaaggaactgcacaggaatatggcaaggcggcgcgagatagcgcagatttatactcaggcaagtttaagaacaaggcataaacattttatccctattaatgacggtgaatactgtaatttatctttctcgcttgttttggaaacaggatttaaagatgtcgccgcttacgctaaaaaaaaagatattgaaattgaaaatgcgtttgaaaatacaatagcggggtcgtctctttgcgataattgccccatcagcagttcgcttgttctgcggactgttatttttcccatgtatccgcggttacgctcgcaagatgtggaacaagtgtcgcggcttataatgactcttccgtag

SEQ ID NO: 31532 - protein, 369 aa, Unknown
  Obtained from environmental sample
  DOMAIN (8)...(369): DegT/DnrJ/EryC1/StrS aminotransferase family
  misc_feature (1)..(369): Xaa is any amino acid
MKIEIYSPTIRRKEMDSVLTAMVEEKIGPGERGRLLIQTAKEQLHFDYALALRSPAVALYTALKALNTGEGQAASKAAVISALSPRYYLQVLQDLNITPLHCDVTYDFPCMSMELIENTIAKKPQGLEVCAIVLHHTLGFVPDTASIAELGIPVIEDISQSYGSWLKTEKNDEQEKDAPEASAEKKEKEEPAVKFDGMFCIIGLEERDMLTSGGGALLFAMNRKDGMLLRSFAGLPDEYFLPDINSALAIVQFKELHRNMARRREIAQIYTQASLRTRHKHFIPINDGEYCNLSFSLVLETGFKDVAAYAKKKDIEIENAFENTIAGSSLCDNCPISSSLVLRTVIFPMYPRLRSQDVEQVSRLIMTLP

SEQ ID NO: 31533 - DNA, 390 bp, Unknown
  Obtained from environmental sample
  misc_feature (1)..(390): n is a, c, g, or t
atgaaatttttaagaagacattggtacaacatcggtcttgttatcgcaataataacaggcgcatacttggcaatcacttggaacagtacattcattatagaaaaactgttattgctaaattttatagcaatttgtattcatacttttgaagagtttggatttccaggtggagagccggccattatgaatatggcgttaagacccagtcaacacccaagcaattgctatccagttaatcaaaataatgctatgattacaaatgggctcggctatctttattacttaattcctgttttttttccaactatatttttccttgctatgggaaccgccgctatttggttttggtccaataattgttcaccggtattgttaccccctaaaaactaa

SEQ ID NO: 31534 - protein, 129 aa, Unknown
  Obtained from environmental sample
  SIGNAL (1)...(24)
  misc_feature (1)..(129): Xaa is any amino acid
MKFLRRHWYNIGLVIAIITGAYLAITWNSTFIIEKLLLLNFIAICIHTFEEFGFPGGEPAIMNMALRPSQHPSNCYPVNQNNAMITNGLGYLYYLIPVFFPTIFFLAMGTAAIWFWSNNCSPVLLPPKN

SEQ ID NO: 31535 - DNA, 1320 bp, Unknown
  Obtained from environmental sample
  misc_feature (1)..(1320): n is a, c, g, or t
gtgcagagccgtcttgttacgaaaacagagcgcgatacgtccacgatggaatacgttaagcttttcaaacaggaacttgaaaagagcgcggctccgcttggtgttgccaccgtcaacttctccagcggcaataattttttgggcggctccgccattgatatctatgtgcgcgggcatgatctgaaacgtggcgctgtactcgcgaatgaaattaaagaaataatcaaaggtatgcctgaactctataacgccgatgtcagccgcaaggagggcgcgcccgaactcatagtccgcgtcaaccgccaaaaggcggccagcatggggttgaatatggcgagcatcggtcttgcgattcagcagagcgtgcttggccgtaccgcgacctatatgcgcgaggaggggcgcgagtatgacatactggtgcgccttgacgagaaggatcgcgccacggtagaggatattaaaaacatccaggcgatctccacattcacgcgccgtccggtgcgcatcggcaatatcgcggatatagagcatgatatcgggccgatcaatattgaacgcgacgatcagatgcgcgtgatccatgtaacctgcgacagctttggcggtttgcagcaggcggtggacaagatcaaaaagcaggtcaatgagaacgtcattatcccggaaggtttcacgctggactacaggggcagtttttatgatatgcaggatacctttgaggatctcatcctcgcgctggtggtcgctatctgtctgatctacgcggtgatggcggctatcttcgagtcctatctcgatccctttatcatctttttcacgattccgctcgcgctgatcggcgttatctggacgctcttcattaccgacacaaccatgtcggtgaacgcgctgatcggtgttttggtactcgcgggcgttgtggtcaataacggaatcgtgcttatcgactacatcaatatcctgcgcgcgcgcgggcaggcggtcaaggacgcgatctgcgaggcgggacgccggcgtctgcgcccgatcctgatgactacgctgaccacagttatcgcgcttatccccggggcgatcggtcttggagagggcgatgagatgaacattccgctcgcgcgcacggttgcgggcgggctgactgtttccactatattcacgctcttctttgtgcctgtaacctatctcacgtttgataatttcattgagaagaggcgtaaaaagcgtgccgggcgcgagtcactcggacaccgcatcgggaacattattaacgcgctcttttcaggaaagagaaacacagtaaggggaatacgacgatga

SEQ ID NO: 31536 - protein, 439 aa, Unknown
  Obtained from environmental sample
  misc_feature (1)..(439): Xaa is any amino acid
MQSRLVTKTERDTSTMEYVKLFKQELEKSAAPLGVATVNFSSGNNFLGGSAIDIYVRGHDLKRGAVLANEIKEIIKGMPELYNADVSRKEGAPELIVRVNRQKAASMGLNMASIGLAIQQSVLGRTATYMREEGREYDILVRLDEKDRATVEDIKNIQAISTFTRRPVRIGNIADIEHDIGPINIERDDQMRVIHVTCDSFGGLQQAVDKIKKQVNENVIIPEGFTLDYRGSFYDMQDTFEDLILALVVAICLIYAVMAAIFESYLDPFIIFFTIPLALIGVIWTLFITDTTMSVNALIGVLVLAGVVVNNGIVLIDYINILRARGQAVKDAICEAGRRRLRPILMTTLTTVIALIPGAIGLGEGDEMNIPLARTVAGGLTVSTIFTLFFVPVTYLTFDNFIEKRRKKRAGRESLGHRIGNIINALFSGKRNTVRGIRR

SEQ ID NO: 31537 - DNA, 531 bp, Unknown
  Obtained from environmental sample
  misc_feature (1)..(531): n is a, c, g, or t
gtgataaaggcaagggcggcgatcacggtaaccaaggcaaccaaggtgataaaggcaagggcggcgatcacggtaaccaaggcaaccaaggtgataaaggcaagggcggcgatcacggtaaccaaggcaaccaaggtgataaaggcaagggcggcgatcacggtaaccaaggcaatcagggtaatcaggggaaccagggcggtaaccaaggcaaaggcggcggcgaccaaggcggcaaagggaatcagggcaaccaaggcaatcagggcggcaaccaaggtaaaggcggcggtgatcagggcggcaaaggtaatcagggaaaccaaggcaatcagggcggcagccaaggtaaaggcggcggcgaccaaggcggcaaaggtaatcagggaaaccaaggcaatcagggcaaccaaggtaaaggcggtggcaatcagggaaatcaaggtaatcagggcggcagccaaggcagaggccacagataagcaaatttttgcccgtcaaatccgctcgctgatcatgtctttcccataa

SEQ ID NO: 31538 - protein, 176 aa, Unknown
  Obtained from environmental sample
  misc_feature (1)..(176): Xaa is any amino acid
MIKARAAITVTKATKVIKARAAITVTKATKVIKARAAITVTKATKVIKARAAITVTKAIRVIRGTRAVTKAKAAATKAAKGIRATKAIRAATKVKAAVIRAAKVIRETKAIRAAAKVKAAATKAAKVIRETKAIRATKVKAVAIREIKVIRAAAKAEATDKQIFARQIRSLIMSFP

SEQ ID NO: 31539 - DNA, 375 bp, Unknown
  Obtained from environmental sample
  misc_feature (1)..(375): n is a, c, g, or t
atgctcttgccctgggtcagcgccgccccgccggaggatctcgcctgcctgtggcccggcgcgctgacattggttcttccttcccgcgatcatccctttggctgggagtcggtcgcgtttcgcgttcccgatcacgcgtttttgcgcttgctcacagaatatcttgccgagcccgtgtacgcgccgagcgcgaatccgcaggacagtccgcccgcccgaaactgcgacgaggcctgggaatatttcggcgaggcggttgatctctatatagacggcggcgaagcgccggacacgcaagcctctacgctggtctcttgcctcgcccatccgcctgagatattgcgtcagggcgcggtgcggataccaaagaactaa

SEQ ID NO: 31540 - protein, 124 aa, Unknown
  Obtained from environmental sample
  DOMAIN (1)...(117): yrdC domain
  misc_feature (1)..(124): Xaa is any amino acid
MLLPWVSAAPPEDLACLWPGALTLVLPSRDHPFGWESVAFRVPDHAFLRLLTEYLAEPVYAPSANPQDSPPARNCDEAWEYFGEAVDLYIDGGEAPDTQASTLVSCLAHPPEILRQGAVRIPKN

SEQ ID NO: 31541 - DNA, 312 bp, Unknown
  Obtained from environmental sample
  misc_feature (1)..(312): n is a, c, g, or t
atggctttgcaacttgaagaaaaggatttgaatatagcgaagaaattgctgaaaatggaattagaaggcacaaattccaaggtatatgtttttggttctagggcagaaggtacagcacaaaagttttcagatttagatttggcaatagattttaacggtaaaaaaatgccagagggaattaagtttgaattggaaaatttctttgaagcgagcaatataagcatgagagtggacattgtagatttaaatgccatcagtgaaaacttcaaaaaaattataagccctagcttgcaggagttttttattgcctaa

SEQ ID NO: 31542 - protein, 103 aa, Unknown
  Obtained from environmental sample
  DOMAIN (5)...(100): Nucleotidyltransferase domain
  misc_feature (1)..(103): Xaa is any amino acid
MALQLEEKDLNIAKKLLKMELEGTNSKVYVFGSRAEGTAQKFSDLDLAIDFNGKKMPEGIKFELENFFEASNISMRVDIVDLNAISENFKKIISPSLQEFFIA

SEQ ID NO: 31543 - DNA, 933 bp, Unknown
  Obtained from environmental sample
  misc_feature (1)..(933): n is a, c, g, or t
ttgcctaaaaaattttctacattgctcctcctccccgcccttgcctttgccgctttttacggcaatcaaagtgggattaaatggaaaagcgcagagacggagcattttttggcgcattaccctgcggaacacagggagcgtgcggcagcggctatcagttttgccgaaaatgtttacgatacaatcaccattcgctacaaaattaaattgccaagcaaagtgaatttggttttcaacaacgggcttttcagcaatggcgaggcaaatccggtttataatatgatgcaaatttggctcacgaattgggattttaaaattcgcggttctcattcttggattagcgatgttgttacacacgagttcagccatttggcgagcatacaaaatgcgagcaaaacaccgctaccttggattcagggcttgcaaatttcaaaaagcgattttctcaatgaaaaaaaacaactcgctataggggcatacattccattcacaataatgcctctttggtttgcagaaggcacagctcaatttgaaagctaccgaatgggctttgaccgctgggacactcaccgcgatatgcttttgagaatcgcatttttggaaaacaaggttctacccttggagtttatggaatattttagcgagcaagccttagaatcggaactgggaccatatacacaaggctttgacttggttcgctacattgcagaaacttatggcgaaaatgccattcctgagctgtgggaagatatgggaaaactcacaaactggactttgagcagtgcgctttatgacagatttaaaattacggaaaaggaattgtataaaaattggaaggagaatagaaaagagcattatgaaaaaattcgtggttcaataggcgaggtcaaaactgggaaaaaaataagcgaaggttctttttacaatgaataa

SEQ ID NO: 31544 - protein, 310 aa, Unknown
  Obtained from environmental sample
  SIGNAL (1)...(17)
  misc_feature (1)..(310): Xaa is any amino acid
MPKKFSTLLLLPALAFAAFYGNQSGIKWKSAETEHFLAHYPAEHRERAAAAISFAENVYDTITIRYKIKLPSKVNLVFNNGLFSNGEANPVYNMMQIWLTNWDFKIRGSHSWISDVVTHEFSHLASIQNASKTPLPWIQGLQISKSDFLNEKKQLAIGAYIPFTIMPLWFAEGTAQFESYRMGFDRWDTHRDMLLRIAFLENKVLPLEFMEYFSEQALESELGPYTQGFDLVRYIAETYGENAIPELWEDMGKLTNWTLSSALYDRFKITEKELYKNWKENRKEHYEKIRGSIGEVKTGKKISEGSFYNE

SEQ ID NO: 31545 - DNA, 477 bp, Unknown
  Obtained from environmental sample
  misc_feature (1)..(477): n is a, c, g, or t
atgacagattggcagagacgattcagcctggcgcgtaagatcgtcaccgagataggcaagaagagttactctgatatatttgagggcggcaagaccttcggccaagcgctgcttgagcctcaccgcacctacataaagttattaccgctgatggatagggggttggtcaagggctgcgcccacataacgggcggcgggtttgtcgacaacgtcgaccgcatcctccccgagaattgcgacgcggctatagacgccaagtcgtgggagccgctgccgatattccgatacctgcaatctaccggcggcgtggagaacgcggagatgtaccggacgttcaacatggggatcggcatggcgctggccgtctccgagagcggcgcggacgccgtcctgcgcgacgaggccgtcgctgagttcgagccggtcgtcatcggcaagatcgtttccgggtccggaatcgtgaggatggagttttga

SEQ ID NO: 31546 - protein, 158 aa, Unknown
  Obtained from environmental sample
  DOMAIN (6)...(157): AIR synthase related protein, C-terminal domain
  misc_feature (1)..(158): Xaa is any amino acid
MTDWQRRFSLARKIVTEIGKKSYSDIFEGGKTFGQALLEPHRTYIKLLPLMDRGLVKGCAHITGGGFVDNVDRILPENCDAAIDAKSWEPLPIFRYLQSTGGVENAEMYRTFNMGIGMALAVSESGADAVLRDEAVAEFEPVVIGKIVSGSGIVRMEF

SEQ ID NO: 31547 - DNA, 1329 bp, Unknown
  Obtained from environmental sample
  misc_feature (1)..(1329): n is a, c, g, or t
ttgaccatgaaaaaggatctttatctccacaacaccgctgcagcgaagaaggagttgtttgtccccaagaacaatccggtcgctatttactgctgcggccccacggtctacaactacgcgcatatcggcaacctgcgcacctacatattcgaggacgttctcaagcgggttttgacgtggtgcggctacgaggcgcgccacgtggtcaacatcaccgacgtgggccacctgacctccgacgccgacgagggcgaggacaagatggagagcggcgcggcgcgcgagggcaagagcgtgtgggacatcgcggagttctacaccaagaaattcatggaggacatagagagcctcaacatcatacagcccgacctgtggcccaaggcgaccgatcacatcccgcagatgataaacctcgtcaagacgcttgaggagaaggggtttacctaccgaaccgaggacgggatatacttcgacacgtccaaattccccgcatactgcgatttcgcgggcatcgacccggcgtcgcttagggcgggggagcgcgttgaaatgggcggcaagcgtaacgtaaccgatttcgccctatggaagttttcccctgcggacggaaagcgtcagatggagtgggagagcccgtggggcgtgggtttcccgggttggcatatcgagtgcagcgcgatgtcgcttgcgcatctcgcccagccgctcgatattcactgcggcggcgccgaccatatccgtgtgcatcatacgaacgaaatagcgcagagcgaggcggcgaccgggaaaaagtttgtggaacgctggatgcacggggagtttttggtgcttgacaaggggaaaatggcgaagtccggcgggaatttcgtcacgttggacacgctgaaagagcacggcgtttccccgttgggctataggatgttctgctacacggcgcactaccgcacgccgctgactttctcgtttgagggcgcggcggcggcggagcaggggttggcgaatcttagaaagtttatattgtctgtagacaagtcgtcggcggataaatcgcgagttgataaagatcgggtgaataaagcgcttgagccctttgccgaggcggtatgcgacgacctgaacatgcctcgcgccgtcgcggcgctctgggaggngctgcgctgcggcgatttgtccggagcggagaagctctctttcgttcacgaagcggacagggtgctggggctggatttaactaagccggcggacgacggcgttactgagatagaggaggagtcggacggctatagnataaacgttggcggcaagcgtcgccatccccccgtccnttga

SEQ ID NO: 31548 - protein, 442 aa, Unknown
  Obtained from environmental sample
  DOMAIN (19)...(330): tRNA synthetases class I (C) catalytic domain
  misc_feature (1)..(442): Xaa is any amino acid
MTMKKDLYLHNTAAAKKELFVPKNNPVAIYCCGPTVYNYAHIGNLRTYIFEDVLKRVLTWCGYEARHVVNITDVGHLTSDADEGEDKMESGAAREGKSVWDIAEFYTKKFMEDIESLNIIQPDLWPKATDHIPQMINLVKTLEEKGFTYRTEDGIYFDTSKFPAYCDFAGIDPASLRAGERVEMGGKRNVTDFALWKFSPADGKRQMEWESPWGVGFPGWHIECSAMSLAHLAQPLDIHCGGADHIRVHHTNEIAQSEAATGKKFVERWMHGEFLVLDKGKMAKSGGNFVTLDTLKEHGVSPLGYRMFCYTAHYRTPLTFSFEGAAAAEQGLANLRKFILSVDKSSADKSRVDKDRVNKALEPFAEAVCDDLNMPRAVAALWEXLRCGDLSGAEKLSFVHEADRVLGLDLTKPADDGVTEIEEESDGYXINVGGKRRHPPVX

SEQ ID NO: 31549 - DNA, 504 bp, Unknown
  Obtained from environmental sample
  misc_feature (1)..(504): n is a, c, g, or t
atgtctgaattttttcggcaattattaacccaatttagggatatatggcaaagattcagcattgtacagaaaggcatcttggttgcttctttggctttgctgtttgcctttattgtcgtagctatatcgcttcaggttgtgaacgcaacagattcccgcatggcaacgctctatgccaatatggaagttagcaccgttgcagatataaccgcttttttgaaagagaacaaatatgactacaaactggacaacgatggccgcactcttttggttcccaaagaaaccctttacgagattcgtatggctttatccagagcggggctgccaagagacagggacaaaggttttgagctttttgacaaaaaccagcttggcatgacagattttgcccaaaatttgaattacctgcgagcagttcaagccgagcttgcacactccattgaaacatttagagaagttgaaaaggcacgtgttcacataaccattcaaaacaaacccttttag

SEQ ID NO: 31550 - protein, 167 aa, Unknown
  Obtained from environmental sample
  DOMAIN (19)...(167): Secretory protein of YscJ/FliF family
  misc_feature (1)..(167): Xaa is any amino acid
MSEFFRQLLTQFRDIWQRFSIVQKGILVASLALLFAFIVVAISLQVVNATDSRMATLYANMEVSTVADITAFLKENKYDYKLDNDGRTLLVPKETLYEIRMALSRAGLPRDRDKGFELFDKNQLGMTDFAQNLNYLRAVQAELAHSIETFREVEKARVHITIQNKPF

SEQ ID NO: 31551 - DNA, 318 bp, Unknown
  Obtained from environmental sample
  misc_feature (1)..(318): n is a, c, g, or t
atgattttatatcacggctcttatgtgcaagtagttaaacctgatttgtcgttttctcgcaaagaactggattttggcacgggtttttatacaacatccattaaagaacaatccgaaaaatggtctttgaaattcaaaaaaagacacgaacaatcaatagtttcaacttatgaatttgatgaanaaattacagataanattcgagttttaaaattcaattcatattccgaagaaatggctgattttgttgttttatgcagaacggggcaaaatttnagaagagaanttatgattgataatcggcggtatagcaaatga

SEQ ID NO: 31552 - protein, 105 aa, Unknown
  Obtained from environmental sample
  misc_feature (1)..(105): Xaa is any amino acid
MILYHGSYVQVVKPDLSFSRKELDFGTGFYTTSIKEQSEKWSLKFKKRHEQSIVSTYEFDEXITDXIRVLKFNSYSEEMADFVVLCRTGQNXRREXMIDNRRYSK

SEQ ID NO: 31553 - DNA, 549 bp, Unknown
  Obtained from environmental sample
  misc_feature (1)..(549): n is a, c, g, or t
atggatacgggatcccgcttttctctgcaaaaacgccttacggtgttcgagggcgccatttggtgcctgcttggcgcgatagtggtcaggtatggctggattcagattgtccgaggctccgagttgaagcaagaagctagggagcaggcgatcaaagtccacgcaaccccggccccccgtgggcttgtactggacaggaacggcaacaagctcattgaaaacaggtatgtgctgaatcttgtgatagagcaagaagaccttcccgacgtgccaaaagacgaaccccagaacagccgccagcgcagcgcgctcgagcaagtcagggctcttgcgccaatgctgcagatggagccagaagaattgattcggaggatcattgcagcaaggcaggagggaaggaaccgctttctgcttttgagggacaacttgagcgatgaagagctggcggagtccgagaggatcagggcaaggttcccatttcttagcgtcaagtcgacgccaaagcgagtctatccagggggagaactggcagggcatgtccttggctaa

SEQ ID NO: 31554 - protein, 182 aa, Unknown
  Obtained from environmental sample
  DOMAIN (55)...(182): Penicillin-binding Protein dimerisation domain
  misc_feature (1)..(182): Xaa is any amino acid
MDTGSRFSLQKRLTVFEGAIWCLLGAIVVRYGWIQIVRGSELKQEAREQAIKVHATPAPRGLVLDRNGNKLIENRYVLNLVIEQEDLPDVPKDEPQNSRQRSALEQVRALAPMLQMEPEELIRRIIAARQEGRNRFLLLRDNLSDEELAESERIRARFPFLSVKSTPKRVYPGGELAGHVLG

SEQ ID NO: 31555 - DNA, 705 bp, Unknown
  Obtained from environmental sample
  misc_feature (1)..(705): n is a, c, g, or t
gtgccgagccaaaaggattggaaaataatttccgttgattactcgcaaatagaattacggatgctcgcccatttgagtggagaccaggaactttccagcgcgtttttgcaggggcttgatattcacagcataaccgctgcgaaaatttttggaacaggcgaagtaagcaaagagatgagggcagccgcgaaagttgtgaactttggcgtgatttatggtatgagcgcatttaggcttgctagggatttgcgcataacccgttcaaaagctatggaattcataaatggatattttaatttatatagcaaggtcaaaatatattttgaagaagttgtaaaagaagcaaaagaaaaaggctttgtggaaaccatagcgaagcggaggcgttatttgccggagctacaagcgagcgaccatcaggagcgagcaatggcggagcgtatggcgatgaataccccaattcagggtagtgcagcagatttgattacggaagcaatgcttcgcctgcacgctaaaattgaaaacgaaaatttgccccttaaaatgcttttgcaggttcacgacgaactggtttttgaatgcccaaaggaaaatgtagatgaattttcgcaaataatcaaatacgaaatggaaaacgcctggcccatttccgttcccataatcgccaacataggtgttggcgataactggctggaagcgcattaa

SEQ ID NO: 31556 - protein, 234 aa, Unknown
  Obtained from environmental sample
  DOMAIN (1)...(233): DNA polymerase family A
  misc_feature (1)..(234): Xaa is any amino acid
MPSQKDWKIISVDYSQIELRMLAHLSGDQELSSAFLQGLDIHSITAAKIFGTGEVSKEMRAAAKVVNFGVIYGMSAFRLARDLRITRSKAMEFINGYFNLYSKVKIYFEEVVKEAKEKGFVETIAKRRRYLPELQASDHQERAMAERMAMNTPIQGSAADLITEAMLRLHAKIENENLPLKMLLQVHDELVFECPKENVDEFSQIIKYEMENAWPISVPIIANIGVGDNWLEAH

SEQ ID NO: 31557 - DNA, 816 bp, Unknown
  Obtained from environmental sample
  misc_feature (1)..(816): n is a, c, g, or t
ttggataaaattgaaggttgtaagttaatcagcatttactatattacacccatgcctaatataaatgtctcagaaatttggaaacaaatacaagccccggattttaacccagaacgcgatgcagcacttgtggaacaggtaaagcaagcggcaattagttcaacggagcctgctgttgtgagttttggcacaagcggttggcgcggagaaataggttctgaattcacgcttaaaaatattcaggttgtggcaaaggccattttgcaagtttacagagatgcagatgcagccacttttgaatcgcttggcgtaaattcttttgaagaactgcaatcaaaaggtttggtgcttgggcacgataaccgcctgctcggcaaagaattctgcgaagtggtggcagaccaatttataaaagcgggcataaaggtttattatggcggcgaaatgccaacgccggaattcagtgcggcaatagagcttttgggtgcggcttgttcggtgaacatgaccccttctcataatccaaatcattacaatggaataaaattcaatccggcagacggaggcccagcaggtccagaaatcacggataaaataaccgctaattcaaacaacctgatgaaaacccacacttgggaagaaatgggtagcataaattgggaaataatagacccgattaaaatctataagttattctccgaaaaacagggaacaatanaatacggcagaattcagtctttgctctcaaaagaaagcatagacttggtgtgcgaccacgttcacggctcaacagaggcaggcctgccgcatttttga

SEQ ID NO: 31558 - protein, 271 aa, Unknown
  Obtained from environmental sample
  DOMAIN (59)...(210): Phosphoglucomutase/phosphomannomutase, alpha/beta/alpha domain I
  misc_feature (1)..(271): Xaa is any amino acid
MDKIEGCKLISIYYITPMPNINVSEIWKQIQAPDFNPERDAALVEQVKQAAISSTEPAVVSFGTSGWRGEIGSEFTLKNIQVVAKAILQVYRDADAATFESLGVNSFEELQSKGLVLGHDNRLLGKEFCEVVADQFIKAGIKVYYGGEMPTPEFSAAIELLGAACSVNMTPSHNPNHYNGIKFNPADGGPAGPEITDKITANSNNLMKTHTWEEMGSINWEIIDPIKIYKLFSEKQGTIXYGRIQSLLSKESIDLVCDHVHGSTEAGLPHF

SEQ ID NO: 31559 - DNA, 444 bp, Unknown
  Obtained from environmental sample
  misc_feature (1)..(444): n is a, c, g, or t
atggctggaaagcaaatggtttcaacttacgacgctaagttagtaattatgacttttggcggtgtaccgttaggcgggtatgcagacaatacatttgttaatatcgcaaacgaatcaaaagcgtttaagcggaaacaaggcgcagatggcgaggttgttcggtcgcgtactaacaaaagctgccacgacgtaacaattactttgttgcaaagcagcgataccaacgattatttatccgctatgaatcagttggacaaggcaacaaaccacaatatgttgccgctgtctattactgatttaagcgggacaacgctttgtttctggccacaggcttgggtcgaacaaccggatacgtgggactttagcccggaagataccgatagggcttgggttttccataccggaccaatcgctacagataaccgtggaggggttaagttataa

SEQ ID NO: 31560 - protein, 147 aa, Unknown
  Obtained from environmental sample
  misc_feature (1)..(147): Xaa is any amino acid
MAGKQMVSTYDAKLVIMTFGGVPLGGYADNTFVNIANESKAFKRKQGADGEVVRSRTNKSCHDVTITLLQSSDTNDYLSAMNQLDKATNHNMLPLSITDLSGTTLCFWPQAWVEQPDTWDFSPEDTDRAWVFHTGPIATDNRGGVKL

SEQ ID NO: 31561 - DNA, 456 bp, Unknown
  Obtained from environmental sample
  misc_feature (1)..(456): n is a, c, g, or t
atgataaagctactaggtgaggttcccgatgtagaggtgctggtatcaggtacaggaattcaaaatctttatgaatggcacagagacacaaagggactctccaaaagcgatgcgtgggcagaaattgaaaaagcaaagccaaccgacagacccaagctaatttccagactctcggactcagaccctgttgctgcttccatgctccgcttattcgttaaaatgctggctcgctacgcaggcgatatttccacgcttcttttgccatttggaggtttgtatttagcgggtggagttgcgcaaaaagagcttcgctggttagttggcgacaatctgtttatgaaatattacgaaatggcttataacaaaaacataaagccgcttttgatgcaaactccagtttatttgataaaggattattccattagcttgtatggcgcggcgaatgcctgcggctag

SEQ ID NO: 31562 - protein, 151 aa, Unknown
  Obtained from environmental sample
  DOMAIN (1)...(149): Glucokinase
  misc_feature (1)..(151): Xaa is any amino acid
MIKLLGEVPDVEVLVSGTGIQNLYEWHRDTKGLSKSDAWAEIEKAKPTDRPKLISRLSDSDPVAASMLRLFVKMLARYAGDISTLLLPFGGLYLAGGVAQKELRWLVGDNLFMKYYEMAYNKNIKPLLMQTPVYLIKDYSISLYGAANACG

SEQ ID NO: 31563 - DNA, 870 bp, Unknown
  Obtained from environmental sample
  misc_feature (1)..(870): n is a, c, g, or t
atggaactttttgaaaaaggttccattgcaaaaaccgaatttgaaacagcagaatacagatatataaatgcacagaacagcttgataaacgcaaaaagcaatttggagcaggcagagcttgacttgaacaactgcacaataaaaagcnccatagacggcatagttttgagcagagcagtggaagcaggacaaaccgtggcagcatcactttctgcgccaactctgttcacgctggcaagagatttaactcaaatggaagttaaagccgatgttgacgaagcagatattggaatggtgaagatggggcagaaagttgaattttccgtggatgcttttccgaatgataaattcacaggcgaggttcaagaggttaggctttcgcccaatatttcttcaaatgtcgtgacctataccgttataataaaagcaaacaatccagaacaaaaacttttacccggcatgacagcaaactgcaatataatagttgaagaagccttgcaagttttaaccattccgctccgcgccctacaattcaagcccgatgaaaatacgcccggatatgtgccgcaacctggcggagaagttttttttggcggtggtcgtgaaggtcgtgacggcggtggcaagcgcatgggaaatcaaaacagaaacagaatatgggtagtgggcactgacggttctttgagcatgaagcgggttagtcttgggctttctgatggggcaaaaacccaagtgctagaaggcgtggatgctgccacttccattgttgttggtgtacaaatcgcaagcgaaaaaaacaatcaagcaacaaccaacccttttatgccgcagcggaatacaaaaagcggtggcacgatgaagataaggtaa

SEQ ID NO: 31564 - protein, 289 aa, Unknown
  Obtained from environmental sample
  misc_feature (1)..(289): Xaa is any amino acid
MELFEKGSIAKTEFETAEYRYINAQNSLINAKSNLEQAELDLNNCTIKSXIDGIVLSRAVEAGQTVAASLSAPTLFTLARDLTQMEVKADVDEADIGMVKMGQKVEFSVDAFPNDKFTGEVQEVRLSPNISSNVVTYTVIIKANNPEQKLLPGMTANCNIIVEEALQVLTIPLRALQFKPDENTPGYVPQPGGEVFFGGGREGRDGGGKRMGNQNRNRIWVVGTDGSLSMKRVSLGLSDGAKTQVLEGVDAATSIVVGVQIASEKNNQATTNPFMPQRNTKSGGTMKIR

SEQ ID NO: 31565 - DNA, 837 bp, Unknown
  Obtained from environmental sample
  misc_feature (1)..(837): n is a, c, g, or t
atgcaggaacaattttcatcgacaaaaattagctttgattaccgttatactgttaaagaccgcgatcttgagtttgcggtaaaaaaagcgcatgaattggggatgaaggtctgccttaagcctgtcatcaactgcatggacggagtttggagagcggaaataaatttccctgatgtaaatatgatgggaaaagacgtgtactggggccaatggtttgagcactacaccgcttttatttgccattatgctgaattggctgaatatacaggttgcgaaatgtactgtataggctgcgaaatggttgccgcggaaagaaaagaaagccattggcgcaatttgataaatgaaacaaggaaattatattcagggcctcttatatataacgccaaccacggaagcgaagacaacgtgcactggtttgacgctgttgactatatcggaaccagcgcttattaccctgttgccgaaattccgggtgaaaccgaagaaaatatgtttacggcctggcagcctataaaagaaaaggtaaaggctttaagcgcaaaatggaaaaagcaggtaatatttatcgaaatcggctgtcgcagcgcgaaaggttgcgccatgatgccctgggattttacccatactgaatttccctatgatgaagacgagcaggccaatttctatcgatcatgccttcggacattttttgacgagccgtggtttgcgggttatttttggtgggactggagcacaaaaatatacaatgcggaaaaagcaaaaggcaatacaggttttaacattcacgggaaaaaggcagaaagcgtgttaaaagaatggtattcaaaggagtag

SEQ ID NO: 31566 - protein, 278 aa, Unknown
  Obtained from environmental sample
  misc_feature (1)..(278): Xaa is any amino acid
MQEQFSSTKISFDYRYTVKDRDLEFAVKKAHELGMKVCLKPVINCMDGVWRAEINFPDVNMMGKDVYWGQWFEHYTAFICHYAELAEYTGCEMYCIGCEMVAAERKESHWRNLINETRKLYSGPLIYNANHGSEDNVHWFDAVDYIGTSAYYPVAEIPGETEENMFTAWQPIKEKVKALSAKWKKQVIFIEIGCRSAKGCAMMPWDFTHTEFPYDEDEQANFYRSCLRTFFDEPWFAGYFWWDWSTKIYNAEKAKGNTGFNIHGKKAESVLKEWYSKE

SEQ ID NO: 31567 - DNA, 471 bp, Unknown
  Obtained from environmental sample
  misc_feature (1)..(471): n is a, c, g, or t
atgcagattgatgaacttgccgaagtaaaccgcgcgcagatagagcaccgcgcgatgtggatgggccttatttacgatgaaatgactaaggcgggcattgatgccgaaacaattatcaggcgggcaataaaacgctgcggtcatattcgcggcgagcagcttaaaaaacgctgcacggatccgaagaatctagaagactttaaatacgcgtttctaagcgatttggttaaaaagaccttcgacgcgaatgtcgtaaacggcgatgaggcttcgctcggtattgattttcattattgcgctttggttaacgcatggaaaaaactcgggttcgatggcaaaacctgcgcgttgttatgcgatatggcaatggatggcgaccggggcatggctgaagttatggaactgcaatttaatcttggtcacacaatagcgcaagattgtccaacctgcgaactgcgctttaaaaaatga

SEQ ID NO: 31568 - protein, 156 aa, Unknown
  Obtained from environmental sample
  misc_feature (1)..(156): Xaa is any amino acid
MQIDELAEVNRAQIEHRAMWMGLIYDEMTKAGIDAETIIRRAIKRCGHIRGEQLKKRCTDPKNLEDFKYAFLSDLVKKTFDANVVNGDEASLGIDFHYCALVNAWKKLGFDGKTCALLCDMAMDGDRGMAEVMELQFNLGHTIAQDCPTCELRFKK

SEQ ID NO: 31569 - DNA, 459 bp, Unknown
  Obtained from environmental sample
  misc_feature (1)..(459): n is a, c, g, or t
gtgaatcggggctttatggcgcggctcgttattcataacgcgaaggtttatcttgagcgcggaagtttcgcccaagctgttctgattcacggcgacagaatcgccgcaacaggcacaaacgaagaaataatttcaaaagcgcctgacgctgaaaaaatagacgccagtggcggtcttttactgccaggcttcaacgattcgcatatgcacctgtattcttttgggcgtaacaagcatcgcattcaggcaaacggcgttacttctattgacgaactggttgcgcggggacgcgatctcatcgaccgcataaaacctccgaaaaggaactttcgtcgcgggtacgggctggaatcaggatatgttaggcgagaagcgctttcccaccgccatgatatcgaccgaatctctaccgaacacgcggtgggtattttcccggggccgggggcctacccaagctga

SEQ ID NO: 31570 - protein, 152 aa, Unknown
  Obtained from environmental sample
  misc_feature (1)..(152): Xaa is any amino acid
MNRGFMARLVIHNAKVYLERGSFAQAVLIHGDRIAATGTNEEIISKAPDAEKIDASGGLLLPGFNDSHMHLYSFGRNKHRIQANGVTSIDELVARGRDLIDRIKPPKRNFRRGYGLESGYVRREALSHRHDIDRISTEHAVGIFPGPGAYPS

SEQ ID NO: 31571 - DNA, 885 bp, Unknown
  Obtained from environmental sample
  misc_feature (1)..(885): n is a, c, g, or t
ttgcgctatcagacccaggatgaattacttaacgtcgccagagaatacaagaagcgggggcttcccatttctgttattgttgtggatttttttcactggcctctgcagggtgaatggaagtttgacccggtttactggcccgatcctgacgcaatgattcgggaacttaaggaaatgggaattgagcttatggtttccgtttggcccaccgttgacaggagaagcgagaattgggatgaaatgctggaaaagggattccttacgcgaacggaacggggataccgtatcggcctggcgttccagggtaataccatttattatgatgcgactaatccggaagcaagggcgtatgtttgggacaaggtgaaaaaaaattattacagcaaggggataaaaatcttctggcttgacgttgccgagccggaatgctctgttaatgattttgacaatttccgtttatatttggggccgaatattcagattggaaatatctatcctttcatgtacgccaggactttttttgacggcatgaaagcggaaagtcaggaaaatataatcaacctgctgcgctgcgcctgggcagggagccagcgtttcggcgcgcttgtctggagcggtgacatccactcgacctttgagagtcttcgtaaccaattggccgcgggtcttaacatgggtcttgcggggattccctggtggacaacggatatcggggggttctttggcggcaatgtgaaggatccttatttccatgaagtgctgattcgttggtttgaatggggctgtttctgtcctgtaatgcggcttcatggtgaccgcgatccgaaaaaacctcagtatggtacttcaggcggagcaacatgcgtttccggagcccgacaatga

SEQ ID NO: 31572 - protein, 294 aa, Unknown
  Obtained from environmental sample
  DOMAIN (1)...(294): Glycosyl hydrolases family 31
  misc_feature (1)..(294): Xaa is any amino acid
MRYQTQDELLNVAREYKKRGLPISVIVVDFFHWPLQGEWKFDPVYWPDPDAMIRELKEMGIELMVSVWPTVDRRSENWDEMLEKGFLTRTERGYRIGLAFQGNTIYYDATNPEARAYVWDKVKKNYYSKGIKIFWLDVAEPECSVNDFDNFRLYLGPNIQIGNIYPFMYARTFFDGMKAESQENIINLLRCAWAGSQRFGALVWSGDIHSTFESLRNQLAAGLNMGLAGIPWWTTDIGGFFGGNVKDPYFHEVLIRWFEWGCFCPVMRLHGDRDPKKPQYGTSGGATCVSGARQ

SEQ ID NO: 31573 - DNA, 690 bp, Unknown
  Obtained from environmental sample
  misc_feature (1)..(690): n is a, c, g, or t
ttgcacatatatcgcttttgctgtagcgtggagtctccagacaaaaggaggcgccatggcgaccagatacacgatcgcgctgagcccggacgagcgcgccgggctggaggacatcacgcgcaggggcaggcacagcgcgtcgaaggtcatccacgcgagggccctgctcctgtgcgacgagggccggacggtgcggtgggtctcggacgcgctggggctgagccccaggaccatagagggcctgaagaagcgggcggtggaggccggcccgtgggccgccatcgagaggaagcggagggagaccccgcccagggaggtcaggtacgacggcgccttcgaggcgcgcgtcgtggccctggcctgctccgagccgccgcccggccacgcgaggtggacggtgcgcctgctggcggagaagctggtcgagctgcgggtcgtcgcggaggcgtcccacatggccgtccacagggcgctaaaaaaaacgagcttcagcctcacatcaggaagtactggaagatcccgccgaggggcagcgcggccttcgtagccgcgatggaggacgtgctggaggtgtaccaccgcccctacgacccccgccggccggtggtgtgcatggacgagtcgaacaagcagctggtggcggacgtcgccgggccggtgccgtgcgcccccggcaggccgaagagatag

SEQ ID NO: 31574 - protein, 229 aa, Unknown
  Obtained from environmental sample
  misc_feature (1)..(229): Xaa is any amino acid
MHIYRFCCSVESPDKRRRHGDQIHDRAEPGRARRAGGHHAQGQAQRVEGHPREGPAPVRRGPDGAVGLGRAGAEPQDHRGPEEAGGGGRPVGRHREEAEGDPAQGGQVRRRLRGARRGPGLLRAAARPREVDGAPAGGEAGRAAGRRGGVPHGRPQGAKKNELQPHIRKYWKIPPRGSAAFVAAMEDVLEVYHRPYDPRRPVVCMDESNKQLVADVAGPVPCAPGRPKR

SEQ ID NO: 31575 - DNA, 492 bp, Unknown
  Obtained from environmental sample
  misc_feature (1)..(492): n is a, c, g, or t
atggcgaccagatacacgatcgcgctgagcccggacgagcgcgccgggctggaggacatcacgcgcaggggcaggcacagcgcgtcgaaggtcatccacgcgagggccctgctcctgtgcgacgagggccggacggtgcggtgggtctcggacgcgctggggctgagccccaggaccatagagggcctgaagaagcgggcggtggaggccggcccgtgggccgccatcgagaggaagcggagggagaccccgcccagggaggtcaggtacgacggcgccttcgaggcgcgcgtcgtggccctggcctgctccgagccgccgcccggccacgcgaggtggacggtgcgcctgctggcggagaagctggtcgagctgcgggtcgtcgcggaggcgtcccacatggccgtccacagggcgctaaaaaaaacgagcttcagcctcacatcaggaagtactggaagatcccgccgaggggcagcgcggccttcgtag

SEQ ID NO: 31576 - protein, 163 aa, Unknown
  Obtained from environmental sample
  misc_feature (1)..(163): Xaa is any amino acid
MATRYTIALSPDERAGLEDITRRGRHSASKVIHARALLLCDEGRTVRWVSDALGLSPRTIEGLKKRAVEAGPWAAIERKRRETPPREVRYDGAFEARVVALACSEPPPGHARWTVRLLAEKLVELRVVAEASHMAVHRALKKTSFSLTSGSTGRSRRGAARPS

SEQ ID NO: 31577 - DNA, 1578 bp, Unknown
  Obtained from environmental sample
  misc_feature (1)..(1578): n is a, c, g, or t
gtggaaatgcctttgcttaggggttatcaggcggcaagatttcttaaatcccgccccgccgccggggaaatcccaataattatgtttaccaatctgggggagacaagggataaattctggggagaacaggcgggagccgacgtttacattgaaaaatcacctgagaatttcggcgaattgtcggcgcagatacagcgccttttaaacgaaaacagggcgattgattttgaggcggtaaagaaagaaggggaaaaagtaactgataattcccttatagaaaccgtaaataacatacttgataacaaactttttcaggcgacccttatcggaatgttagccgaattatcaagcaaggtaagttctcttgaggaaacggttaagggcgttttcgctctgttacgcaacgcgtgcaaagcggatatgtgctccataatgataaaggacgccgacgacgcccttgtggtttataacgccaacaatttggggtatacggaagcgattgccgaagattttaaagctatcacaatcgccgattttaacacccgcttttccgattacaaagttgactccaaagaattgtatgattttttcccggccggggaaataaacgaaagaattgaatcctacattttaataccgcttgtaaactcaggagatgaattcgctaccgtgcacatcggcacttccgtaaaggaatatttttccccgcttattctggaaaaccttaatgttttcctgtgcgcggcttctcccattgtcgcgaacgctttgcatctcaagcagatggaaaccctgcagaaaaaaacaagggccgccttcgcccgttatgtccctatagacgtaatggacgagatcattaaaaaatcgtcgtcgccttcaagccagagcgaaagcagggtggttacgattctgttttccgacatcagaagttttacaaaaatttccgaaaacaccccggccagggaacttgtagatttccttaacacgtatttttccgtcatgggggatcaaattattgccgagggcggcaatatcgacaagttcatcggcgacgcgataatggcgatattcggcgcccccaaaacgctggagaattcagccgcgagcggcgtcagggcggcgatacggatggttaaggcccttcccaacgtggacacctcaagcattaccttgccggagggcggatttggcgccggtatcggtcttaattgcggcgaatgcgtcgtcggcaacatcggctttcagaataaaatggactacacggtgataggcgacaccgttaatctcgcctcacggcttgaaggcattaccaagtattaccatcagacgatcatcgtatcggaatatatctacaactcggccaaagacgatttcattttccgcaaggccgacagcgtgcgcgtgaagggcaaagaccagccggtggggctttacacggtgtacgccgcttttcgcggcgaagcggaagagggaacgcccgcctctctggttattgaccgggaagctctggatcaatacaacaagggccttaaacttttcgccatgcgcgagttgaaaccgcgaaacagtattttgtaa

SEQ ID NO: 31578 - protein, 525 aa, Unknown
  Obtained from environmental sample
  DOMAIN (293)...(482): Adenylate and Guanylate cyclase catalytic domain
  misc_feature (1)..(525): Xaa is any amino acid
MEMPLLRGYQAARFLKSRPAAGEIPIIMFTNLGETRDKFWGEQAGADVYIEKSPENFGELSAQIQRLLNENRAIDFEAVKKEGEKVTDNSLIETVNNILDNKLFQATLIGMLAELSSKVSSLEETVKGVFALLRNACKADMCSIMIKDADDALVVYNANNLGYTEAIAEDFKAITIADFNTRFSDYKVDSKELYDFFPAGEINERIESYILIPLVNSGDEFATVHIGTSVKEYFSPLILENLNVFLCAASPIVANALHLKQMETLQKKTRAAFARYVPIDVMDEIIKKSSSPSSQSESRVVTILFSDIRSFTKISENTPARELVDFLNTYFSVMGDQIIAEGGNIDKFIGDAIMAIFGAPKTLENSAASGVRAAIRMVKALPNVDTSSITLPEGGFGAGIGLNCGECVVGNIGFQNKMDYTVIGDTVNLASRLEGITKYYHQTIIVSEYIYNSAKDDFIFRKADSVRVKGKDQPVGLYTVYAAFRGEAEEGTPASLVIDREALDQYNKGLKLFAMRELKPRNSIL

SEQ ID NO: 31579 - DNA, 504 bp, Unknown
  Obtained from environmental sample
  misc_feature (1)..(504): n is a, c, g, or t
ttgccattgacagattggccgagtcatagtggttggcaaatactcggctgcggtttcgccgcaatcatgagcatggcgggaacgctgattgtttctttaataatgggcataacgctgccagccggtaaactgctgttgatccttgccttatcaccgctgatttgtttgtcaggcggggctttggcaatgatcatcatcggactgataaaaaacaaaagggcggccaaccttgccgtaatgcttattgttatgccgcagatgtttttatccggcgcaattatccccatcaacaattcatcgggcgtgctgttgattttgaaccgcgtaatgcccatgacatactgtttagaccttgtgcgcgcggttgtttaccggggaaatcccgagtatgacagcgttgttatgtttaatccgttggtcaatttcgcggcgattcttgtgttgacaaccgtctgcctggtacttggcacttatttctttgcgcaatccgagaaaaacaggtaa

SEQ ID NO: 31580 - protein, 167 aa, Unknown
  Obtained from environmental sample
  misc_feature (1)..(167): Xaa is any amino acid
MPLTDWPSHSGWQILGCGFAAIMSMAGTLIVSLIMGITLPAGKLLLILALSPLICLSGGALAMIIIGLIKNKRAANLAVMLIVMPQMFLSGAIIPINNSSGVLLILNRVMPMTYCLDLVRAVVYRGNPEYDSVVMFNPLVNFAAILVLTTVCLVLGTYFFAQSEKNR

SEQ ID NO: 31581 - DNA, 549 bp, Unknown
  Obtained from environmental sample
  misc_feature (1)..(549): n is a, c, g, or t
atggcgggtaaaacagcggaaacattggtaagtttaaggcaacggctgttaaactttatccgttcacgggtgaaccggcttgaagacgcggaagatattttacaggatgtgttttatcaattcagccgcgtgaatgatttaattaatccgatagaaaatatttccgcgtggctataccgcgccgcccgcaacagaataatcgatcatcatagaaaaaagaaagacgagcccttacccgcgtcatacgatgaagataacgatgagtacatttttgacgagatagccgacattatgtacggcgaagaagcaacgccggaaacagaaatgctgcgctcattggtttttgaagaaattcaaacagcccttgctgatttgccaaaggaacaacgcgaaatttttgagctgaccgaattgatggattattccgtgaaggaagccgcagaaaaaaccaatgcgcctgtaaacacagttctctcgcgaaaacattacgctgtaaaatttttacggaaaagactgcaagaactgtatagcgacgttatatgcaaatag

SEQ ID NO: 31582 - protein, 182 aa, Unknown
  Obtained from environmental sample
  DOMAIN (2)...(174): ECF sigma factor
  misc_feature (1)..(182): Xaa is any amino acid
MAGKTAETLVSLRQRLLNFIRSRVNRLEDAEDILQDVFYQFSRVNDLINPIENISAWLYRAARNRIIDHHRKKKDEPLPASYDEDNDEYIFDEIADIMYGEEATPETEMLRSLVFEEIQTALADLPKEQREIFELTELMDYSVKEAAEKTNAPVNTVLSRKHYAVKFLRKRLQELYSDVICK

SEQ ID NO: 31583 - DNA, 615 bp, Unknown
  Obtained from environmental sample
  misc_feature (1)..(615): n is a, c, g, or t
gtggcttcattaattctgttaataattatttatatctcgtttattagtttgggcctgccggattcattgcttggatcggcatggccttcaatgtacagcggattaagtgttccactgcactatgccgggtatatttccatgattgtcgctggcggaacggttatttcaagcattttcagcgaaagggttatcaggcggctgggaaccgggcttgtcgccgccattagcgttttaatgaccgcggttgcgctccttggaatatcattttctcattctttttcgttattgtgcctttgcgccattccccttggcctgggcgcaggttccatagacgcggccctgaataactacgtagcgctgcattacaaggcaaagcacatgagctggctccattgtttttggggaattggcgcatcaatagggccaataatcatgtcgtattttttgataaggggcagctcatggggcatgggctaccgcgcgattggtttgattcaatcttcccttgttgtcgtcttatttaccacaatatcgctatggggaaaaacagatcccaagcaacagcgcccaaaacagcggcgaaataaagaaaacccgtcagaaaatacaatttag

SEQ ID NO: 31584 - protein, 204 aa, Unknown
  Obtained from environmental sample
  misc_feature (1)..(204): Xaa is any amino acid
MASLILLIIIYISFISLGLPDSLLGSAWPSMYSGLSVPLHYAGYISMIVAGGTVISSIFSERVIRRLGTGLVAAISVLMTAVALLGISFSHSFSLLCLCAIPLGLGAGSIDAALNNYVALHYKAKHMSWLHCFWGIGASIGPIIMSYFLIRGSSWGMGYRAIGLIQSSLVVVLFTTISLWGKTDPKQQRPKQRRNKENPSENTI

SEQ ID NO: 31585 - DNA, 1143 bp, Unknown
  Obtained from environmental sample
  misc_feature (1)..(1143): n is a, c, g, or t
ttgaagctttcatatacgcaggtaataacattcacctattgcgcgttaatattattcggcggaattttactttgccttcctattgcctcgcaatcgggcggatggacgccgccgcttgacgccctttttacatccacgagcgcggcctgcgttaccggccttgtgttatacgacacctggacgcattggtcgctgttcggccagattgtcatcctgtttttatttcaaatcggcggcatcggttttatgaccgttattaccatgttttccatatttttaaaacgtaagataggcctgtacgaaaggcaggtactggttcaatcggccggattattaaagcttggcggagtagtgcgcctgattcagaatattgtcctgctgtcgctttgtatggaatttatcggggcggtattattggcgctgcatttttgtcccttaatgggatttaaaagcggcctctataacgccgtcttccactcggtatccgctttttgcaacgctggttttgatttaatcggaaaatacgggcaattttcatcgctcagttattttgttcatgattttccggtaaccattacccttgtttttcttattgtaacaggcggaatagggtttgtcgtattggacgatatccgcatatataaattcaagtttgaaaaatactcgctgcatacaaaaattacgcttaccgttacgggaatactgattgtcctgggagcaatattattctacgcgtttgaatccaacggggcattcgcgggctttaccgttccggaaaagttactcgcgtcaatattccagtccgttacctccaggacatcgggcttcagcgcgattgacacgatggacttaaaagaggcaagcgtaatattggcaatggtatttatgttcatcggaggcggttccggctcgacggccgggggcattaaaacgtcaactttggcgattcttgttatgagcactgtcaattcaaccagaaagatgaacaaaatgatggttttcaagagaatgttaagtgataaaacggtanaaatacgccagctctattgtcaccatttacttattcgtcgttgtcactgcggcaatttttatatgttgtgtcgaaccttcgtgccgctcgtgccgaattctgtccaatgttaa

SEQ ID NO: 31586 - protein, 380 aa, Unknown
  Obtained from environmental sample
  DOMAIN (108)...(375): Cation transport protein
  misc_feature (1)..(380): Xaa is any amino acid
MKLSYTQVITFTYCALILFGGILLCLPIASQSGGWTPPLDALFTSTSAACVTGLVLYDTWTHWSLFGQIVILFLFQIGGIGFMTVITMFSIFLKRKIGLYERQVLVQSAGLLKLGGVVRLIQNIVLLSLCMEFIGAVLLALHFCPLMGFKSGLYNAVFHSVSAFCNAGFDLIGKYGQFSSLSYFVHDFPVTITLVFLIVTGGIGFVVLDDIRIYKFKFEKYSLHTKITLTVTGILIVLGAILFYAFESNGAFAGFTVPEKLLASIFQSVTSRTSGFSAIDTMDLKEASVILAMVFMFIGGGSGSTAGGIKTSTLAILVMSTVNSTRKMNKMMVFKRMLSDKTVXIRQLYCHHLLIRRCHCGNFYMLCRTFVPLVPNSVQC

SEQ ID NO: 31587 - DNA, 411 bp, Unknown
  Obtained from environmental sample
  misc_feature (1)..(411): n is a, c, g, or t
ttgatcagatcggccgaggaatggaacgcagacgcgggtctggacgagagagcttttgccgaaaaggcccttgcctttgtgcagggtttcacatacgatcgtgatctggagggcagcgattttgtcaatcttgtgacagccattagtgagggcaggggcgactgcgacagccgggccatgctctgggctctgatactggagcaggcggacatccccgcggctatgatggtatcccgcgcccacagccacgcgatgggccttgcggacgttcccggcgcaggagcccgcttcgactcagggggaaaaaaatggctggtggcggaaaccaccgataaggtgggcatcggcctaattagcgccggcatgagcgatattgcgtcctggctgggagtgatttttaatatcccgtaa

SEQ ID NO: 31588 - protein, 136 aa, Unknown
  Obtained from environmental sample
  misc_feature (1)..(136): Xaa is any amino acid
MIRSAEEWNADAGLDERAFAEKALAFVQGFTYDRDLEGSDFVNLVTAISEGRGDCDSRAMLWALILEQADIPAAMMVSRAHSHAMGLADVPGAGARFDSGGKKWLVAETTDKVGIGLISAGMSDIASWLGVIFNIP

SEQ ID NO: 31589 - DNA, 831 bp, Unknown
  Obtained from environmental sample
  misc_feature (1)..(831): n is a, c, g, or t
ttgccgcgcacaatgccgcagattatgttgatgaagcaaaaaacaaaaaataaaacacgggttttaatatttttcctgtgtataaatttattttttaattcgcaatctcttttttctctaagctttaatgacgccggagctcccgcagaacttgccgccgccattgaaaacgccatgacggacgagcaggcgcttgcgcagcttttcatgcttggctgggttggagaagagccgtcgccgttaataatggattggattcgccagagaaatatcggcggtgtaaaaattttcggatggaatacggcaaatacccgtaagttagctgaaactgtgggaattttgcaaggagcgagtttaaacggaacttttaatatccctctgcttgtcgctacggatcaggaaggcggatggattcgtcacataaaaggcgatacaagcgagacgccgggaaatatggcgataggagcgtccggttatccccgtgacgcttacttgtccggttattacataggaaaagaattagctcttctcggcgttaacatgaatttcgctcctacagtcgatctttttacaaaccgtgattcagtattgataggaccgagagcttttggaagcgatcctgtaagagccggaattttaggcgctgcgtttgtaaaaggacagcttgccgtgggcgttattcctacggcgaaacattatcccggtcacggcgatacagaccttgattctcacggaacactgcctaaaattgaaatttcgtttaacactctttgggacagggaacttgttccctatcgtatgcttgccgcggaaggactgcccgccgtttga

SEQ ID NO: 31590 - protein, 276 aa, Unknown
  Obtained from environmental sample
  DOMAIN (117)...(276): Glycosyl hydrolase family 3 N terminal domain
  misc_feature (1)..(276): Xaa is any amino acid
MPRTMPQIMLMKQKTKNKTRVLIFFLCINLFFNSQSLFSLSFNDAGAPAELAAAIENAMTDEQALAQLFMLGWVGEEPSPLIMDWIRQRNIGGVKIFGWNTANTRKLAETVGILQGASLNGTFNIPLLVATDQEGGWIRHIKGDTSETPGNMAIGASGYPRDAYLSGYYIGKELALLGVNMNFAPTVDLFTNRDSVLIGPRAFGSDPVRAGILGAAFVKGQLAVGVIPTAKHYPGHGDTDLDSHGTLPKIEISFNTLWDRELVPYRMLAAEGLPAV

SEQ ID NO: 31591 - DNA, 369 bp, Unknown
  Obtained from environmental sample
  misc_feature (1)..(369): n is a, c, g, or t
atgaaaaccccgaaaatgaaagtgcgttttaatacggtgataaaagaaattaaaggcgaaggaaaagtaaaatcggtagttttggaaaataccaaaacaagcaaaaccgaggaagaaggagcggacgcggtttttatttttgccggcactactcctcagtcttcgcttgcgcgttctttaggcgtaacactggacgaaggcgctcatataattaccaataacaaaatggaaactaacattccgggtttctacgctattggcgatataagatcaggagttttccggcaagttgtaacagccgccgccgacggagcgattgccgcgcacaatgccgcagattatgttgatgaagcaaaaaacaaaaaataa

SEQ ID NO: 31592 - protein, 122 aa, Unknown
  Obtained from environmental sample
  misc_feature (1)..(122): Xaa is any amino acid
MKTPKMKVRFNTVIKEIKGEGKVKSVVLENTKTSKTEEEGADAVFIFAGTTPQSSLARSLGVTLDEGAHIITNNKMETNIPGFYAIGDIRSGVFRQVVTAAADGAIAAHNAADYVDEAKNKK

SEQ ID NO: 31593 - DNA, 621 bp, Unknown
  Obtained from environmental sample
  misc_feature (1)..(621): n is a, c, g, or t
ttgatggccgaggattttggcttatttggagccgaaaaggcttcgataatccttcaaaacctgccgcatgaagtacagagcgacgtagcgcgccgtatcgcgacaatggacagaacaagcccggaagtattgcgcgaagtagaacgcgtacttgaaaagaaactttcgtcgctgtccagcgaagactacaccgcggcgggcggcgttgaaagcatcgttgaaatccttaaccttgttgaccgcgcgtctgaaaaacagattattgaagctcttgaagacgaagaccccgagcttgccgaagagatcaaaaagagaatgttcgtgttcgaagacatcgttatgctcgacgaccgcgccattcagaaggttatgcgcgaagtggactctcaggaacttgcgaaagcgctcaaatccgtcgattcggaagtacaggacaagattttcaagaatatgtcaaagcgcgccgcaagcatgctcaaggaagacatggagtatatggggccggtacgtttgaaagacgtggaagaatcgcagcagaagattgtgtccatcatccgccacttggaggatacgggagaaatcgtcgtcgcgcgcgccggagaagacgaattagttgtataa

SEQ ID NO: 31594 - protein, 206 aa, Unknown
  Obtained from environmental sample
  DOMAIN (88)...(197): FliG C-terminal domain
  misc_feature (1)..(206): Xaa is any amino acid
MMAEDFGLFGAEKASIILQNLPHEVQSDVARRIATMDRTSPEVLREVERVLEKKLSSLSSEDYTAAGGVESIVEILNLVDRASEKQIIEALEDEDPELAEEIKKRMFVFEDIVMLDDRAIQKVMREVDSQELAKALKSVDSEVQDKIFKNMSKRAASMLKEDMEYMGPVRLKDVEESQQKIVSIIRHLEDTGEIVVARAGEDELVV

SEQ ID NO: 31595 - DNA, 684 bp, Unknown
  Obtained from environmental sample
  misc_feature (1)..(684): n is a, c, g, or t
atgttaaaggccgtattcagaccgcaagaacttgtacctctgcaggagaaattgatcattaattctcctacatcttttgcggatcttgcgcatttggctcctgaagaggaaaaagatgaagaagttgacgaagtcgaagaatacaaaggccctacagcggacgatcttcgccgtgaagccgaaatgtttaaggttcaatgggaagaagaaaaagaaaaaatgatttccgacgcgaaggcgcaggctgaaaaaataattcaggacgcgcaggatacggcgcagcatgaaatacaaagtaaaaccgacgaagggcagaacataaaacagcaggctgaagatgaagcgaaaaaaatcatcgaagactcaaagaaaaaatccaaagagatggaagatgaggtaagaaagactcttgacggcgaaattaaagccgcgcaggacaagggcagggaagagggcaaagaatcaggttttgccgaaggcaaggcggaaatagaaaggcttatttcccgtacgcagcgcatgcttgagcgcgctcaggacacgagagggcaaattcttgccgagacggaaccagaaataatcgaccccgctctgcttgatgcccgccaagtaaacaacgttctttccgcagaacaaaggagcgtcattctccccactgcgacaccggcgccggacaaagtatag

SEQ ID NO: 31596 - protein, 227 aa, Unknown
  Obtained from environmental sample
  misc_feature (1)..(227): Xaa is any amino acid
MLKAVFRPQELVPLQEKLIINSPTSFADLAHLAPEEEKDEEVDEVEEYKGPTADDLRREAEMFKVQWEEEKEKMISDAKAQAEKIIQDAQDTAQHEIQSKTDEGQNIKQQAEDEAKKIIEDSKKKSKEMEDEVRKTLDGEIKAAQDKGREEGKESGFAEGKAEIERLISRTQRMLERAQDTRGQILAETEPEIIDPALLDARQVNNVLSAEQRSVILPTATPAPDKV

SEQ ID NO: 31597 - DNA, 630 bp, Unknown
  Obtained from environmental sample
  misc_feature (1)..(630): n is a, c, g, or t
gtgtgcaccgctcttaaaacgcgcggcggctttagcggcagcttcgaggacctgctcgactatatccgtcagtataacgaagaggtggcttatcagctctgcgacggcttcgcggtaagcaatggctactacaccatccaccccaacataggcggcaccttcaattcgacagccgaaatacacgaccacgaaaagcacccgatttccttccgcttctccgcgcgaagcaaattgcgcagcctgattaagaacatagaagtcgtcgttgaaggcatggcggacaccggcggctatatcgacgagtacatcgaccaggaaggagactacgtaaacagccaatttctgcctgacaacatgttctccgtccacggccacaaaatcaagatagtcggggacgacccctcgtgtggattgtacttcgtgccggttctggatccttccaaggcggtcaaagtaacccgtgttggcgacaacaacccgaccaaggtaacaggcatcgcgccaaacacaggccacaccaaaaacagaatcgaaattcgtacgcaatactcaggatccggagcaatactccttaaaactccccgtactataaccagctccttcaccctggaacaattggaagccgtttaa

SEQ ID NO: 31598 - protein, 209 aa, Unknown
  Obtained from environmental sample
  misc_feature (1)..(209): Xaa is any amino acid
MCTALKTRGGFSGSFEDLLDYIRQYNEEVAYQLCDGFAVSNGYYTIHPNIGGTFNSTAEIHDHEKHPISFRFSARSKLRSLIKNIEVVVEGMADTGGYIDEYIDQEGDYVNSQFLPDNMFSVHGHKIKIVGDDPSCGLYFVPVLDPSKAVKVTRVGDNNPTKVTGIAPNTGHTKNRIEIRTQYSGSGAILLKTPRTITSSFTLEQLEAV

SEQ ID NO: 31599 - DNA, 471 bp, Unknown
  Obtained from environmental sample
  misc_feature (1)..(471): n is a, c, g, or t
atgattatgagaaattatgattattcggatccggatgttgttgatctctacaaaaatttacatgcatttaatccagaagtatcattaggtcctgagagtattataatagaaacaatgtctacatgtacaagaaaatgtgcatattgtccgcagggagtgatggagcgcccttatgagagaatggagacgtctttagtcttgcgattgcttgatgagataaccgaattacggtcagtccgtcgaattgaattgcaatatataaatgagcctcttctagatgaacgagtatttcattttgcgaagtatgctaaagaaaaaaatcctggtatccgtgtaaatatggctactaatggtgatttgattacttgtgatgatatattgaggagcttgtttgaagtatttgattctgtgagaataacacaacatcaaacagattacttgccatgcgaaaatatgctcggccgattctga

SEQ ID NO: 31600 - protein, 156 aa, Unknown
  Obtained from environmental sample
  misc_feature (1)..(156): Xaa is any amino acid
MIMRNYDYSDPDVVDLYKNLHAFNPEVSLGPESIIIETMSTCTRKCAYCPQGVMERPYERMETSLVLRLLDEITELRSVRRIELQYINEPLLDERVFHFAKYAKEKNPGIRVNMATNGDLITCDDILRSLFEVFDSVRITQHQTDYLPCENMLGRF

SEQ ID NO: 31601 - DNA, 456 bp, Unknown
  Obtained from environmental sample
  misc_feature (1)..(456): n is a, c, g, or t
atgaaaccaaacccgtttcaaattgataaaattgagatcctggataaggatggaagacaatgttctgtttatgaagctcaggaaaaattgatagttaggtttcattttatatccagaaaacaatttcctaatgtatattgttattttattatcaaaagaaaaaatggtgaaaatctcataatgtgttacaacatagaagatggccatgatatttttaacaatatgccatctggaaagtatgtgattgaattaacaatcatgaaaggaatattgtctcgtggagaatataccatagatttgggctttgggtgtggtcatttagcaggtggttatggcgaacaatatatgaacgctttgcggtttagtgttgtcgattctttgtcaataattggtaatagccgtaatgcaataatttctactgttcttgagtggaaaataattgattacattaattga

SEQ ID NO: 31602 - protein, 151 aa, Unknown
  Obtained from environmental sample
  misc_feature (1)..(151): Xaa is any amino acid
MKPNPFQIDKIEILDKDGRQCSVYEAQEKLIVRFHFISRKQFPNVYCYFIIKRKNGENLIMCYNIEDGHDIFNNMPSGKYVIELTIMKGILSRGEYTIDLGFGCGHLAGGYGEQYMNALRFSVVDSLSIIGNSRNAIISTVLEWKIIDYIN

SEQ ID NO: 31603 - DNA, 1500 bp, Unknown
  Obtained from environmental sample
  misc_feature (1)..(1500): n is a, c, g, or t
gtggatggccgaaaagttccccaaaggctgacgaagatcgggatgaaaaaaaatctaccggtcattgctctggcaggccgtcctaatgtaggcaaatcaaccctcttcaataggctccttcacaagcgtcgcgccattaccgatccaacgcccggcgtaaccagggatgcggtcgcgatggattccttgatattggaaaggcatcttacgcttgttgataccggcggctttaagctggatcgcgagcgggattccgccgccggagagcttgaaaaaatcgtggttgagcgcaccctcgaagtgttgaaagaagcggatctaattatacttatttttgcggcgggagaaatcacttccgaggacgaggagttcatcgaccttttaaggccctaccagcacaagctaatcgcggcggtgaacaagaccgaaggcggcaggcgtgaggcggacgcgtggaacctgctttcgtacggctttgaaaaggtctacatgatttccgctgaacacggcgacaacatccgggagctggaagaagcaatcgtcagccgcctggatttcacaggaacaacggaagaaactcctcccgcgccttcagtagagcaagatgaagcgccgatacgaatcgcacttttgggcaaaccaaacactgggaagtccacgctttcaaacaggctaacctcttcctccgattccattgtcagcgatattcccggcacgacccgggacgtggtggaaggaacgttcgtctggaaaaaacgtaacttccaggttctggacacagcaggcatcaggcggaaggcgaaggtaaacgaaagcgtagagtattactcggtgaaccgggccataaaaaccatcgacgacgcggacattgtttttctaatcatcgacgctaacgaaggcctgacggatcaggacaagaaaatcgcggctcttgcccatgacaagggcaggggcttgatcatggttttaaacaagtgggacaccatgcctacggttaagaatacatttgaggctgtgaaggacagaatccattttctttttgccaagatggaatacgccccgataatcgcgctgagcgccctcaatggaagcgggatagacagcctgcttgacacaagcctgaagatgtacgcgcagctcaacaggcagataaaaaccgccgacctgaacgttgctcttgagaactggctgaccgaacaccctccgccttccgggccgcaaaccaggttcaagatccgctacgcaatccaggcggaggcaaatccggtcaggtttgttttttttgcctcgcggcagaacgcggtaacggaggcctatgtttcataccttcgcaaccgtatacgccgcgaccttggtttttcgcttatcccggtggcaatcgaaatccgggcctcgaccaagccgccggaagaagcaaagaaaaaatccggctcgcggaaaaagcgggtgatgccatggcttcctacagcatcggcgaattggaaaaactgctcggggtaa

SEQ ID NO: 31604 - protein, 499 aa, Unknown
  Obtained from environmental sample
  DOMAIN (22)...(326): Dynamin family
  misc_feature (1)..(499): Xaa is any amino acid
MDGRKVPQRLTKIGMKKNLPVIALAGRPNVGKSTLFNRLLHKRRAITDPTPGVTRDAVAMDSLILERHLTLVDTGGFKLDRERDSAAGELEKIVVERTLEVLKEADLIILIFAAGEITSEDEEFIDLLRPYQHKLIAAVNKTEGGRREADAWNLLSYGFEKVYMISAEHGDNIRELEEAIVSRLDFTGTTEETPPAPSVEQDEAPIRIALLGKPNTGKSTLSNRLTSSSDSIVSDIPGTTRDVVEGTFVWKKRNFQVLDTAGIRRKAKVNESVEYYSVNRAIKTIDDADIVFLIIDANEGLTDQDKKIAALAHDKGRGLIMVLNKWDTMPTVKNTFEAVKDRIHFLFAKMEYAPIIALSALNGSGIDSLLDTSLKMYAQLNRQIKTADLNVALENWLTEHPPPSGPQTRFKIRYAIQAEANPVRFVFFASRQNAVTEAYVSYLRNRIRRDLGFSLIPVAIEIRASTKPPEEAKKKSGSRKKRVMPWLPTASANWKNCSG

SEQ ID NO: 31605 - DNA, 1269 bp, Unknown
  Obtained from environmental sample
  misc_feature (1)..(1269): n is a, c, g, or t
ttgagaggaaaaaaaatggcaaaacttcgtaacggacagggagaatacgatcgcacctgctctttttgcgggaaaagcgcggacatggccaggcgcctcatcgcaggtccgcgggatgtctatatttgcgacgaatgtgtcgaagtttgccgcaagatcctcaccgaggaggatcatgagctttcaagccagttcaccggcgacattccgactcccaaggaaataaaggattacctcgatcatttttgcatcggccaggacgtggcaaaaaaggccctttccgtggcggtttacaaccactacaaacgcattgccaatccttccaaggaacatgacgatgttgaaattgaaaaatcaaacgtgctgttaatcggaccgaccggcacggggaaaacccttttggcaaaaactctcgcaaagaaactcaaggttccctttgccattgtagacgctacaaccctgactgaagcgggctatgtaggcgaagacgtggaaaatattctcctgaaacttattcagaacgcggggggaaacatcgccgcagcggaaaggggaattgtatatatagatgaaatcgacaagatagcgcgtaaaggtgaaaacgtttccatcaccagggatgtttcaggcgaaggcgtacagcaggcgctgctaaaaataatcgagggtaccatcgccgcagttccgccgcagggaggcaggaagcatcccaatcaggaaatgatccgcatcgatacgacagatattctctttatatgcggcggcgcttttgtggggctggacaaacacatcgagcgccgggtggttgagcatccgatgggtttcggaaccgatgccaaaaagcatggcggcaagaacctgaaagagctttacgacgccctgcatcctgacgatcttattcactttggtatgatccccgaatttatcggaaggcttccaatcaccgtaagtctggaagagcttaacagggacgatttaaagaggatcataaccgaacccaaaaacgcgattattaagcaatacaccgcttctttggccattgacgaggtcaagcttgaattcaccgatgacgcgattgacgcgattgcggatacggcaatcaaacagaagaccggcgcaaggggactcagggccattgtggaaaagctgatgaccgacattatgtttgaaatcccgtccatcaagggatttaaacatgtgcgtattacaaaagacacggtgctaaaatccgagccccctgatattcagactttgcagaaaagcgcttaa

SEQ ID NO: 31606 - protein, 422 aa, Unknown
  Obtained from environmental sample
  DOMAIN (120)...(351): ATPase family associated with various cellular activities (AAA)
  misc_feature (1)..(422): Xaa is any amino acid
MRGKKMAKLRNGQGEYDRTCSFCGKSADMARRLIAGPRDVYICDECVEVCRKILTEEDHELSSQFTGDIPTPKEIKDYLDHFCIGQDVAKKALSVAVYNHYKRIANPSKEHDDVEIEKSNVLLIGPTGTGKTLLAKTLAKKLKVPFAIVDATTLTEAGYVGEDVENILLKLIQNAGGNIAAAERGIVYIDEIDKIARKGENVSITRDVSGEGVQQALLKIIEGTIAAVPPQGGRKHPNQEMIRIDTTDILFICGGAFVGLDKHIERRVVEHPMGFGTDAKKHGGKNLKELYDALHPDDLIHFGMIPEFIGRLPITVSLEELNRDDLKRIITEPKNAIIKQYTASLAIDEVKLEFTDDAIDAIADTAIKQKTGARGLRAIVEKLMTDIMFEIPSIKGFKHVRITKDTVLKSEPPDIQTLQKSA

SEQ ID NO: 31607 - DNA, 318 bp, Unknown
  Obtained from environmental sample
  misc_feature (1)..(318): n is a, c, g, or t
gtgtcttttgtaatacgcacatgtttaaatcccttgatggacgggatttcaaacataatgtcggtcatcagcttttccacaatggccctgagtccccttgcgccggtcttctgtttgattgccgtatccgcaatcgcgtcaatcgcgtcatcggtgaattcaagcttgacctcgtcaatggccaaagaagcggtgtattgcttaataatcgcgtttttgggttcggttatgatcctctttaaatcgtccctgttaagctcttccagacttacggtgattggaagccttccgataaattcggggatcataccaaagtga

SEQ ID NO: 31608 - protein, 105 aa, Unknown
  Obtained from environmental sample
  misc_feature (1)..(105): Xaa is any amino acid
MSFVIRTCLNPLMDGISNIMSVISFSTMALSPLAPVFCLIAVSAIASIASSVNSSLTSSMAKEAVYCLIIAFLGSVMILFKSSLLSSSRLTVIGSLPINSGIIPK

SEQ ID NO: 31609 - DNA, 306 bp, Unknown
  Obtained from environmental sample
  misc_feature (1)..(306): n is a, c, g, or t
atgatgaagcgtcttgtttttgttctggcactggtttttatagcctcggcttttatttttgcccaggaagcccaggaatctgaaagctcatcggcgtcgatgtggaagtacattgccgcggcggcggctgtaggaatttcctgtatagccggcggtttggcggtaggtcgtattggggccgctgcgatgggcgcaatgagcgagaatccggagctttcgggaaaggccataccgtacgtcggccttgccgaaggaatctgcctttggggcttccttgtggccctgcttattctggtgattaactag

SEQ ID NO: 31610 - protein, 101 aa, Unknown
  Obtained from environmental sample
  SIGNAL (1)...(21)
  DOMAIN (35)...(100): ATP synthase subunit C
  misc_feature (1)..(101): Xaa is any amino acid
MMKRLVFVLALVFIASAFIFAQEAQESESSSASMWKYIAAAAAVGISCIAGGLAVGRIGAAAMGAMSENPELSGKAIPYVGLAEGICLWGFLVALLILVIN

SEQ ID NO: 31611 - DNA, 342 bp, Unknown
  Obtained from environmental sample
  misc_feature (1)..(342): n is a, c, g, or t
atggattattttttcatcggagaggcggaactggttacagctttccgttttgtaggcatcagcggaatttccgtgcaaagctcaagcgacgctgttgacgcgttccgcagaatcaccgaaagctttgacgaaactaccggcgcggtcctgccgggcatggagctttgccgcgtgcttatcatcacggaggaagtggctgactggctaggggacacccttgtcaggtggcagcttaaagatcgctatcccttgattgtagaaatacctgggcttttgggaaggcatgccggccgcaagacgcttgtggaatccatcagggaagcaatcggagtcagggtctga

SEQ ID NO: 31612 - protein, 113 aa, Unknown
  Obtained from environmental sample
  misc_feature (1)..(113): Xaa is any amino acid
MDYFFIGEAELVTAFRFVGISGISVQSSSDAVDAFRRITESFDETTGAVLPGMELCRVLIITEEVADWLGDTLVRWQLKDRYPLIVEIPGLLGRHAGRKTLVESIREAIGVRV

SEQ ID NO: 31613 - DNA, 600 bp, Unknown
  Obtained from environmental sample
  misc_feature (1)..(600): n is a, c, g, or t
atggcaaaaatcaagctcacaaagaatgagctgaaaaaacaaaaagattctcttaaaatgtacaggcgttacctgcctacgctgatgttgaaaaaacagcaattacagggagaaatcaggcttaccgacgcgcggttaaaagaattaaaaatatcagaagagcagttggacgaatcgtttaaatcatggattggtgtttttggggaaacgggagtttttacaaaagatattttaaaaattaaggatgtgcgtacaagccacggaaatatcgccggtgtttcaattcccgtttttgaaggggcggattttgaaatagcgacttatgattttttgaaaacgccgctttggcttgatttggcggttgattgcatgaagcaggccctccttttacaaatggaaatggatattgtcgaagaacagcgcagaagacttgacaaagaactgcgcacgacaacccagcgcgtcaatctttttgaaaaaataaaaatccccgaatcaagaaacaatattaaaaagattcaagtttatttgggcgaccagcagacggcggccgtcgtgcggggcaaaatcgcgaagagcggattggcgggcaaacaatga

SEQ ID NO: 31614 - protein, 199 aa, Unknown
  Obtained from environmental sample
  DOMAIN (2)...(196): ATP synthase subunit D
  misc_feature (1)..(199): Xaa is any amino acid
MAKIKLTKNELKKQKDSLKMYRRYLPTLMLKKQQLQGEIRLTDARLKELKISEEQLDESFKSWIGVFGETGVFTKDILKIKDVRTSHGNIAGVSIPVFEGADFEIATYDFLKTPLWLDLAVDCMKQALLLQMEMDIVEEQRRRLDKELRTTTQRVNLFEKIKIPESRNNIKKIQVYLGDQQTAAVVRGKIAKSGLAGKQ

SEQ ID NO: 31615 - DNA, 933 bp, Unknown
  Obtained from environmental sample
  misc_feature (1)..(933): n is a, c, g, or t
atgatccgcacaggtattccgatgatcgatctgttcaacacattggtcgtttcgcagaaactgccgattttctccgtgtcaggcgagccgtacaacgagcttctcgctcgtatcgccatgcaggcggaagttgacgtaatcatcctcggcggaatgggcttaaagtacgacgactatcttaactttaaagatacattggaaaacgccggcgctctcgcccgtaccgtaatgtttgttcacaccgcaagcgatcctaccgttgaatgtcttatgattcccgatatgtccctcgccgtcgccgagcaatttgccttgcagggcaaagacgtacttgttcttttgaccgacatgacaaacttcgctgacgcgatgaaggaaatttcgatcattcaggaacaggttccctccaaccgcggctatcccggcgacctttacagccagcttgccagccgctatgaaaaagcggttgactttgaaacagcgggatcaattacagtcctcggcgttaccacaatgcccggcgacgacgttacccacccagtgccggataataccggatacattacggaaggtcagtattatcttaaaaacggacgcattgagccgtttggttctctttcgcgccttanacagcaggtaaacggcaagacgcgcaaagaccaccgcgcccttatggacggcatgatcaaactttactccgctttccgcgacactctggagaagaaggcaatgggctttatcatgaccccttgggacgaaaaacttttaaaatacggcgtccagtttgaaaaaagaatgatggatctttcagtcaatattccgcttgaaaaggcgttggatttaggctgggaaattttatcggattgttttaacaaagaagaaacaggcttgcgcacggaattgattaatgaattctggccaaaaaaagaatag

SEQ ID NO: 31616 - protein, 310 aa, Unknown
  Obtained from environmental sample
  DOMAIN (4)...(207): ATP synthase alpha/beta family, nucleotide-binding domain
  misc_feature (1)..(310): Xaa is any amino acid
MIRTGIPMIDLFNTLVVSQKLPIFSVSGEPYNELLARIAMQAEVDVIILGGMGLKYDDYLNFKDTLENAGALARTVMFVHTASDPTVECLMIPDMSLAVAEQFALQGKDVLVLLTDMTNFADAMKEISIIQEQVPSNRGYPGDLYSQLASRYEKAVDFETAGSITVLGVTTMPGDDVTHPVPDNTGYITEGQYYLKNGRIEPFGSLSRLXQQVNGKTRKDHRALMDGMIKLYSAFRDTLEKKAMGFIMTPWDEKLLKYGVQFEKRMMDLSVNIPLEKALDLGWEILSDCFNKEETGLRTELINEFWPKKE

SEQ ID NO: 31617 - DNA, 594 bp, Unknown
  Obtained from environmental sample
  misc_feature (1)..(594): n is a, c, g, or t
atgtgtcctgagccacaacttctatcaatttatgtagacggcgaacttccgtcgccctggaaagaaaaaatggatgaccatttaaaggaatgtccggtttgcagggaaaaattcgaaaactttaaaaaacttcgcgtattatttaacaaaaacgcgtccgcgaaaaaaataaatgaatcggacatacaggtatctaaagaaaaaatttggcgcaatatagaagcaaaacggcgctttacgccgtatccgggaatatggcggcgcaggatttccatttccataccggcggcggcggcggcggcggttattatcgcgcttattacaatgtttttttcaggcggcggaaaaattttaaataacggatttgccggcaaaaaagcaaacctagatgaaaaatcaaacatcatacttgcggcggaagaggaaatccccggaattataccgactgccacagatttaaacggcgttcttcaatatttaggcgcggacagctctgatattatcattttacggcttcctgaaagcagaaacttttcccgcgccggagaaccggcaataatcagagccgccgattattcaaggagacatccgtaa

SEQ ID NO: 31618 - protein, 197 aa, Unknown
  Obtained from environmental sample
  misc_feature (1)..(197): Xaa is any amino acid
MCPEPQLLSIYVDGELPSPWKEKMDDHLKECPVCREKFENFKKLRVLFNKNASAKKINESDIQVSKEKIWRNIEAKRRFTPYPGIWRRRISISIPAAAAAAVIIALITMFFSGGGKILNNGFAGKKANLDEKSNIILAAEEEIPGIIPTATDLNGVLQYLGADSSDIIILRLPESRNFSRAGEPAIIRAADYSRRHP

SEQ ID NO: 31619 - DNA, 705 bp, Unknown
  Obtained from environmental sample
  misc_feature (1)..(705): n is a, c, g, or t
atgcntatggcaataggcgttgtgataaaattatcgctcagtcagggcatagactactttgcaaataaagagaaggaaaaactcggtgccgccgctgaattaaggcgtattgaatctgaaaagcagttattggaattgaatttggcgcgttcccaggctgctgaaaaagcactgatagaccgcgaaaccgaacgcttggcagcagctgaaaaattgttgcaagatgcgcgtctcgcttatgaaacggctctgaacgagcggctggatgcggcacgttccgaagacgtaaggcggcttgccgcagaaacatcgcagatagaacaggaagtggcacgcctttcttcatcgcagccccagccggactttgaatttgagccttttgaaccttacgagccaacacagcctcaagaacatgaagatacagcaacaacagtgacaactccgcacagaagcggggagtgggttgttcaagttgcggttgtgctgcaaaagtcaagggctggcgcaatagtgaattctttgaagagaaaaggctttgacgcttattccgttcaggtcaccaacccgggcaaactaaaaggtacttattaccgcgtgcgtgtgggctttttcggcaaaatgaaggatgcttccgactttgccaaagcaaatctaagcacatacaaagactggtggctggacaagactgataacgattctaagtaa

SEQ ID NO: 31620 - protein, 234 aa, Unknown
  Obtained from environmental sample
  misc_feature (1)..(234): Xaa is any amino acid
MXMAIGVVIKLSLSQGIDYFANKEKEKLGAAAELRRIESEKQLLELNLARSQAAEKALIDRETERLAAAEKLLQDARLAYETALNERLDAARSEDVRRLAAETSQIEQEVARLSSSQPQPDFEFEPFEPYEPTQPQEHEDTATTVTTPHRSGEWVVQVAVVLQKSRAGAIVNSLKRKGFDAYSVQVTNPGKLKGTYYRVRVGFFGKMKDASDFAKANLSTYKDWWLDKTDNDSK

SEQ ID NO: 31621 - DNA, 831 bp, Unknown
  Obtained from environmental sample
  misc_feature (1)..(831): n is a, c, g, or t
atgtcgctggatagaacagtaagcacagggatgcccggtttagaccaggccattgacatgctcaggcttggggataatgttgtgtggcaggtacagtccattgaggattacctcaaagtcttggggccgtatatcaggcaggcccaaaaggatgagcgcaggcttgtgtattttcggtttggcaaccacgcgcccttaatggcggataccgaaccgtctgtgatttatcatcttgacacttccgaaggttttgagttatttgccctgaaagtccatgacataatagcccgcgaaggcctgaaggctttttatgtatttgactgcctgagcgacttgctcgaaagctggtgttccgacatgatggtgggcaattttttccgcataacctgtccctttctgtttattcttgatactctcgcttattttgcccttatccggggcgcgcacacccacgatacgattgcccgcatacgggaaaccacccagttgctaatggatgtgtacaacgttgacgataaattttatattcatccgcttaaagtgtgggaacggtattcgcccacgatgtttttcccgcatttgattgacggcgacaaggccgtttcaattacctcaagcgccgatgcggcgactttgttttcgcgggtcagccggggcggacagcccagggatcactggcacatcacgtttgatcatgcgcgttcatatttaacccgcgacgaaaagtcccaggaggagatgaaaaagctgcttatcggctggattatcgggaaaagagttacggataacaagcctcattgtcaagtatttttcgctgatagatattcttga

SEQ ID NO: 31622 - protein, 276 aa, Unknown
  Obtained from environmental sample
  misc_feature (1)..(276): Xaa is any amino acid
MSLDRTVSTGMPGLDQAIDMLRLGDNVVWQVQSIEDYLKVLGPYIRQAQKDERRLVYFRFGNHAPLMADTEPSVIYHLDTSEGFELFALKVHDIIAREGLKAFYVFDCLSDLLESWCSDMMVGNFFRITCPFLFILDTLAYFALIRGAHTHDTIARIRETTQLLMDVYNVDDKFYIHPLKVWERYSPTMFFPHLIDGDKAVSITSSADAATLFSRVSRGGQPRDHWHITFDHARSYLTRDEKSQEEMKKLLIGWIIGKRVTDNKPHCQVFFADRYS

SEQ ID NO: 31623 - DNA, 552 bp, Unknown
  Obtained from environmental sample
  misc_feature (1)..(552): n is a, c, g, or t
atgtctggctgctgtatgcggccggatcatgttatagggagatgttatatgaacaatctcaacagcattcttatcgaggggaacatggtgcgcgaaccgcagtaccgcaccactcccaaggggacgtcggtctgcaccttcagcctggcttccaaccgtttcttcagacaggacaacggctatgaaagggaagtgtccttctttgatgttgaaacctgggccaagctcgcggatacctgtaacaacatgggcaagaaggggcgcggcgtaagagtggtaggccgtctgaaacaggacaggtggacaggtaccgacggcaagccccgctcgcgcatttccattgtcgcggagcatgttgaattccgacctgaattcaaaaaagaggcagccgctgaaaaggccagagattccgtttacggcgacaatcttgccgatgaagccgccgaacccgcaggagtggcgcaggactatgacgaaacgccggtaatgacggagtacgaggacagatccccgtcactggtattggaggaggttgccgagacggtgttctaa

SEQ ID NO: 31624 - protein, 183 aa, Unknown
  Obtained from environmental sample
  DOMAIN (20)...(122): Single-strand binding protein family
  misc_feature (1)..(183): Xaa is any amino acid
MSGCCMRPDHVIGRCYMNNLNSILIEGNMVREPQYRTTPKGTSVCTFSLASNRFFRQDNGYEREVSFFDVETWAKLADTCNNMGKKGRGVRVVGRLKQDRWTGTDGKPRSRISIVAEHVEFRPEFKKEAAAEKARDSVYGDNLADEAAEPAGVAQDYDETPVMTEYEDRSPSLVLEEVAETVF

SEQ ID NO: 31625 - DNA, 393 bp, Unknown
  Obtained from environmental sample
  misc_feature (1)..(393): n is a, c, g, or t
atggcgagctgcgcccgcttgcataaccacagctacgcaagtggaaatgtcacaggcagtagcaatggctatggctacggctacggcggaggtcttgtgggtgctgctaccacacttgcaataaccaacagctacgctagcggaaacgccagcggcagtggtagtgttagctacagctacggcggcagcggaggtctcgtgggtcgtgccaacacaagcaccatagctactagctacgcaagcggaactatatctggtggaaccaaggtggcatattcggcaggtatgcaagcggaacgaacacgtatgtgtattacaataatgagggtgcaagtacggcagcaggttcaggttcaccgacagggattttggctgcgtccagcgcaatgctga

SEQ ID NO: 31626 - protein, 130 aa, Unknown
  Obtained from environmental sample
  misc_feature (1)..(130): Xaa is any amino acid
MASCARLHNHSYASGNVTGSSNGYGYGYGGGLVGAATTLAITNSYASGNASGSGSVSYSYGGSGGLVGRANTSTIATSYASGTISGGTKVAYSAGMQAERTRMCITIMRVQVRQQVQVHRQGFWLRPAQC

SEQ ID NO: 31627 - DNA, 858 bp, Unknown
  Obtained from environmental sample
  misc_feature (1)..(858): n is a, c, g, or t
atggaccatattgtgcagacaaatgaaattgtgtcctacggcaagcgtattacggagcagtacaaggcggttaacaggtcggtacacgaggccagcaccattatccgcgttggcggagctgtcgtcggcgaggggcattttaccgtcatttcgggaccttgttcggtggaaagcaatgaacagatttccgagattgcccgcagtgtgaaagaaagcggggcgaaaatccttcgcggcggggcgtttaaaccaaggacctcgccttacgcttttcagggcaggcaggaggaagggcttgaaatgctgtgcgccgcgaaaaaagaaaccggccttcccgttgtctccgaaattatgaaccagacgcagattgatctttttgaggatatagacattgtgcaagtgggcgcgaggaatatgcagaactttgatttgctgaaagccgtcggcgctctgaaaaaaccggtcttattgaaacgcggacttgccaatacaatagaagaacttttgatgagcgccgaatatattgtttccgccggaaacagtcaggttattctgtgcgagcgcggcatacgcacattcgagaccatgacgcgcaatactctggacttgtccgccgtcgttattttgaaacaaaagtcgcatctgcccgttatcgccgatccaagccacgcgtccggaataaggagccttgtcgcccccctcgcgaaagctgcgcttgccgtcngagcggacgggttactgatagagacgcacaacgatcccgccaacgcgctgtgcgacggcgagcagagcgtgacggaggcgcagctggcggacattaagaataaggcggacgcgattaagaatttgtttaattga

SEQ ID NO: 31628 - protein, 285 aa, Unknown
  Obtained from environmental sample
  DOMAIN (32)...(285): DAHP synthetase I family
  misc_feature (1)..(285): Xaa is any amino acid
MDHIVQTNEIVSYGKRITEQYKAVNRSVHEASTIIRVGGAVVGEGHFTVISGPCSVESNEQISEIARSVKESGAKILRGGAFKPRTSPYAFQGRQEEGLEMLCAAKKETGLPVVSEIMNQTQIDLFEDIDIVQVGARNMQNFDLLKAVGALKKPVLLKRGLANTIEELLMSAEYIVSAGNSQVILCERGIRTFETMTRNTLDLSAVVILKQKSHLPVIADPSHASGIRSLVAPLAKAALAVXADGLLIETHNDPANALCDGEQSVTEAQLADIKNKADAIKNLFN

SEQ ID NO: 31629 - DNA, 879 bp, Unknown
  Obtained from environmental sample
  misc_feature (1)..(879): n is a, c, g, or t
gtggagaacgttccggaaaacgccgactgcgaaaaggcgattcgggatcttatcgaccagggctgcaacgtgatctacaccaacagctttggctttatggactggaccttgaaagtcgccggcgactttcccaacgtgtatttcgggcattgttccggctacaagagggcggacaatatgtccacctatttcggtaaagtataccaggcgcgttacctttccgggattgcggccggttacaagaccaaagtgaacaaaatcggttatgtcgccgccttcccgatccccgaggttatccgggggatcaacgcgttcaccctcggcgttcagtcggtgaaccctaacgcgacagtggaagttatttggaccagcacctggtatgacccggctgtcgagaaacagggggccattgagcttcttaacaagggctgcgacgtaatagcccagcaccaggataccacggcgccgcagattgccgcccaggaaaggggggccttcgccgtcggctacaacgtgcccactccggacgccgcgcccaaggcatacctgaccgcgcccctgttccactgggaagtgttctatgtggatgacgtaaaccaggttatcaacggcacatggaaatcacgcgcctattgggaaggcttcagncacggtactgtcacgctggacgaccttaccgccaataacgatccccgcgctgccgccgagattgataaagccagagacggcataaaagcgggcacattggagccctttaccggccccttaagcgatcagagcggcgcggtaaaagttcccgccggcacaaaaatgaccgatgatgaaatctggaacatgggctggtttgtaaaaggcgttatcggcgtcattcccagttga

SEQ ID NO: 31630 - protein, 292 aa, Unknown
  Obtained from environmental sample
  DOMAIN (1)...(250): Basic membrane protein
  misc_feature (1)..(292): Xaa is any amino acid
MENVPENADCEKAIRDLIDQGCNVIYTNSFGFMDWTLKVAGDFPNVYFGHCSGYKRADNMSTYFGKVYQARYLSGIAAGYKTKVNKIGYVAAFPIPEVIRGINAFTLGVQSVNPNATVEVIWTSTWYDPAVEKQGAIELLNKGCDVIAQHQDTTAPQIAAQERGAFAVGYNVPTPDAAPKAYLTAPLFHWEVFYVDDVNQVINGTWKSRAYWEGFXHGTVTLDDLTANNDPRAAAEIDKARDGIKAGTLEPFTGPLSDQSGAVKVPAGTKMTDDEIWNMGWFVKGVIGVIPS

SEQ ID NO: 31631 - DNA, 888 bp, Unknown
  Obtained from environmental sample
  misc_feature (1)..(888): n is a, c, g, or t
atgaagttctggggcgttctcttggaaaatttggaaatgccccacgccgtaggcaaagccccgaggggggcctcgcaggaagacagaaccgagctgctgcggcagctgcaagccatggtgcgcgacgcctgcgccgccatcccggacgaccagtccatagagttcttagacacgaacgtcagcggcagcaccgacgcctacgagcgtttcgccgcgtaccacgacggcgaaatctccaccgccatcctcggccacagcgccggggccacggccaccccgggacggctcggcggcgacgacatggccataagggtcagggacgacatagtcgataacgacgcggctatggtcgccgacacgatgaacaccttgataaggtacatccacgagctcaatccgtcgctcggagagaaaaggccggagttcatcctctacgatcctaaagatatagacaaagccagggcggagcgggattccatgctgctgaatacggggaaggtcaggctgaccaagaagtatttcgtggacaactacgacttcggggacgaggatatcgaggttgtggaggacgcggcgcaaccggttcaagcggagttcgcgagtacgccgacagaggcgacggcagcgggggcaagaggcggctcgatgttgcgagcggcggaaacgtcaagagagcccgacgcggaaagcccccggcctgccgatttttccgcaacggataacgtaggggcggccccgcgcggccgcccgaccgttgaattatccgcgaacgagttccaagaggccgtggacgttttggccgaaggccttcaggacgacgccgttcaaacgcaggttgaagggctgttaaaacccgttttagagctcgtaacaacgcctcgaatttga

SEQ ID NO: 31632 - protein, 295 aa, Unknown
  Obtained from environmental sample
  misc_feature (1)..(295): Xaa is any amino acid
MKFWGVLLENLEMPHAVGKAPRGASQEDRTELLRQLQAMVRDACAAIPDDQSIEFLDTNVSGSTDAYERFAAYHDGEISTAILGHSAGATATPGRLGGDDMAIRVRDDIVDNDAAMVADTMNTLIRYIHELNPSLGEKRPEFILYDPKDIDKARAERDSMLLNTGKVRLTKKYFVDNYDFGDEDIEVVEDAAQPVQAEFASTPTEATAAGARGGSMLRAAETSREPDAESPRPADFSATDNVGAAPRGRPTVELSANEFQEAVDVLAEGLQDDAVQTQVEGLLKPVLELVTTPRI

SEQ ID NO: 31633 - DNA, 978 bp, Unknown
  Obtained from environmental sample
  misc_feature (1)..(978): n is a, c, g, or t
gtgaaagcggctattgtggggcttgggcgcatcgccagcctgcttgaggaagacagcttaagggaaaaaccctgcacccacgccggcgcgataactgccaacgcggactgcgagcttgttgccggctgcgacattgacgaagaacgcagacgcctgttcgcgcaaaaatggcaggttccggtatacgcggacgcggcggaaatgctccgtgtccataagccgcagattctgacgattgccaccccacctgacagccattaccgttactgcccgctttgcgcggattccggcgttcaggcggtgatctgcgaaaaacccctggccggtaatataagagaagcgcgaaaaataacgcggctcgcggaaaacggccctgtcatcattacaaatcacgagcggcgctatgcggaagattacatccgcgcaaagacaattcttaacagcggaaaacttggcgtgcttttaagcgcgcgggctgtcatctatatgggcataacacagcggctcctcgatgtactctggcatgacggcacccatcttgcagacgcgattatgtttcttacaggcatgaacctgaaacacaaaaaatgccggggttcaaaacttacagctaacgcgggaacggcatggctggaagcagaactggcaaaagaaaaaaaacatattccggtggttattgaaatcggcgccggcagggatcatcttgtttttgaaatggaattttcctgcgagaaaggccggctgcgcattggcaatggggtttttgaggtttgggaaagcgtcccaagcctctacgcggaaaaattccgttctttaaggaagactgatgaaacattcagcgggccgaccggttactttgccaacatggtaaaagacgcagtcgcctgcgcgggggaaccgggcaaaatgccccgctcaagcgccgccgatggactgcgggttatagaataccttaactcgataaaggcctggcggtaa

SEQ ID NO: 31634 - protein, 325 aa, Unknown
  Obtained from environmental sample
  DOMAIN (1)...(131): Oxidoreductase family, NAD-binding Rossmann fold
  misc_feature (1)..(325): Xaa is any amino acid
MKAAIVGLGRIASLLEEDSLREKPCTHAGAITANADCELVAGCDIDEERRRLFAQKWQVPVYADAAEMLRVHKPQILTIATPPDSHYRYCPLCADSGVQAVICEKPLAGNIREARKITRLAENGPVIITNHERRYAEDYIRAKTILNSGKLGVLLSARAVIYMGITQRLLDVLWHDGTHLADAIMFLTGMNLKHKKCRGSKLTANAGTAWLEAELAKEKKHIPVVIEIGAGRDHLVFEMEFSCEKGRLRIGNGVFEVWESVPSLYAEKFRSLRKTDETFSGPTGYFANMVKDAVACAGEPGKMPRSSAADGLRVIEYLNSIKAWR

SEQ ID NO: 31635 - DNA, 597 bp, Unknown
  Obtained from environmental sample
  misc_feature (1)..(597): n is a, c, g, or t
atgaaacaagagtgttctttcaggcagtggctctcaatctattatgacggggagatggactctccgtggaaagaaaaaatggaggctcatatcgccggctgtcccgactgcgcgaagcaattggccgcgtttaaaaacatttcccttacgcttgcccccgcggaagatgaactcccggatgaagcgcggcagcgggtactgcaaaaactggaaacatccggccatttctccggtcatggggatcgtccggcctgggctccttccctatggaagcgcagtgtttccatacctctcccggcggcggcggcggctgttctcatgctcatcggccttgccttcctctggataaggtcgccgggaagtctgcaaaaaacggaagccgttaatatggccataaccgccgaaaccgagattctgccggatgttatcccgttttcaggaatggaaagcgttttgcagtacctcggcagcacggactcaggcgagataataatactcaaactgcctgaaacccgtaatttcgccagttacggcgaaccgtcaataatcaaagccgccgactatacccgctatgcaccaaaggggagaaaacaatag

SEQ ID NO: 31636 - protein, 198 aa, Unknown
  Obtained from environmental sample
  misc_feature (1)..(198): Xaa is any amino acid
MKQECSFRQWLSIYYDGEMDSPWKEKMEAHIAGCPDCAKQLAAFKNISLTLAPAEDELPDEARQRVLQKLETSGHFSGHGDRPAWAPSLWKRSVSIPLPAAAAAVLMLIGLAFLWIRSPGSLQKTEAVNMAITAETEILPDVIPFSGMESVLQYLGSTDSGEIIILKLPETRNFASYGEPSIIKAADYTRYAPKGRKQ

SEQ ID NO: 31637 - DNA, 621 bp, Unknown
  Obtained from environmental sample
  misc_feature (1)..(621): n is a, c, g, or t
ttgccgattgatattgatgacgcgtggctgcaaagtatcaggaaagacctgccggaactggcgtatcagaaacgcgagcgctactgccatgatttcggcatacctgaatccgaggcagcggttcttaccgtccataaaaacatctgcgatctgttcgagactatcgcgcggcaaagcggacagcccgttgaagcggcgcacctcttaaccggagaaatcatgcggctgatgaacaacgccaatgttttgcctgaagatctggttatagacgcggttaaactttcaacgctcattacccttgtcgcgaacgggaaaatcaaccggaacgcttataaggaaacaatcgaggcggtattcacgcgcaatgtcgatcctgaacgctatatcaccgaaaaaggattagccatgatcaacgatgataacgcggtcatcgaagcggtaaaatcggttataactgaaaatcaggactcggtcgcggattaccgcgcgggcaaggaaaaagtgttcgcctttttaatggggcaggttatgaaaaaactgggcggaaaaggaaatcccgacatggtgaagaagacattaacagaaacgcttaaaggggttagtactaccgcgttgcggtag

SEQ ID NO: 31638 - protein, 206 aa, Unknown
  Obtained from environmental sample
  DOMAIN (1)...(48): PET112 family, C terminal region
  misc_feature (1)..(206): Xaa is any amino acid
MPIDIDDAWLQSIRKDLPELAYQKRERYCHDFGIPESEAAVLTVHKNICDLFETIARQSGQPVEAAHLLTGEIMRLMNNANVLPEDLVIDAVKLSTLITLVANGKINRNAYKETIEAVFTRNVDPERYITEKGLAMINDDNAVIEAVKSVITENQDSVADYRAGKEKVFAFLMGQVMKKLGGKGNPDMVKKTLTETLKGVSTTALR

SEQ ID NO: 31639 - DNA, 984 bp, Unknown
  Obtained from environmental sample
  misc_feature (1)..(984): n is a, c, g, or t
ttgacggctttgggcgcgtctggcattaccgaagtggacataaacaaggcgtcttcgcggatgctgtatagcctgacgaatttacagaataaagaatacaaggaatactacaatccccttaaaatcgcaaacgccatttttgtagggaccaatgtaacccttaaaaaagattttgcccaaacgtttatggattattacaggggaaacagcataaatgtagacttttcttcccgcgatgcggtggacgctgtgaaccgctgggcaagcgagaacacaaacggtttgatcaaaaacctgatacagaaatttgatccgctgacagttgccgccattgccaacgcgatttatttttccgacaggtggtcatgggaatttaatgccagtgaaacaaaagaggggttattccacgcaccgggactcgatacgacagcgtctttcatgaagcgcgaaggcgacgcgcaaacttactatgaggactcaaaggtgcaggccatgccgttaagctttaagaccggcggcggtttgtacatcatcctgcccaaaaccggcggagcggcgcaattgctttcctccatgacaaataattattttagcaaaatacagagggattccgtacaggccactggcaagttgctattgccgcgtttctccatagaaagcaagattgacgatctggcggaagcgcttgtggcattaggcgttcctttgtttgacgaggcagccgcgccgcttacaggcggcttaatcgaggaaggtttgcgcgcatggttgtcggacgctatccaaaaggccgttattaaagtcgacgagaagggtacgactgccgcagccgtaactgtaatgggagttgcagctacgtcaatgcccatacctacaaagccttttgaaatgatctgcgacaagccgtttgtgttcatactgtacgaaaatacttatgacggaggcagtcaaatcctgtttaccggaatcgtaaataaaccctaa

SEQ ID NO: 31640 - protein, 327 aa, Unknown
  Obtained from environmental sample
  DOMAIN (1)...(327): Serpin (serine protease inhibitor)
  misc_feature (1)..(327): Xaa is any amino acid
MTALGASGITEVDINKASSRMLYSLTNLQNKEYKEYYNPLKIANAIFVGTNVTLKKDFAQTFMDYYRGNSINVDFSSRDAVDAVNRWASENTNGLIKNLIQKFDPLTVAAIANAIYFSDRWSWEFNASETKEGLFHAPGLDTTASFMKREGDAQTYYEDSKVQAMPLSFKTGGGLYIILPKTGGAAQLLSSMTNNYFSKIQRDSVQATGKLLLPRFSIESKIDDLAEALVALGVPLFDEAAAPLTGGLIEEGLRAWLSDAIQKAVIKVDEKGTTAAAVTVMGVAATSMPIPTKPFEMICDKPFVFILYENTYDGGSQILFTGIVNKP

SEQ ID NO: 31641 - DNA, 1575 bp, Unknown
  Obtained from environmental sample
  misc_feature (1)..(1575): n is a, c, g, or t
gtggcaatggacgaattccattattatagcgacaaagaaagaggtgtagcttggcaaattccactgctcacaatgaagcacactcaattccttttaatatccgcaacgctcggcgacacctcgttttttgaaaccgaaatgacaaagttaaacggtttgcaaagtgtgtgcataagaaatgcagagcgacctgttcccttggaattcacgtattccgaaagcccactcgcaaatgaaattcaaaagctgctgaacgagggcaaaggtcccgtttatgtggtgcatttcacgcaaagcgaagcggcagaaaacgcacaggctttcacaagtttagacattgctggcttgctcaaaaaagataaaatagcagaagcaatggcaaatttcagattttccagtccctttggagcagacataaaaagatggttaaggcagggaattgggcttcatcacgcaggattgctcccgaaatacagaatattgacggaaaaaatggcacagcaaggattgctccccattatctgcggaacagacacccttggcgttggtgttaatgttccaattcgcaccgtgcttttcacaaaactcagcaaattcaacggcgaaaaaacaactatgctgcccgtgcgggattttcatcagatcgcagggcgcgcagggcggcgaggctttgattccgtgggttatgtggttgtgcaggcaccagagcacgttatagaaaacaaattgagagaagcgaaattcagcaaaacaggacgcaaatttcaaaaagcaagcccaccagaaggctctataagctgggacaaaacaaattttgaaaagttaataaatggagaaccggaaagattggtttcgaggtttgcagtggatgcaaatataattttgcaaacaagcggatgcagaaatttgcacaacctcataatgaattgccacgatacaaaagagcaaaaaaaagttcatataagaagagccattcaaatataccgctctctcatcgctcagggaataatagtaaatgggaaacccgctgtgaatttgagcgaccgctttgccatgcaccaacccctttccctttggctgttggaaagcattgaaaaaatcgcagacttaaacgccctaaccctgctaaccctcatagaagcaattttggaagaagcggaaatggtacgccgcaaacaactttcaaggctaaaaaccgaagccatttctgaaatgaaagcacagggagttgaatttgaggagaggcaagcaaggctagaagaaatgcgaccgccagagccggaaaatgcggagtggctggaagcgagttttggcgaattcgcaaaaaaacacccctgggtatgcggcgagcgagttcatccgcaaaccattgttttggaaatgttcgctgaatgtttttctttttcgggctatataaagcaatacgggttggagcgaatagagggcttattgcttcgccacataaacagcgtgtataaagttttggcacacaccgttccagaaaaatacaagaacgaagaaatttggaaatgcaagattacctgcgtctcgtgccgaattctgaccctcgggtaa

SEQ ID NO: 31642 - protein, 524 aa, Unknown
  Obtained from environmental sample
  DOMAIN (142)...(223): Helicase conserved C-terminal domain
  misc_feature (1)..(524): Xaa is any amino acid
MAMDEFHYYSDKERGVAWQIPLLTMKHTQFLLISATLGDTSFFETEMTKLNGLQSVCIRNAERPVPLEFTYSESPLANEIQKLLNEGKGPVYVVHFTQSEAAENAQAFTSLDIAGLLKKDKIAEAMANFRFSSPFGADIKRWLRQGIGLHHAGLLPKYRILTEKMAQQGLLPIICGTDTLGVGVNVPIRTVLFTKLSKFNGEKTTMLPVRDFHQIAGRAGRRGFDSVGYVVVQAPEHVIENKLREAKFSKTGRKFQKASPPEGSISWDKTNFEKLINGEPERLVSRFAVDANIILQTSGCRNLHNLIMNCHDTKEQKKVHIRRAIQIYRSLIAQGIIVNGKPAVNLSDRFAMHQPLSLWLLESIEKIADLNALTLLTLIEAILEEAEMVRRKQLSRLKTEAISEMKAQGVEFEERQARLEEMRPPEPENAEWLEASFGEFAKKHPWVCGERVHPQTIVLEMFAECFSFSGYIKQYGLERIEGLLLRHINSVYKVLAHTVPEKYKNEEIWKCKITCVSCRILTLG

SEQ ID NO: 31643 - DNA, 720 bp, Unknown
  Obtained from environmental sample
  misc_feature (1)..(720): n is a, c, g, or t
atgagcgatgtgagccagggaaaagaactctacgagggaaaagcaaaaaaagtatttgccacggataaagacgatctggttatcattcattacaaggatgacgccaccgcatttaacggcgaaaaaaaagggcagattgaagacaaaggggtaatgaacaacaaaattgcctcagggatgtttgaattactgggacagtcgggcgttcccactcattttgttaaacagctcaatgaccgtgatatgctctgtaaaaaagtaaaaatcgtgccgctggaagtaattgtccgcaatatcgccgccggttcaatggcaaaacggctcggccttaccgaagggacggaacttaaaaccacggtttttgaactttcctataaagatgacaatttgggcgatccccttatcaatgattatcacgccgtcgccatcggggcgtctacttttgaagaaatcgaaaaaatcaaaaaaattacttttaaggtcaatgaagttttgagcgcctttttcctgcagcggggaatacggcttatcgactttaaacttgaattcggcaaaactaccggaacaaacgaacttgttctggcggatgaaatttcccccgatacctgccgtttctgggacgcanagacaggcgaaaaactggacaaggaccgcttccgccgggatttgggaaatgtaaaagaagcatacattgaaattctaaaccgtattgggaaatag

SEQ ID NO: 31644 - protein, 239 aa, Unknown
  Obtained from environmental sample
  DOMAIN (6)...(239): SAICAR synthetase
  misc_feature (1)..(239): Xaa is any amino acid
MSDVSQGKELYEGKAKKVFATDKDDLVIIHYKDDATAFNGEKKGQIEDKGVMNNKIASGMFELLGQSGVPTHFVKQLNDRDMLCKKVKIVPLEVIVRNIAAGSMAKRLGLTEGTELKTTVFELSYKDDNLGDPLINDYHAVAIGASTFEEIEKIKKITFKVNEVLSAFFLQRGIRLIDFKLEFGKTTGTNELVLADEISPDTCRFWDAXTGEKLDKDRFRRDLGNVKEAYIEILNRIGK

SEQ ID NO: 31645 - DNA, 744 bp, Unknown
  Obtained from environmental sample
  misc_feature (1)..(744): n is a, c, g, or t
gtggtgataataaacgncgagcaggtgctttcgtttacttttagcgaaaaaaccaggcgggcggtttgttcctttgagtacgtttactttgcccgtcccgacagcgttattgacggcattgacgtatacagcgcccgaatccgcgcgggagaaattctcggcaaagaatccgcagtcgcggcggatcttgtaattggtgttcccgattcgggtgttccggccgctattggttacggcagggcaaccagtacttcttttggcatgggcattgtaaagaacaaatacattggccgcacctttatcgctccggggcagatagaacgggaaagggccgtttcacttaaacattttgccatacgcagcgaagtaaacgacaaacgaattgtgcttattgacgactcaatcgttcgcggaaccaccagccgccatctggtctcgctcttgcggggcgccggcgcacgggaagtacatatccgcatttgttcgccgccggttcgtttcccctgttactttggcattgacacgccccaccgcaaagacctgatcagcaacggcaacagcgccgaagaattgtgcaaatccctgggcgcggacagccttgcctttatcagcgtaaagggcctgcttgaatcaatagacgtatcctgcgacgcgggtaatcccgccaactgcggttactgcctcggctgctttaccggcgagtacccaattgcggttgcgtataaaaacagtgaaaccgcatag

SEQ ID NO: 31646 - protein, 247 aa, Unknown
  Obtained from environmental sample
  DOMAIN (34)...(176): Phosphoribosyl transferase domain
  misc_feature (1)..(247): Xaa is any amino acid
MVIINXEQVLSFTFSEKTRRAVCSFEYVYFARPDSVIDGIDVYSARIRAGEILGKESAVAADLVIGVPDSGVPAAIGYGRATSTSFGMGIVKNKYIGRTFIAPGQIERERAVSLKHFAIRSEVNDKRIVLIDDSIVRGTTSRHLVSLLRGAGAREVHIRICSPPVRFPCYFGIDTPHRKDLISNGNSAEELCKSLGADSLAFISVKGLLESIDVSCDAGNPANCGYCLGCFTGEYPIAVAYKNSETA

SEQ ID NO: 31647 - DNA, 981 bp, Unknown
  Obtained from environmental sample
  misc_feature (1)..(981): n is a, c, g, or t
ttgccaaataaaagccatcaaatattcaaaaatctctttgtcttggaaatggccaacaaccattggggcgaccggcaaagagggcttgagatcatccgtgaattcggggccatagtgcgctacaacagcgtccgggcggccataaagctgcaaatcagggatgtggacagttttatccaccctgaatacaagggcaacggggatttgcgctatatcagtaaaaccgaagccaccaggttatctttcgatgattacgccatcttggttgaagccataaaaaatgtttcctgtctgcccatggccacgccttttgatgagaaatccgtcgagacctgccttaagctggaactccccttgctcaaaatcgccagttccgacctgaacgattggccgttattggaaaaaatagcctcgaccaggctgccggtcgccttttcgaccggcggcggcacggaaaaggatattgacgatgtggtgagtttttttgagcgccgcgacatacccttggccatcaatcactgcgtttccctttatccctcggaaaattaccaacttgaattgaaccagatcgactatctgcgccgcagataccccggccatgtcatcggtttttccacccacgaatatcaggattggcgggcttccatgttcatttcctatggcaagggggccagaacctgggagcggcatattgatataccgtatgctgacggccgggctatgagcccctactgctcttcacccgagcaaatagatgaatggttcaaagcctggcgcctggcccacgagatgtgcggcggttcaggcgaggagcggcgcgtatgccccactgaagaaacggcttatctcaatgccttggtgcggggcgtctatgcgcggagggatttggaagccggctacgtcttttccaccagacttttgcccatgatttttacatggccgtgcctcttcataanggccagctttcctgccgggaagtga

SEQ ID NO: 31648 - protein, 326 aa, Unknown
  Obtained from environmental sample
  DOMAIN (41)...(270): NeuB family
  misc_feature (1)..(326): Xaa is any amino acid
MPNKSHQIFKNLFVLEMANNHWGDRQRGLEIIREFGAIVRYNSVRAAIKLQIRDVDSFIHPEYKGNGDLRYISKTEATRLSFDDYAILVEAIKNVSCLPMATPFDEKSVETCLKLELPLLKIASSDLNDWPLLEKIASTRLPVAFSTGGGTEKDIDDVVSFFERRDIPLAINHCVSLYPSENYQLELNQIDYLRRRYPGHVIGFSTHEYQDWRASMFISYGKGARTWERHIDIPYADGRAMSPYCSSPEQIDEWFKAWRLAHEMCGGSGEERRVCPTEETAYLNALVRGVYARRDLEAGYVFSTRLLPMIFTWPCLFIXASFPAGK

SEQ ID NO: 31649 - DNA, 1065 bp, Unknown
  Obtained from environmental sample
  misc_feature (1)..(1065): n is a, c, g, or t
atgcgcctcaaagataatttaattcttgatgacgaaggcaggaccctgattctccgtggggtaaatcttggcggcgactctaaaattccatataccgcgccgggcggcgaaatctcccccgattttctggacagaaaaaaagaagtctcatttgtcggcaggcccttcccccttgaagaagcggaaacccattttcgccgcttaagaaaagcgggaatgacttttctgcgtttccttgttacatgggaggcagtcgagcatgaggggccgggaatttatgacgaagcgtatttggcttacctgcgaaaaattctgcaagccgcggaacaagaaggcataaacgtctttatcgatcctcatcaggacgtgtggagcaggtggacgggcggggacggcgccccggcgtggacaatggaaaggcttggttttgacttggacctgctcgaccgctgcggagcggcgattacaaaacaacgttacaccgtttaccacaataagccctacccaaagatggtttggccgggtaactacaaccgctatgccgccgcgaccatgttcagtttatttttcgccggaaatacttacgcgccggatttgcgcatagacggcgaaaatatacaggaatggctgcagggccgctacatcgccgccttcaaacacgtccggcggcgcttgaaaaactgcgctaacataacaggctggggttccatgaatgagcctcactttggctttatcgggcagaaagacctaaacgcggcggaagatccaatgataccgattggactgcgccccactccgtggcttacaatccgcgccgcttccggctatcaggttgaagtgcccgtgtacagcatgatctccttcggcaaacgcatttcgcgttatgaaacatttaacgccgaanaaatctcgcttttcaaggaagggttttcctgcccgtggaaacaggcgggagtttgggataacgagggcggagagccgaaactgcttaaagcaatcacttcagcctgtatcaaaaccgtcccgccgcctttgcagacgatttttttaagcccttcatcataa

SEQ ID NO: 31650 - protein, 354 aa, Unknown
  Obtained from environmental sample
  misc_feature (1)..(354): Xaa is any amino acid
MRLKDNLILDDEGRTLILRGVNLGGDSKIPYTAPGGEISPDFLDRKKEVSFVGRPFPLEEAETHFRRLRKAGMTFLRFLVTWEAVEHEGPGIYDEAYLAYLRKILQAAEQEGINVFIDPHQDVWSRWTGGDGAPAWTMERLGFDLDLLDRCGAAITKQRYTVYHNKPYPKMVWPGNYNRYAAATMFSLFFAGNTYAPDLRIDGENIQEWLQGRYIAAFKHVRRRLKNCANITGWGSMNEPHFGFIGQKDLNAAEDPMIPIGLRPTPWLTIRAASGYQVEVPVYSMISFGKRISRYETFNAEXISLFKEGFSCPWKQAGVWDNEGGEPKLLKAITSACIKTVPPPLQTIFLSPSS

SEQ ID NO: 31651 - DNA, 645 bp, Unknown
  Obtained from environmental sample
  misc_feature (1)..(645): n is a, c, g, or t
atgttagtatcaaatatcatgaccaggaatccggtttttatacatcctgaactctcgctgagcgaagcgcgtttgataatggacaagcaaagaatcggccacctgccggtgctcaataaaaacaatgttcttgtgggccttatcaccaggatcgatttagtgaaagcagccccatcgtcagcgaccagccttgatatgtacgagatcagctacctgctttcaagaatcaccgtggaaaagataatggaaaaaacggtggtcatcgttcatgaaaacgaagttgtggaagaggcggcgaggatcatggcggatcagggaattggctgtctgcctgtgatgaacggttcccttttgaccggcattatcacagacaccgacattttccatttttttattaacgcttatggggcacgccacaagggcatacggataacgattaatttcaaggaaaaacgcggccagtttgcggcatttgccggcgcggtagcggaaaggggaggcaatatcgtcgctgttgttacctccgagggcgatgatgttgcccaccgtcgcgcaaccattaaaattaccgacatcagccgcactgttgtggaggaaatttccgctacattggacggcgcggaaattgaggacattcgtgagtaa

SEQ ID NO: 31652 - protein, 214 aa, Unknown
  Obtained from environmental sample
  DOMAIN (5)...(132): CBS domain pair
  misc_feature (1)..(214): Xaa is any amino acid
MLVSNIMTRNPVFIHPELSLSEARLIMDKQRIGHLPVLNKNNVLVGLITRIDLVKAAPSSATSLDMYEISYLLSRITVEKIMEKTVVIVHENEVVEEAARIMADQGIGCLPVMNGSLLTGIITDTDIFHFFINAYGARHKGIRITINFKEKRGQFAAFAGAVAERGGNIVAVVTSEGDDVAHRRATIKITDISRTVVEEISATLDGAEIEDIRE

SEQ ID NO: 31653 - DNA, 696 bp, Unknown
  Obtained from environmental sample
  misc_feature (1)..(696): n is a, c, g, or t
ttggaacggaggcagccattgcctaatctcctgctgaaagttgaaaatcttattgtcaattatggggcaatacgcgccctgaggagtatctcatttgaagtgagcgaaggtgaaataatcactctgattggggcaaacggcgcgggaaaaagcacaacgcttcacgcgatttccaacattataaagaaaacttccggtatggtgatgttcgatcagcgggatataagctctattccgccggacagcattgtcgcttccggcctggtgcaggttccggaaggccggcgtatctttgccaatctcagcgtccgtgataatctggaaatgggcgcgtattcacggcgctctgttaccaaagccgaaaaacaggctataaaaacagatatggaaaaagtgtttaatgtttttcccaggttaaaagaacgcatacgccaggttgcgggaacgctttcaggcggcgaacagcagatgctggctatgggacgagcgctgatggcaagtccccgtctgctgctccttgatgagccgtcaatgggtcttgcccccatccttgtcgatgaaatcttctcggttgtcaagaggattaatgaaacagggacaacggtgctgctgttgagcaaaacgcgtacaaagccctggatgcgccatcacgggcgtatatacttgagaccggggaaattgtcaaaagcggcttaa

SEQ ID NO: 31654 - protein, 231 aa, Unknown
  Obtained from environmental sample
  DOMAIN (37)...(218): ABC transporter
  misc_feature (1)..(231): Xaa is any amino acid
MERRQPLPNLLLKVENLIVNYGAIRALRSISFEVSEGEIITLIGANGAGKSTTLHAISNIIKKTSGMVMFDQRDISSIPPDSIVASGLVQVPEGRRIFANLSVRDNLEMGAYSRRSVTKAEKQAIKTDMEKVFNVFPRLKERIRQVAGTLSGGEQQMLAMGRALMASPRLLLLDEPSMGLAPILVDEIFSVVKRINETGTTVLLLSKTRTKPWMRHHGRIYLRPGKLSKAA

SEQ ID NO: 31655 - DNA, 408 bp, Unknown
  Obtained from environmental sample
  misc_feature (1)..(408): n is a, c, g, or t
ttgctcaacagcagcaccgttgtccctgtttcattaatcctcttgacaaccgagaagatttcatcgacaaggatgggggcaagacccattgacggctcatcaaggagcagcagacggggacttgccatcagcgctcgtcccatagccagcatctgctgttcgccgcctgaaagcgttcccgcaacctggcgtatgcgttcttttaacctgggaaaaacattaaacactttttccatatctgtttttatagcctgtttttcggctttggtaacagagcgccgtgaatacgcgcccatttccagattatcacggacgctgagattggcaaagatacgccggccttccggaacctgcaccaggccggaagcgacaatgctgtccggcggaatagagcttatatcccgctga

SEQ ID NO: 31656 - protein, 135 aa, Unknown
  Obtained from environmental sample
  DOMAIN (32)...(70): Protein of unknown function (DUF1602)
  misc_feature (1)..(135): Xaa is any amino acid
MLNSSTVVPVSLILLTTEKISSTRMGARPIDGSSRSSRRGLAISARPIASICCSPPESVPATWRMRSFNLGKTLNTFSISVFIACFSALVTERREYAPISRLSRTLRLAKIRRPSGTCTRPEATMLSGGIELISR

SEQ ID NO: 31657 - DNA, 438 bp, Unknown
  Obtained from environmental sample
  misc_feature (1)..(438): n is a, c, g, or t
gtgcgtttatgtgtgcttgtatgtgttttatctcaaatttactatattctccttatgacttccgaatactggattcttttggtctttctctttttaggtgcattcatagccggtgctgctataatagttggcaaaattttaggtttctcttcaaatgatggcaaagccaagtacagagcctatgaatgtggcatggaagcctttggaaatgcgagggtgcagttcaaagttggctatgtggtttttgcacttatatttttggtgtttgatgttgaggctctgtttctttttccaatagcggtgcattggcgaggcgttgttgacggaacgcttggcattccggtttggctagcttttgtggatttgggaatattttttgccgttttggcagcagctcttgcttattcttggaaaaagggctggctcaggtgggaatga

SEQ ID NO: 31658 - protein, 145 aa, Unknown
  Obtained from environmental sample
  DOMAIN (35)...(144): NADH-ubiquinone/plastoquinone oxidoreductase, chain 3
  misc_feature (1)..(145): Xaa is any amino acid
MRLCVLVCVLSQIYYILLMTSEYWILLVFLFLGAFIAGAAIIVGKILGFSSNDGKAKYRAYECGMEAFGNARVQFKVGYVVFALIFLVFDVEALFLFPIAVHWRGVVDGTLGIPVWLAFVDLGIFFAVLAAALAYSWKKGWLRWE

SEQ ID NO: 31659 - DNA, 705 bp, Unknown
  Obtained from environmental sample
  misc_feature (1)..(705): n is a, c, g, or t
gtgcgcataaatcagtatatagcgcaatgcgcagtgactagcaggcggcgcgcagaggctttggttttggagggcaaggtttctgtaaatggaattgttgtaaaagaactctcttgtaaaattagcgaaacagatattgtggaaatagaggggcaaaaaatttcgcccgtaaagcagcacataacaatagcattccacaaaccacccggcgttatatgcacttccacagacccgcaggggagaaaaacaatctacgacttattgccaagcggtttttcaagcctcaaatacgcaggcaggctagacctgcagagcaggggtctaattttgctctccgatgacggcgaacttatttacaggctcacgcacccaaaataccaaattgaacgcagctatcttgtttggacaagtagggaactttcacgtcacgcaatggaaagcctgcttgcaggcatagatataggagatggggaaataggcaaggtgaaagatatttttttagacgatggctttgttgagcttgtgctaacagagggaaaaaaccgagaaattcgcaaaatgctccactctttgcactatcatatagaagatttaaaaagagttggctttgcaaatatagagctaggcgacttggcagcaggtgcgtacagggaaataaaaggcgaggaattaaaaaagttaaaggagcgcgtggaatttttctaa

SEQ ID NO: 31660 - protein, 234 aa, Unknown
  Obtained from environmental sample
  DOMAIN (1)...(47): S4 domain
  misc_feature (1)..(234): Xaa is any amino acid
MRINQYIAQCAVTSRRRAEALVLEGKVSVNGIVVKELSCKISETDIVEIEGQKISPVKQHITIAFHKPPGVICTSTDPQGRKTIYDLLPSGFSSLKYAGRLDLQSRGLILLSDDGELIYRLTHPKYQIERSYLVWTSRELSRHAMESLLAGIDIGDGEIGKVKDIFLDDGFVELVLTEGKNREIRKMLHSLHYHIEDLKRVGFANIELGDLAAGAYREIKGEELKKLKERVEFF

SEQ ID NO: 31661 - DNA, 1344 bp, Unknown
  Obtained from environmental sample
  misc_feature (1)..(1344): n is a, c, g, or t
ttgagaacgtcagggcgttttcgcgcttttagcaatgcctgcagagctgaaatgtgcaccataatgctcaaggacacggacgacgccctgattgtattcaacgcaaacaacgcgggatacacggaggcggtcgcggaagattttaaggcgattacaatagccgactttaacacccgtttttccgattacaaggttgtctcaaaagatatatacgatttcttccccgcgggggaaaggaatgaaagaatcgaatcctatattttaattcccatgacaagttggggcgaagaattcgcgacggttcatatcggcacttccgttaaagaatatttttcaccgcttattctggaaaatcttaatgtttttctttccgcggcgagtccgataatagcaaacgctttgcatctgaagcagatggaaaccctgcaaaagaaaacaagggccgccttcgcgcgctatgttcccatagacgtaatggacgagatcattaaaaagtcggcatcgccggcaagccagagcgaaagcagggtggttacgattctgttttccgacataagaagttttacaaaaatttcagaaaatactccggccagggaacttgtagattttcttaacacatatttttcggccatgggcgatcaaattattgccgaaggcggcaatatcgacaagttcataggcgacgcgataatggctatcttcggcgcgcccaaaacgctggaaaattcagccgtgagcggcgtcagggcggcgatacggatggttaaggcgcttcnccaggtggacacgtcgagcattaccctgcctgaggggggcttcggcgcgggcataggccttaattgcggcgaatgcgtcgtcggtaacataggctttcagaataaaatggactacacggtgataggcgacaccgtcaacctcgcctcacggcttgagggtatcaccaagtattaccatcagacgatcatcgtatctgaatatatctacaactcggccaaagacgatttcattttccgcaaagccgacagcgtgcgcgtgaagggcaaagaccagccggttgggctttacacggtgtacgccgcttttcgcggcgaagaagccgaaggggtaccgccggttctgcttattgaccgggaagccctggatcaatacaacaagggccttaaacttttcgcaatgcgtgaatttgaaaccgcaaaacagtattttaccacggccctatccatcgaagaaaaagccggcaagtcagattatctcgcgtcgctgtacctttcacgcattgaagaatttctggtaacccctcccccgcccgactgggacggcacgataactatgacagaaaagtaa

SEQ ID NO: 31662 - protein, 447 aa, Unknown
  Obtained from environmental sample
  DOMAIN (170)...(359): Adenylate and Guanylate cyclase catalytic domain
  misc_feature (1)..(447): Xaa is any amino acid
MRTSGRFRAFSNACRAEMCTIMLKDTDDALIVFNANNAGYTEAVAEDFKAITIADFNTRFSDYKVVSKDIYDFFPAGERNERIESYILIPMTSWGEEFATVHIGTSVKEYFSPLILENLNVFLSAASPIIANALHLKQMETLQKKTRAAFARYVPIDVMDEIIKKSASPASQSESRVVTILFSDIRSFTKISENTPARELVDFLNTYFSAMGDQIIAEGGNIDKFIGDAIMAIFGAPKTLENSAVSGVRAAIRMVKALXQVDTSSITLPEGGFGAGIGLNCGECVVGNIGFQNKMDYTVIGDTVNLASRLEGITKYYHQTIIVSEYIYNSAKDDFIFRKADSVRVKGKDQPVGLYTVYAAFRGEEAEGVPPVLLIDREALDQYNKGLKLFAMREFETAKQYFTTALSIEEKAGKSDYLASLYLSRIEEFLVTPPPPDWDGTITMTEK

SEQ ID NO: 31663 - DNA, 861 bp, Unknown
  Obtained from environmental sample
  misc_feature (1)..(861): n is a, c, g, or t
ttgatagtggccgccggggaggacatcaactgccgcctattcgccgcctacctgaacacggtcggcttcaatgccaagtacgttaatccgaaagacgccgggcttacggtcacccccatcttcggcgacgcccagccgctccccgaggcggcggcgaatctggcggcgctcaaaggcgtgtgcgccgacgccgtggcggtcttccccggcttcttcggctacaccgccgacggcgaagtcgccaccttcagtcgcggcggttccgatctcaccggcgcgattcttgccgaggcgttagacgccgacgagtacgaaaactggacggacgtggacggcatcttcagcgcccaccctctaatggtcaattcgcccaaacagatatcggcgctgacctacaaggagatgcgcgagctttcctacataggcttcaacgtcctacacgaggaggccgtccgcccggttatgaggaagaaaatcccgatcaggctgcgcaacacgaataatatagaaaacaggggaacgttgattgtctccgagaggctgcccgatgtaagcgacatcgtgggcatagcctccggcgacgggtattgcagcttcaccctccaaaagttcttgatgaaccgggaaaagggtttcggcaggcgcttgttgtcgatattcgaggagatgaacctctcctacgaacactgcccgtctggggtagacaacatctcggccattttagaccaagaccagctgaagccggagacggtcaacagcatcattcgagccttcgacgaanaattggcccccgacgaagtgaaaaccgagttcggcatagcgctggtgtcggtagtgggcgagggcttacccacaaaatag

SEQ ID NO: 31664 - protein, 286 aa, Unknown
  Obtained from environmental sample
  DOMAIN (1)...(165): Amino acid kinase family
  misc_feature (1)..(286): Xaa is any amino acid
MIVAAGEDINCRLFAAYLNTVGFNAKYVNPKDAGLTVTPIFGDAQPLPEAAANLAALKGVCADAVAVFPGFFGYTADGEVATFSRGGSDLTGAILAEALDADEYENWTDVDGIFSAHPLMVNSPKQISALTYKEMRELSYIGFNVLHEEAVRPVMRKKIPIRLRNTNNIENRGTLIVSERLPDVSDIVGIASGDGYCSFTLQKFLMNREKGFGRRLLSIFEEMNLSYEHCPSGVDNISAILDQDQLKPETVNSIIRAFDEXLAPDEVKTEFGIALVSVVGEGLPTK

SEQ ID NO: 31665 - DNA, 561 bp, Unknown
  Obtained from environmental sample
  misc_feature (1)..(561): n is a, c, g, or t
atgaattttgtgagtattgattttgaaaccgcgaaatactcgcgggaaagcgcctgctcggtgggacttgtaaaatacattgacggaaaggcgactgacactttttattcgcttatacggccgcccaagctctatatacgtccggattttaccgagattcacggccttaccgtggacgatgtaaaagacgcgcccaagtttgcggacatttgggaaagcggtgtaaaaccgtttatcggcaatttcccgttggcggctcacaacgctgtgtttgacatgggcgtgctttgggccgtacttgaatggtatgaactggcgatacctaagctcccctatttctgcacatgcagtttggcccggcatacatggccgggactggagtcatattccctcacagctctggctgatcactttggcattgtgtataacgcccacaacgcgcttgatgatgccaggacttgcgggaaactggtgctaaagtccgcagaaaaatataatggcgcaaatatcaaagaattgctttctgccgccgaaatggagatgaatgtgctttgtgcttaa

SEQ ID NO: 31666 - protein, 186 aa, Unknown
  Obtained from environmental sample
  DOMAIN (3)...(158): Exonuclease
  misc_feature (1)..(186): Xaa is any amino acid
MNFVSIDFETAKYSRESACSVGLVKYIDGKATDTFYSLIRPPKLYIRPDFTEIHGLTVDDVKDAPKFADIWESGVKPFIGNFPLAAHNAVFDMGVLWAVLEWYELAIPKLPYFCTCSLARHTWPGLESYSLTALADHFGIVYNAHNALDDARTCGKLVLKSAEKYNGANIKELLSAAEMEMNVLCA

SEQ ID NO: 31667 - DNA, 828 bp, Unknown
  Obtained from environmental sample
  misc_feature (1)..(828): n is a, c, g, or t
gtgaaaatactagtaccggttaaacaggttccggaaagcagcaacgtgaaaatggatcctgctacagggaccttgatccgcacgggcgtggaaaccgtggtgaatcccctggacctttacgccctgaaaacggccttgaggcttcgggaaagccatggcggggaaattgccgttcttaccatggggccgccccaggcggaacgggttcttagggaagccctggctatgggctgtgaccgcgcttttctcatctctgaccggaagttcgggggttccgatacctgggctacttcttataccctggcggagggaatccgcaaagccgggccctttgatctcatcatcacgggagaacgggctacagacggggatacggcccaggtagggccaggcattgccgcatggctcgggattcccctggcaacctatgtggcaaaagcggaagagacggacaaaaaccatattcgggtggagcggcttacggaagagggataccaggttctttccctgtcgctgccctgtctcataacagtggtaaaagaaattgccgtgcccaggctcccaaccttgaaggggaagatccgttccagggacacggcaataccgttgctggatacggcttccatggaactcaaggaggactatcttggactccggggttctcccaccagggtagtaaaaatcgacagtccccggcttgcacggagcggcagggtcatcaccatacaggacgaggattctctcatggctgcggcggacgcgatcatggaacttctggaaagccggggcttcctttcggaacgtgatgaagccaaaggccaaggttag

SEQ ID NO: 31668 - protein, 275 aa, Unknown
  Obtained from environmental sample
  DOMAIN (22)...(213): Electron transfer flavoprotein domain
  misc_feature (1)..(275): Xaa is any amino acid
MKILVPVKQVPESSNVKMDPATGTLIRTGVETVVNPLDLYALKTALRLRESHGGEIAVLTMGPPQAERVLREALAMGCDRAFLISDRKFGGSDTWATSYTLAEGIRKAGPFDLIITGERATDGDTAQVGPGIAAWLGIPLATYVAKAEETDKNHIRVERLTEEGYQVLSLSLPCLITVVKEIAVPRLPTLKGKIRSRDTAIPLLDTASMELKEDYLGLRGSPTRVVKIDSPRLARSGRVITIQDEDSLMAAADAIMELLESRGFLSERDEAKGQG

SEQ ID NO: 31669 - DNA, 588 bp, Unknown
  Obtained from environmental sample
  misc_feature (1)..(588): n is a, c, g, or t
atgctcatcgttgtgtctgtcatggaacgcagagttgctatcccaaaaatgctgcggaattggggattagtttatcttggcaactttttgggaagtctctgtgttgtctttatgacataccactccggactgtttaacacctctgacggcttattaggcggcgtgaccataaagatcgcggcgggtaaactttctttgcctttccagtcggctttcatcctcggcattatgtgtaactggctggtttgtcttgcggtatggttaacctacggggtacgggacgcggccggtaagtgtatcgcaatattttttcttatgtacatatttgtgctttcaggctttgaacattgtgttgccaatatgtactatatccccgccggaattatggctgcccggaatccccaatgggttgccatgtcaaatttatctatgggcgaggtcgccggcttgaattggaccaattttatcaccaggaatttattccctgtgacccttggcaatatacttggcggctcgtgcatggtgggaattttatactggattgccctgaggaagaaaacaccctgtaagaatcatgaggaggtttaa

SEQ ID NO: 31670 - protein, 195 aa, Unknown
  Obtained from environmental sample
  DOMAIN (1)...(187): Formate/nitrite transporter
  misc_feature (1)..(195): Xaa is any amino acid
MLIVVSVMERRVAIPKMLRNWGLVYLGNFLGSLCVVFMTYHSGLFNTSDGLLGGVTIKIAAGKLSLPFQSAFILGIMCNWLVCLAVWLTYGVRDAAGKCIAIFFLMYIFVLSGFEHCVANMYYIPAGIMAARNPQWVAMSNLSMGEVAGLNWTNFITRNLFPVTLGNILGGSCMVGILYWIALRKKTPCKNHEEV

SEQ ID NO: 31671 - DNA, 789 bp, Unknown
  Obtained from environmental sample
  misc_feature (1)..(789): n is a, c, g, or t
gtggacaatatgcaaataggcattatccgtgctgcaatggcaataaagtggtacaaagaaaattcccaaggaatatcaaaacaagatggcagcacttgcgagtcctgttttggctacctttcaacaggttttccaaatgccaaaaccgatttaaaaaaactgattcaaggtgttatagatgcggcagtggcaaacgatatttatgttattgtggattggcattcgcataatgccagtagcgaaaaatcagatgcggtcgctttctttagagacatggccaatgcgaacaaggatgttcccaacataatatgggaaatttacaacgagcctgttaacgataattctggcacaatcaaaagctatgcaaacgatgttatagccgcaatccgtggcacaggcaataaaaatttggttatagtcggtagcaacttttattcgcagaagccaaaggagcaggctgatgctggcgtaacggattcccagaataatacagcttactcctttcatttttatagcaatgagcatggctaccagcaaagcggtggcataggtggttctgccaatagtgctagggatgccggacattccgtttatgcaacggaatggggttcggtaagggcagatggttctgggggcacaggcggatatgccccttggataacttttatggatggtgcagacataggtggttgttattggagtgcttcggaaataagtgagggagcatctattttcaaaaatggccaacccataaaagactctctgaaaaaaccgttagcaatttattga

SEQ ID NO: 31672 - protein, 262 aa, Unknown
  Obtained from environmental sample
  DOMAIN (15)...(243): Cellulase (glycosyl hydrolase family 5)
  misc_feature (1)..(262): Xaa is any amino acid
MDNMQIGIIRAAMAIKWYKENSQGISKQDGSTCESCFGYLSTGFPNAKTDLKKLIQGVIDAAVANDIYVIVDWHSHNASSEKSDAVAFFRDMANANKDVPNIIWEIYNEPVNDNSGTIKSYANDVIAAIRGTGNKNLVIVGSNFYSQKPKEQADAGVTDSQNNTAYSFHFYSNEHGYQQSGGIGGSANSARDAGHSVYATEWGSVRADGSGGTGGYAPWITFMDGADIGGCYWSASEISEGASIFKNGQPIKDSLKKPLAIY

SEQ ID NO: 31673 - DNA, 1176 bp, Unknown
  Obtained from environmental sample
  misc_feature (1)..(1176): n is a, c, g, or t
gtgtcgatcgcgccgcttgattttatattttgcatatattattttttagttgtgtggaataacatacggcagaggaaggatggccgtatgagcgtcaaaaacgtagcggtaggtttgtggaaagtagccgtttctgttcgtgtcccgtggaagccttaccccgtcaaacggaaggctaccgtaaaggggacgaaggccgacgccaaactcaaagaagcggaacttcttaggatggctttggatgaggggcaaggacagggcgaaagttctttgaaaaagacggcggtaagcacattcaataaagtagagaccctgcaagacgggatcaatctttacttggaaaagttaaaggctcagggtaggctctcagccgtcacccaaaggaagtacgggtggcttggcagggaattaggttatatccccattttggaattgggggaacgcttcatggattggattcacgtctacaagaacactgttggcagaaacgggaagccccgtactcctgcgaccgtgaactttgttatcaacgttgtcaaagcggtctgcaaccatcttgttgaacttgagattcttctcaagaaccccataagccgtgccaagttccccacggcaagctgtaaaccgcgctttgttaccctgacgcaggaagagcaggacaggttgttattggttatccaacgggaacacccagacatcttgcccatagtgaagttcatgcttcaaataccttgcagggcatttagcgaactagtcccagcaaaggtcagtcagttgaaggacgggatgatttttatccctacttcaaagaataaagacccgatctttaagcccgtgcctatttctatggctgactatttcgactctattcctatccaagatggttgtcagtatctgttttacagaaaagttggagaccaatacctgcccctagacaaccttagacacgcttttgaggtttgccgaaaaaaggcggatctccctaacctaagaatccatgacctcagacacgtggcggtgactaacctcgtattacgtggcgtacccgttcaactgctgatgaaactctgcggctggcgcaaggatcaaagccacgtctactgtaatatcagcctgaagtcaggcgcggaatattttctaaacatggaaaaggaggctatgatgttggcgagttag

SEQ ID NO: 31674 - protein, 391 aa, Unknown
  Obtained from environmental sample
  DOMAIN (214)...(377): Phage integrase family
  misc_feature (1)..(391): Xaa is any amino acid
MSIAPLDFIFCIYYFLVVWNNIRQRKDGRMSVKNVAVGLWKVAVSVRVPWKPYPVKRKATVKGTKADAKLKEAELLRMALDEGQGQGESSLKKTAVSTFNKVETLQDGINLYLEKLKAQGRLSAVTQRKYGWLGRELGYIPILELGERFMDWIHVYKNTVGRNGKPRTPATVNFVINVVKAVCNHLVELEILLKNPISRAKFPTASCKPRFVTLTQEEQDRLLLVIQREHPDILPIVKFMLQIPCRAFSELVPAKVSQLKDGMIFIPTSKNKDPIFKPVPISMADYFDSIPIQDGCQYLFYRKVGDQYLPLDNLRHAFEVCRKKADLPNLRIHDLRHVAVTNLVLRGVPVQLLMKLCGWRKDQSHVYCNISLKSGAEYFLNMEKEAMMLAS

SEQ ID NO: 31675 - DNA, 651 bp, Unknown
  Obtained from environmental sample
  misc_feature (1)..(651): n is a, c, g, or t
ttgttcggcctggcgtacggtggcggatggcagatggttggaattcaggccctcggcgtcgttgcggtagccgcatgggtggcgataaccatgggcatcatctttacgataatcaagaaaacagtcggccttcgcgttacagcagctgaagaaattgccggtatggatattacggaacacaacattgaaagcagctatgccgactttatggtggctacctctgtcgaggcagataaggacgccgtagttcccgccaatgtcgcggttcctgttgtgaacacctcaaagcccggctcgaagatgacgaagataacgatcatcaccaatcaaaataaactcacactgcttcacgccgctcttgacaagattggcattaccggcctgacggttaccaatgtccttggccacggtatgcaaaaaggccatgtggaatactaccgtggcgctcctgtaaatatcaggctgctgcccaaggttcaggttgacatagtcgtatccaagataccgccgcagactgtaattgataccgcgaagaaggtattgtataccggaaaagtgggcgatggcaaaatattcgttacggatgttgaaaacgtcgttaaagtccgcaccggcgagcaaggcttcgacgctttgcaggataacgaataa

SEQ ID NO: 31676 - protein, 216 aa, Unknown
  Obtained from environmental sample
  DOMAIN (104)...(205): Nitrogen regulatory protein P-II
  misc_feature (1)..(216): Xaa is any amino acid
MFGLAYGGGWQMVGIQALGVVAVAAWVAITMGIIFTIIKKTVGLRVTAAEEIAGMDITEHNIESSYADFMVATSVEADKDAVVPANVAVPVVNTSKPGSKMTKITIITNQNKLTLLHAALDKIGITGLTVTNVLGHGMQKGHVEYYRGAPVNIRLLPKVQVDIVVSKIPPQTVIDTAKKVLYTGKVGDGKIFVTDVENVVKVRTGEQGFDALQDNE

SEQ ID NO: 31677 - DNA, 486 bp, Unknown
  Obtained from environmental sample
  misc_feature (1)..(486): n is a, c, g, or t
gtgattatggtaggtactgatgcaaacaaaaaaccgttaccggtaggcaaatcgttcttcgacaaggttatcgaggaagattgttactatgttgataaaaccctgtttatcaaagaccttatagatatgcgtgccgaagtcgtcctctgtacccgtccgcgccggtttggtaaaacactgaaccagacgatgctaaaatgcttctttgaagatacgacgcagataggcggcaaggatacgcgggcgctgtttcgcgggctgaaaatagaggatgccggagagcggtatatggagtatcaggggaagtatccggtgatatttttaagtttcaaggacacgaagctaaacagttttgacgagacatacaagaagttaatggggtgcatagctaaagaatttaaacggcacgcctacgtcgcagaaaaatatcggatgatgatgaccgagatttttttaagaaactgtctgagcgtaacgggtctatag

SEQ ID NO: 31678 - protein, 161 aa, Unknown
  Obtained from environmental sample
  misc_feature (1)..(161): Xaa is any amino acid
MIMVGTDANKKPLPVGKSFFDKVIEEDCYYVDKTLFIKDLIDMRAEVVLCTRPRRFGKTLNQTMLKCFFEDTTQIGGKDTRALFRGLKIEDAGERYMEYQGKYPVIFLSFKDTKLNSFDETYKKLMGCIAKEFKRHAYVAEKYRMMMTEIFLRNCLSVTGL

SEQ ID NO: 31679 - DNA, 651 bp, Unknown
  Obtained from environmental sample
  misc_feature (1)..(651): n is a, c, g, or t
atgctcaaccttgcttcaaattacattgtcatagacgggattgttcaatcggtacttaaactgaaaaatgaggaatcgctcaatgaagcgagaaaggccctgtataaaagcatcatttatctggaagaaatcgtcagcaatttcattgacgcgccctattccgattatgaagagcaactcgcgcagattgatacggtaacccctgccgagcgttacctgctgatacgcaaaatgggtcttgccattcaacttctgaaaaatgcctatggagacaataccaagtggaagtggacttttgtggagattgaaggccgttacgcgacagtggcaaaaaatataatcaacctgaaagacattctgatcaacagcgattttcaatcggaacattatgaaccgactgtccgccatctggcgctgataaaaaaactcctttcacaggccgccgaccgttaccgtgaaaagtacgagctttccaccaaccgtattgacgatttcaaactgggcattatttatcttgcggcgctcagacggatatacatccttaccggggatcagggagaagcggtaaacacgaaaaagaaactggatatttggaaagtcaagctggcgactgatacggaaaaacaggaaaaactgaagaacgagttatga

SEQ ID NO: 31680 - protein, 216 aa, Unknown
  Obtained from environmental sample
  misc_feature (1)..(216): Xaa is any amino acid
MLNLASNYIVIDGIVQSVLKLKNEESLNEARKALYKSIIYLEEIVSNFIDAPYSDYEEQLAQIDTVTPAERYLLIRKMGLAIQLLKNAYGDNTKWKWTFVEIEGRYATVAKNIINLKDILINSDFQSEHYEPTVRHLALIKKLLSQAADRYREKYELSTNRIDDFKLGIIYLAALRRIYILTGDQGEAVNTKKKLDIWKVKLATDTEKQEKLKNEL

SEQ ID NO: 31681 - DNA, 819 bp, Unknown
  Obtained from environmental sample
  misc_feature (1)..(819): n is a, c, g, or t
atggaaaaaattattattctctgtgtgtggatgacggcgcttatggttctgatctcgctgggaagatttttgtggcgttactttatacacggttcctcccgcagaatagaaacggcgatgcggaacaggctctttgagcatttgcagacgctctcatgggatttctatcaacacaataaaataggcgatcttatggcgcgctcgaccaatgatctggacgcggtgcgtacggcaatcggaatggggctggtggcgttggtagattttgtggtaatgacgacggcgattttgataattatttttgtacaggatgcccgttcggcgctgttttccgttatccctcttcctctggttacggtattgattcttctgttcggtaaatcggtcggcaaaaaattcacggtttatcaggaagcctatgcgaaaatgagcgataccgcgcaggaaacatttgccggcctgcgcgtaataaaatcatttgttaaggaatggtggttcatcaaaaaatttgccgccgataacgatgaataccgcacggcaagcatggaccttatccggctgttcggcgtgttttttcctctggttacctttctttcccagtttacggttttgctgatgctggtgataggcggaacacgggtaataaacggccttatgagtccgggaagtctggtggcgatgttccgctatctgcagatgctgatctggccgcttatgggggctggttttacggtgaacatgattcagcgcggcgcggtaagcctgggccgggtgaatgaaattttgaatactgtcccttcaatccgtgacaaagaatag

SEQ ID NO: 31682 - protein, 272 aa, Unknown
  Obtained from environmental sample
  DOMAIN (1)...(238): ABC transporter transmembrane region
  misc_feature (1)..(272): Xaa is any amino acid
MEKIIILCVWMTALMVLISLGRFLWRYFIHGSSRRIETAMRNRLFEHLQTLSWDFYQHNKIGDLMARSTNDLDAVRTAIGMGLVALVDFVVMTTAILIIIFVQDARSALFSVIPLPLVTVLILLFGKSVGKKFTVYQEAYAKMSDTAQETFAGLRVIKSFVKEWWFIKKFAADNDEYRTASMDLIRLFGVFFPLVTFLSQFTVLLMLVIGGTRVINGLMSPGSLVAMFRYLQMLIWPLMGAGFTVNMIQRGAVSLGRVNEILNTVPSIRDKE

SEQ ID NO: 31683 - DNA, 831 bp, Unknown
  Obtained from environmental sample
  misc_feature (1)..(831): n is a, c, g, or t
atgacttctgttgccgatgatgctgtggattcaatagcacgggagcatgcctttaatgtttcatttgagatttttgttcacaataaaatagttcccgttagcgttccactttttgttatgcgcagaagccaatacaacatgttcgtgtataacttttctcaatatgcaacaacccaatacaaaggagaacaaatagtgattatttcttcacgctttagaaatttatcttacgaagacatagaagttgcttttatgcgtgacgacctgaaaaatggaaagaaagttaaagaagaagacatatatagaaagaaagaatacgttgaaatcaaaaatgagatctataaaattttaggggtaaataccaataagagcacgcttgttttagaaaaaatcaatttgccgaaagcgcaaatattttccacgcaaataggatataaatcccacccttttcaaggagaagagttttcgacaaagacaaacatctcgttggagagcctaaaaggaaagtatgttttgcttgatttttgggctgaatggtgcggaccgtgtatacgcgaaatacccgctcttaaagaattatacgctaaaacagacagggctaaattcgaaattattggaatagtaggaagtagttctccggatagactcaagaatcgcattgagcagcatgcagtcacctggcctcaaattttgtctgacgagatagtaaaaatgtatggagtacgtggttatccaactacatttattttagatacggagggagttatcattgcaaaaaatttgagaagaaaagagctgggagaanaaattttaagcctgattatggagtag

SEQ ID NO: 31684 - protein, 276 aa, Unknown
  Obtained from environmental sample
  DOMAIN (150)...(273): Redoxin
  misc_feature (1)..(276): Xaa is any amino acid
MTSVADDAVDSIAREHAFNVSFEIFVHNKIVPVSVPLFVMRRSQYNMFVYNFSQYATTQYKGEQIVIISSRFRNLSYEDIEVAFMRDDLKNGKKVKEEDIYRKKEYVEIKNEIYKILGVNTNKSTLVLEKINLPKAQIFSTQIGYKSHPFQGEEFSTKTNISLESLKGKYVLLDFWAEWCGPCIREIPALKELYAKTDRAKFEIIGIVGSSSPDRLKNRIEQHAVTWPQILSDEIVKMYGVRGYPTTFILDTEGVIIAKNLRRKELGEXILSLIME

SEQ ID NO: 31685 - DNA, 909 bp, Unknown
  Obtained from environmental sample
  misc_feature (1)..(909): n is a, c, g, or t
ttggataaaacgttcaactcttcacctgcagagccttatacatgttcggttgatattggctttgccaaacttgaagaacttttgttggaggtgcttgatgaaaaaggaagcttacttgtgcgttataatgccgaaaaggaagaaataaaacctgcacccgagcctgccaaagctgccaaagaccctaaggatattgcctcaatggagcagctgtacctcacaggtcttcaccttgagcagtaccgccacgctacctacaacccggtggactactactctgaggcgttacgccgcgagtcgggcgatgtgcgctgcaacaatgctcttggtttgtggtatatgcgcaaggggcagtttgccaaagccgaaggctatttccgcaaggctattaaaacgcttaccgagcgcaatcccaacccctacgatggtgagccgtactacaatttgggctggtcgctcaacatgcagggcagacaagacgaggcttacgaggctttctttaaaagtgtgtggagcgcgacatggcaggatgctggctactacgcgctggcacaaattgaactgagccaatacctcaactttttgggtagcaacacgcgcccacaggagcgttcgcttgaacaggcgttggatttggtaaatcgctgcctgattaaaaactggcataatcacaaggcgcatacactcaagacctctattctgcgcaagttgggacataaggaggaggcgttgctgctaattgaagaatcgttgagcatagacccgttcaacatgggtgtgcgctttgaaaaatatttgctgacaaaaaacgcttcaacgcttgaggagatgaaccgcctaatgcgcggctggcaacatgcctacatagagtacgccattgatttgcagcagcagctcgtgccgatctga

SEQ ID NO: 31686 - protein, 302 aa, Unknown
  Obtained from environmental sample
  DOMAIN (103)...(136): Tetratricopeptide repeat
  misc_feature (1)..(302): Xaa is any amino acid
MDKTFNSSPAEPYTCSVDIGFAKLEELLLEVLDEKGSLLVRYNAEKEEIKPAPEPAKAAKDPKDIASMEQLYLTGLHLEQYRHATYNPVDYYSEALRRESGDVRCNNALGLWYMRKGQFAKAEGYFRKAIKTLTERNPNPYDGEPYYNLGWSLNMQGRQDEAYEAFFKSVWSATWQDAGYYALAQIELSQYLNFLGSNTRPQERSLEQALDLVNRCLIKNWHNHKAHTLKTSILRKLGHKEEALLLIEESLSIDPFNMGVRFEKYLLTKNASTLEEMNRLMRGWQHAYIEYAIDLQQQLVPI

SEQ ID NO: 31687 - DNA, 618 bp, Unknown
  Obtained from environmental sample
  misc_feature (1)..(618): n is a, c, g, or t
atgctggagaaacccatgagcgaaaaagaatttctggccgacagccagggccggcaggttccggcggaactggtgagcgacatcgacaagctgagggaccagacggtccgcaatattgccgacgaggcaatgaaaatgaagcaggtccttttggacttcaagcgccgcatcagggacgacatctacgcgttcgtagacatctccgcgagccggtacggcaaggcctggggcggcaggaagggcaacatcaccctgaccacctacgacggcaggtaccgcctggtcgtcgcgataaacgaccaaatcgtgttcgacgagcgcctgcaggtcgcgcgggaactgatcggcggctgcatagagaaatggtcggaaggctcccgcaacgagatccgcctccttgtccaggacgcgttccaggtggacaagacggggaagctcaacaccgcccgcatattgggcttgaggcggcttgagataacagaccccgactggctgaaggcgatggccgcgatctccgacagcatacaggtttccggaagcaagcagtacctccggttttacgagcgggacgggcagggcgaatacgttcagattcccctggacgtggcggcgctataa

SEQ ID NO: 31688 - protein, 205 aa, Unknown
  Obtained from environmental sample
  misc_feature (1)..(205): Xaa is any amino acid
MLEKPMSEKEFLADSQGRQVPAELVSDIDKLRDQTVRNIADEAMKMKQVLLDFKRRIRDDIYAFVDISASRYGKAWGGRKGNITLTTYDGRYRLVVAINDQIVFDERLQVARELIGGCIEKWSEGSRNEIRLLVQDAFQVDKTGKLNTARILGLRRLEITDPDWLKAMAAISDSIQVSGSKQYLRFYERDGQGEYVQIPLDVAAL

SEQ ID NO: 31689 - DNA, 810 bp, Unknown
  Obtained from environmental sample
  misc_feature (1)..(810): n is a, c, g, or t
atggaacttttgaattttctatattcaaagataaggatgcagatatttaattttttaaagcaaaaggtgcctttatatgtatgggttcctttattaacttttattgtgtttgcacctgctattctcttaggtcctaaatacttgatttcagtgttggtagcaggttcttttgtttctatattaattctttttgtaaatgaaaaaagcaagcaaaaggctgcactgcaaaagctaacggaatcaaatcaatcgcttagcattttaacaagcgtattaggcagttcagatgcattgatatacgtaactgttccagacaccggagaaattctctttataaacgagcgcgcaaaagaacgttattcaatcaaagggaactgcatagggaaactctgctataaagttttgcaaaatggaatggaacagatgtgcgaattttgcccttgccgcaagctggacaataatcccaagggagttattgtatgggaagaacgcagcaatttaacaaaacgaatatatcgcaacacagacagatatatagaatggcatggcggtaaacttgttcacgttcagtattccacagatatcacagagttggtatcctcaagagaacttgctgaacagagcaaccgcaacaaatctttattcttatcccgcatgagctgcgaaattcgctctcctatgaacgttattctcggaacaagggaagctcagcagcacgaccaagcgctagagttcaaagtaagagatgcgtttgcaatgataactaattctgcgcatctattgttcagcacccgtaaaatccgatgctag

SEQ ID NO: 31690 - protein, 269 aa, Unknown
  Obtained from environmental sample
  misc_feature (1)..(269): Xaa is any amino acid
MELLNFLYSKIRMQIFNFLKQKVPLYVWVPLLTFIVFAPAILLGPKYLISVLVAGSFVSILILFVNEKSKQKAALQKLTESNQSLSILTSVLGSSDALIYVTVPDTGEILFINERAKERYSIKGNCIGKLCYKVLQNGMEQMCEFCPCRKLDNNPKGVIVWEERSNLTKRIYRNTDRYIEWHGGKLVHVQYSTDITELVSSRELAEQSNRNKSLFLSRMSCEIRSPMNVILGTREAQQHDQALEFKVRDAFAMITNSAHLLFSTRKIRC

SEQ ID NO: 31691 - DNA, 720 bp, Unknown
  Obtained from environmental sample
  misc_feature (1)..(720): n is a, c, g, or t
atggaaggcgagccttccgcaggagtagaaccgtcttctacagtgcctatcaacttttcaattgcctctttcggcgtaccgccgtgccttagtatttttacggaattacccgttatatcaagtactgtggattcaacgccgaccctcgtagctccgccgtcaagaataatgtcaactttttcacccagtttatcccgcacatattccgcctttgtagggcttaaatacccaaaaggattggcgctgggagccgccaccgccccggtagaagattcaataagccgccgcgccgcgtcatgggcgggaaagcgcaccgctaccgtgggcagaccgctggtagcaaggtcaggtacggctttttgtttgggcagaatcagggtgagggggccgggccacaattgtttggttaacgcggcaagatttttgcgccccggggtatccagcagggaaagatcggctattttttccagcgtctcaaaggcggcgatatggacaatcagcgggtcaaagcggggacgtcccttaacttcaaaaatgcgcgcaagggcgagagggttaaacgcatcgccgcccaagccgtacacggtttcggtaggaaacgccgcaagcccgccctgtaccagaagcgccgccgcctgcctgatagattcatcgctgaccttcaaaagtggcataagccagaatactatgaataaagaacaaataacaggtaagaaataa

SEQ ID NO: 31692 - protein, 239 aa, Unknown
  Obtained from environmental sample
  misc_feature (1)..(239): Xaa is any amino acid
MEGEPSAGVEPSSTVPINFSIASFGVPPCLSIFTELPVISSTVDSTPTLVAPPSRIMSTFSPSLSRTYSAFVGLKYPKGLALGAATAPVEDSISRRAASWAGKRTATVGRPLVARSGTAFCLGRIRVRGPGHNCLVNAARFLRPGVSSRERSAIFSSVSKAAIWTISGSKRGRPLTSKMRARARGLNASPPKPYTVSVGNAASPPCTRSAAACLIDSSLTFKSGISQNTMNKEQITGKK

SEQ ID NO: 31693 - DNA, 846 bp, Unknown
  Obtained from environmental sample
  misc_feature (1)..(846): n is a, c, g, or t
ttggttttcaaattcatgctattgatgagcctttcaaacataatctggggcgtgcttacctgcgcatggttcggttttgacgtttccgcggtcccgcaggttttacagaatatcagtcttcccctcattgttaatacgtcgggtgaagcgggatggcttgccgcctataacgcgaacaattactggattcgttcggggctggtcgccgcgtatgacagcgttgacgcgatgggcaaggggattaccaccaacctcatgctcttctgtttttccgttgcccttgcgcagttgggcgttgcccatatcaagggaatattcaaatacatcaagtcccccaaagtgatggcggaattcgggcagttgggaatgctcgttgggatgtactttgttgttctttccctcgtagtgttcaataccggatttggcggggtaaaaacctggcagtttggctgtctggttggcggtttcgcgctgaactttgtgtttggcaattacgagggaagcgtcatcaaatccttccttacaagctgcgcgaacattcttacgaacgtgctgggcataaccaacgtttttctccgacatcatgtcctacatcaggctttgggcggtagtctggcaggggcttccattgccagtacggtgacgggattcgcgggttcgcttgttagccactttgtcttttttgtnttcggcgtggtcctctttttattcggccacagttttaatatggtactcaacgtgttgtcggttctggtccacggggtaaggctcaatactctggaattttcttcccacttggggcttacctggtccggttttgcatataagccgtntgctaaacggtag

SEQ ID NO: 31694 - protein, 281 aa, Unknown
  Obtained from environmental sample
  SIGNAL (1)...(30)
  misc_feature (1)..(281): Xaa is any amino acid
MVFKFMLLMSLSNIIWGVLTCAWFGFDVSAVPQVLQNISLPLIVNTSGEAGWLAAYNANNYWIRSGLVAAYDSVDAMGKGITTNLMLFCFSVALAQLGVAHIKGIFKYIKSPKVMAEFGQLGMLVGMYFVVLSLVVFNTGFGGVKTWQFGCLVGGFALNFVFGNYEGSVIKSFLTSCANILTNVLGITNVFLRHHVLHQALGGSLAGASIASTVTGFAGSLVSHFVFFVFGVVLFLFGHSFNMVLNVLSVLVHGVRLNTLEFSSHLGLTWSGFAYKPXAKR

SEQ ID NO: 31695 - DNA, 441 bp, Unknown
  Obtained from environmental sample
  misc_feature (1)..(441): n is a, c, g, or t
atggatccaagaattttaggaatgataggcgcgggtattgtgatggggattgcggcccttggctccgcggtaggaataggtatcgcgggatctgccacaatcggcgcgtggaagcgctgctataaggccaataaacccgcgcccatgaccctgcttacctttgcgggcgctcctctgacccagacattttacggatttattctcatgcagcagatgcttaacgcgtctcaaacagcgaatccaggtcaactcttgggtatggggattggttcgggtctggctataggtttttccgccattgcccagggccaggcgggagccgcaggcgcggacgcgttgagtgaaaccggcaaaggtttcgccaactacattgccgtagttggtatctgcgaaactgttgccctttttgctatggttctttccatgacagcccttggttaa

SEQ ID NO: 31696 - protein, 146 aa, Unknown
  Obtained from environmental sample
  SIGNAL (1)...(23)
  DOMAIN (6)...(75): ATP synthase subunit C
  misc_feature (1)..(146): Xaa is any amino acid
MDPRILGMIGAGIVMGIAALGSAVGIGIAGSATIGAWKRCYKANKPAPMTLLTFAGAPLTQTFYGFILMQQMLNASQTANPGQLLGMGIGSGLAIGFSAIAQGQAGAAGADALSETGKGFANYIAVVGICETVALFAMVLSMTALG

SEQ ID NO: 31697 - DNA, 774 bp, Unknown
  Obtained from environmental sample
  misc_feature (1)..(774): n is a, c, g, or t
gtgcgcgaaggctatgttgacggcaaccttgaacagtgccccactctggtgaacctccagtgcgacatcgatcatcccacacaggcaatggccgacatgaaccacatcatccaccacttcggcggcattgacaaactcaaggggaagaaagtcgccatgacctgggcgtattcgccgtcttacggaaagcccctgtccgtgccccagggggtaatcggccttatgacccgtttcggcatggatgtgcatctcgcccacccggagggctacgaggttatgcccgaggttgaggcggtggcgaagaagaacgctcaccttagcggcggcaaattcacaaaatcgaattccatgcatgaagcttttcaccacgccgatattgtataccccaagagctgggcgcccttcgccgcgatggaaaaacggactaacctttacggcaacaacgactttgacgggataaaggccctggaaaaagaactgctggcccaaaacggcaaacacaaggactgggaatgttcagaaagcctgatgaaggcgaccaaggatggcaatgccctgtacctgcactgccttcccgcggacatttccggccttagctgcaaggaaggggaggtcgcggccacggtgtttgaccgctaccgcgtgcccctttacaaggaagcgagccataagccctacatcatcgccgcgatgattttcctcgcaaagatcaagtgtccgcaggaaatcttgacaaatatggtttcgcggaataacccacggcatttcagctaa

SEQ ID NO: 31698 - protein, 257 aa, Unknown
  Obtained from environmental sample
  DOMAIN (46)...(235): Aspartate/ornithine carbamoyltransferase, Asp/Orn binding domain
  misc_feature (1)..(257): Xaa is any amino acid
MREGYVDGNLEQCPTLVNLQCDIDHPTQAMADMNHIIHHFGGIDKLKGKKVAMTWAYSPSYGKPLSVPQGVIGLMTRFGMDVHLAHPEGYEVMPEVEAVAKKNAHLSGGKFTKSNSMHEAFHHADIVYPKSWAPFAAMEKRTNLYGNNDFDGIKALEKELLAQNGKHKDWECSESLMKATKDGNALYLHCLPADISGLSCKEGEVAATVFDRYRVPLYKEASHKPYIIAAMIFLAKIKCPQEILTNMVSRNNPRHFS

SEQ ID NO: 31699 - DNA, 816 bp, Unknown
  Obtained from environmental sample
  misc_feature (1)..(816): n is a, c, g, or t
atgaaaaagcgcatagtcattgccctgggcgggaacgccctcggggataacctgaaagagcagatggaggcggccagggtaacctccggcgcaatagtggatctggttgaggaaggccacgagatcgtggtggttcacggaaacggcccgcaggtggggatgatcgaaaccgcctttgagaccgcagccaaagccgacaagcattttccggtgctgcccatgtcggtctgcgtggccctgagccaggggtatatcggctacgatttgcaaaacaccatccgcatggagcttgaccaacggaacataaaaaaacaggtcgccacgataattacgcaggttgaggttgacccggctgacaaggcctttgaaaatccgaccaagcccatcggcggctttcacagcagggaagaggcggagattctcaaatccaagggcgttccggtgatggaagacgcgggccggggctggcggcaggttgtggcttccccgaaaccgattaacatcatcgagactgaaaccatcaaggcgctgctgtcctcggggcatatccccattgccgcgggcggcggcggaattccggtcgcaatgaaggacggccagtaccggggcatgagcgcggtcatcgataaggatttttcggcggcgaaactcgcggagcttatcaacgcggacatgttgatcattttaacagcggttgaaaaagtcgcggttaactttggcaagccggatcaaaaatggctggacagcatgactgtcgcccaggcggaacagtacatcgccgaaaaccagtcccaaagctcgtctcccctgcgataa

SEQ ID NO: 31700 - protein, 271 aa, Unknown
  Obtained from environmental sample
  DOMAIN (3)...(271): Amino acid kinase family
  misc_feature (1)..(271): Xaa is any amino acid
MKKRIVIALGGNALGDNLKEQMEAARVTSGAIVDLVEEGHEIVVVHGNGPQVGMIETAFETAAKADKHFPVLPMSVCVALSQGYIGYDLQNTIRMELDQRNIKKQVATIITQVEVDPADKAFENPTKPIGGFHSREEAEILKSKGVPVMEDAGRGWRQVVASPKPINIIETETIKALLSSGHIPIAAGGGGIPVAMKDGQYRGMSAVIDKDFSAAKLAELINADMLIILTAVEKVAVNFGKPDQKWLDSMTVAQAEQYIAENQSQSSSPLR

SEQ ID NO: 31701 - DNA, 1218 bp, Unknown
  Obtained from environmental sample
  misc_feature (1)..(1218): n is a, c, g, or t
ttgacaggaggaattatggctaagagtaatgatgatcgcgcgttgatctatcagcttgacgggaggccgcctttacgcgccgcaattccaatcggattacagcatgtgttcgccatgtttatcggcaatctggccccgatattggtgctgtcaaacgtggtaagtatcgcagccggaaacaggattataacggacgaacagcgaatgataatgctgcagtgctgcatgttcgcttccggcgtggcaaccctggtccagctatatcccataaaggttggcgctatccaaatcggcgcgaggcttcccatcgtcatggggacatcgttcggttttatgcctaccctgagcagtatcggcgctgaatacgggataagcgtggtnttgggttcggtnatcgccgcgtctcttgtggaagtttttatgggcgtgtttattaaatacataaagaaattcttttcccccattgtcataggctcggtgcttatgtctatagggctttatcttttgcccgtgggcgttacatacttcgggggcggggcaggagcgggaccgcagttcggttcgtggcaaaaccttcttatgggcagtgtcgtgtttcttgtcattgttcttttacagcgcctggcgaaaggaacgctgaaagcgtccgccattcttataggtataatcgttggatacattttggcgatttttttggggcaggtgaattttacccctgtcgtggacgcgaaagtgtttgcgcttcccataccgttcagacagggattggtgccgtcattccatctgcttccgattctctccatggcgataatggttgtggtatcggggattgagacaatggggcacgtaaacggaatgaccatggcggtttgggacaggcaggcggccaacagcgaaacgcagggggcgctgcttgccgatggtttcgggaatatattttcggcgatcttcggcgttctgcccaatacttcattcgggcagaacataggcattgtctgcataaccaaagttgtcaacagattttgtattttcataagcgctattgtgcttatactcgccgggttttctcctaaagtcggcgctgttttatccgttatgcccaacagcgtattgggtggcgctgtgatcaccgtattcgcaatgatcatgctgaacggaattaaaatgatcgccaaagcgggttctccgaaagaaacgtatcatctcggccgaatctga

SEQ ID NO: 31702 - protein, 405 aa, Unknown
  Obtained from environmental sample
  DOMAIN (26)...(405): Permease family
  misc_feature (1)..(405): Xaa is any amino acid
MTGGIMAKSNDDRALIYQLDGRPPLRAAIPIGLQHVFAMFIGNLAPILVLSNVVSIAAGNRIITDEQRMIMLQCCMFASGVATLVQLYPIKVGAIQIGARLPIVMGTSFGFMPTLSSIGAEYGISVVLGSVIAASLVEVFMGVFIKYIKKFFSPIVIGSVLMSIGLYLLPVGVTYFGGGAGAGPQFGSWQNLLMGSVVFLVIVLLQRLAKGTLKASAILIGIIVGYILAIFLGQVNFTPVVDAKVFALPIPFRQGLVPSFHLLPILSMAIMVVVSGIETMGHVNGMTMAVWDRQAANSETQGALLADGFGNIFSAIFGVLPNTSFGQNIGIVCITKVVNRFCIFISAIVLILAGFSPKVGAVLSVMPNSVLGGAVITVFAMIMLNGIKMIAKAGSPKETYHLGRI

SEQ ID NO: 31703 - DNA, 558 bp, Unknown
  Obtained from environmental sample
  misc_feature (1)..(558): n is a, c, g, or t
atggcgaggagagcggagatctcagtccagggcgttccggtaatggaagacgcgggcaggggctggcggcaggttgtggcttccccgaaaccggttaacattatcgaggctgataccatcaaggcgctgctggcggcggggcatatccccattgccgcgggcggcggagggattcccgtcgcattaaaggacggacagtaccgcggcatgagcgcggtcatagacaaggatttttccgcggcgaaactcgcggagcttatccatgcggacatgctgatcattctaacggcggttgaaaaagtcgccgttaacttcggcaagccggatcaaaagtggcttgacagcatgactgtcgcgcaggcggaacagtacatcgccgaaaaccagttcgcaaaaggttcgatgcttcccaaagtgcaggcctccgtcgcttttgtaaaatcccgcggcagcgccccacagggcgtgagtgatgaagctcacagcgcgctgattaccctgcttacaaaggcgcgtgacggaattgcgggtaaaaccggcacaaggatagtgttttaa

SEQ ID NO: 31704 - protein, 185 aa, Unknown
  Obtained from environmental sample
  DOMAIN (2)...(158): Amino acid kinase family
  misc_feature (1)..(185): Xaa is any amino acid
MARRAEISVQGVPVMEDAGRGWRQVVASPKPVNIIEADTIKALLAAGHIPIAAGGGGIPVALKDGQYRGMSAVIDKDFSAAKLAELIHADMLIILTAVEKVAVNFGKPDQKWLDSMTVAQAEQYIAENQFAKGSMLPKVQASVAFVKSRGSAPQGVSDEAHSALITLLTKARDGIAGKTGTRIVF

SEQ ID NO: 31705 - DNA, 1245 bp, Unknown
  Obtained from environmental sample
  misc_feature (1)..(1245): n is a, c, g, or t
atggaaaagaaccgcagcataaacggaaccggcctggggctttcgatttgcaagtcttttgttgaaatgatgggcggctacatactggttgacagcgagtatgggcagggaagcgtttttacggttataattcctgctgtttctggcgacaaggcaaaaataaaatccgcgaagagcatgggaaaagaaaaaccactatacgcgccggacgctgcaattctggtagtagacgacaacgagtttaaccttagggtagcggaaggaatgttcaacctgtttaagatcaacactaaaaccgctttctccggcaagaaagccataaacctgatacaaaacaacgaatttgatcttgtctttatggatcacatgatgccggagatggacggaattgaagcagtcggaataataaggaaacttggttcccaatatgaaagcctgccgattatagcgctgacagccaacgcgattcagggcgcgaaggagatgttcctgtccagcggctttaacgggtttatttcaaaacccattgagatacagagattgaaagaagttttgcgcgaatggctgccgcccgctaaaattgtggaagaagaacttgcatctttggatgtagatagccagtataacgaaacaagcggcgatttcataaacgcccttggagaaattgacgaaatcgacactgaaatcggtttaagccgtgtttccggactgaaaaatatgtatcacgaaacattggcactttttcacaaaaggctcgtagcggaatgtgacgctatgtctgccgctataaacgcaaaagacataaagggcttcgcaattgaagtacacgccatgaaatcgatgctttcaaccatcggagcgatgaacttatcagtttctgcgttcaaattggaaacggctgccaaaaccgatgacgctaattactgccaggaacgcttccctgctttcagggaaaagctcatcaaactgcataaaaagatgtcagccgttttcccgtccgataaagccaatacaaaaaagaaaggcggagacacaaattatttacacgacaagatcaacgaggcactggaggcggcggatgactttaacggcgactcggctttaaaaatcacaagcgatctcttggcgcaagatttcggcgaaaaaaacaacgccctgttggaaactgccgcgacagcgtttgagaattacgattacaacaccgccaaagaatcattgaataaaatcttaatgatgggaaactaa

SEQ ID NO: 31706 - protein, 414 aa, Unknown
  Obtained from environmental sample
  DOMAIN (243)...(326): Hpt domain
  misc_feature (1)..(414): Xaa is any amino acid
MEKNRSINGTGLGLSICKSFVEMMGGYILVDSEYGQGSVFTVIIPAVSGDKAKIKSAKSMGKEKPLYAPDAAILVVDDNEFNLRVAEGMFNLFKINTKTAFSGKKAINLIQNNEFDLVFMDHMMPEMDGIEAVGIIRKLGSQYESLPIIALTANAIQGAKEMFLSSGFNGFISKPIEIQRLKEVLREWLPPAKIVEEELASLDVDSQYNETSGDFINALGEIDEIDTEIGLSRVSGLKNMYHETLALFHKRLVAECDAMSAAINAKDIKGFAIEVHAMKSMLSTIGAMNLSVSAFKLETAAKTDDANYCQERFPAFREKLIKLHKKMSAVFPSDKANTKKKGGDTNYLHDKINEALEAADDFNGDSALKITSDLLAQDFGEKNNALLETAATAFENYDYNTAKESLNKILMMGN

SEQ ID NO: 31707 - DNA, 825 bp, Unknown
  Obtained from environmental sample
  misc_feature (1)..(825): n is a, c, g, or t
atgtacggcagcaaagagccgcccaaggtcgaagagggcaccggttggggcgaggagtggaacaatcaagactacaagtgggtcaaaaacgcgtacagcgcggccgatattacgctcggcaatggaaataccagtattacagacgccttcaagaacaccgttatcaaaggaaacctgtatttcagccatcaggggaacggtatatacaagttcagccaagagaacttcttcccaatggacgcggcgggcgacgccgccggctaccgagcgaacggccgtaatccgggcgtgacttttccgagcggcggatctccggtgacgactaggagatggtcaagcaccaacggctccaacgcgtcgcacaactactcgttcactatggagatggtgcagcagttcaagatggagccgggtctgacgttcgacttcacgggcgacgacgacgtctgggtgttcatcaataaccagctggctatggacttgggcggcatacacgaggcggtctccgggtctatagtcttggacaatataaggactactcacgatttgcagaatgggaagatgtacaacttccacatgttctacgccgagcgccacgcggacgcctccaacatcgtgataacgactaacatcatcaccgtccgcccggatagcatgaagataaaggttagcccggagccaatgacccgcttgtacgcccaagctcgcggttgcggtaatctctacggacacgggcggcgctctgagcgacttccggaaaggcagtttcacgtggacggcgagggatttgggcgggtacaacaagatgagcgacagcacgcttaa

SEQ ID NO: 31708 - protein, 274 aa, Unknown
  Obtained from environmental sample
  misc_feature (1)..(274): Xaa is any amino acid
MYGSKEPPKVEEGTGWGEEWNNQDYKWVKNAYSAADITLGNGNTSITDAFKNTVIKGNLYFSHQGNGIYKFSQENFFPMDAAGDAAGYRANGRNPGVTFPSGGSPVTTRRWSSTNGSNASHNYSFTMEMVQQFKMEPGLTFDFTGDDDVWVFINNQLAMDLGGIHEAVSGSIVLDNIRTTHDLQNGKMYNFHMFYAERHADASNIVITTNIITVRPDSMKIKVSPEPMTRLYAQARGCGNLYGHGRRSERLPERQFHVDGEGFGRVQQDERQHA

SEQ ID NO: 31709 - DNA, 849 bp, Unknown
  Obtained from environmental sample
  misc_feature (1)..(849): n is a, c, g, or t
gtgattttggttttggcaccgctttcggggagccactccgaactcggaaattatatggtggaaggcattttgctctatgcggatagcttaaaaaacaaggtgaaaattcaaattgcaaacgacagagcagacccagcaaccgcgctttccaaggttaagcaagctctttaccaagattccataatagcggttatagggcctttgctctcggcaagcgcagctacagtggcagcttggatggcagaaaaatatccttatattccggtaatcactcccacagccacagatgacggcattgcagatatggggaaaaatatttttcagttgaacataagctcggctcgccttgcctacacaatagcagactatgcgatgagttgcctaaagataagcgagtttgcaataatggctcctttgggtgattacggctccctgatggcagacgaatttcagcgtgttgtggaacgcaaaggtggaacaataataatgactcagaattatgcagagggtttgccggattatcaaaacgagttcaaacttttgagggaccgcaaattgaaattggatacccgccgcatgaatatgagcaaaggaaccagcaatgtctctttgctacccaaaagagaaacttggctagaagattctacaatgctattccctgcaattttcattccaagctcaaaccccgcagatgcagggttaatgacagctcaagttgcttttaataaattgagagttgggaatttgctgggcacctctgggtggtatggcagagagcttttggttatgcanaaagcaagccgaaggttccgttttcagcatagctttttatcagatggaaatgattaa

SEQ ID NO: 31710 - protein, 282 aa, Unknown
  Obtained from environmental sample
  DOMAIN (18)...(281): Receptor family ligand binding region
  misc_feature (1)..(282): Xaa is any amino acid
MILVLAPLSGSHSELGNYMVEGILLYADSLKNKVKIQIANDRADPATALSKVKQALYQDSIIAVIGPLLSASAATVAAWMAEKYPYIPVITPTATDDGIADMGKNIFQLNISSARLAYTIADYAMSCLKISEFAIMAPLGDYGSLMADEFQRVVERKGGTIIMTQNYAEGLPDYQNEFKLLRDRKLKLDTRRMNMSKGTSNVSLLPKRETWLEDSTMLFPAIFIPSSNPADAGLMTAQVAFNKLRVGNLLGTSGWYGRELLVMXKASRRFRFQHSFLSDGND

SEQ ID NO: 31711 - DNA, 456 bp, Unknown
  Obtained from environmental sample
  misc_feature (1)..(456): n is a, c, g, or t
gtgatcgtctgtccccggctaaactcatatatttccttctatgacagcttcttttcattgtcaagtaattctgataataatagggacagaccaaagaagggaggtatttttatggtcattcatcgtaatgaaatgataacagaggacaaggaaaaaatgcggaatggcgagggtaacacgcatcttacatatctccttgacggcagtacacaaaagaacgcccgattattcgcggaaataaccctggatcaaggatgttcgattgggtatcaccggcatgattcagaaactgagtacttttttatactttccgggactgggagcgtaaacgatgacggcaaagaggtggaagtaaagccgggcgattcgattattaccggaaatggagcatctcacagtatcaaaaataccgggtctgtccccttggtatttcatgctgtcattatcacctactaa

SEQ ID NO: 31712 - protein, 151 aa, Unknown
  Obtained from environmental sample
  DOMAIN (78)...(148): Cupin domain
  misc_feature (1)..(151): Xaa is any amino acid
MIVCPRLNSYISFYDSFFSLSSNSDNNRDRPKKGGIFMVIHRNEMITEDKEKMRNGEGNTHLTYLLDGSTQKNARLFAEITLDQGCSIGYHRHDSETEYFFILSGTGSVNDDGKEVEVKPGDSIITGNGASHSIKNTGSVPLVFHAVIITY

SEQ ID NO: 31713 - DNA, 546 bp, Unknown
  Obtained from environmental sample
  misc_feature (1)..(546): n is a, c, g, or t
ttggtctgtccctattattatcagaattacttgacaatgaaaagaagctgtcatagaaggaaatatatgagtttagccggggacagacgatcacgaattttattatttgtatattggggcttgattgtgtttttattatttttagggttttgccttattggcggcacaatatatggcgtgttttttcataaaaaccctccaaacaaagtacaatcagttgctttccagaaagccggagagggacagacctttactggtattggtacgcttagagtctctactaccgatacccagccagggatggtgattatttttgtttcattcatttactatcctgatgacgtggctttttctgaagaattggctctccgcataaaggatttcagacaaataattattgactattttagtcctttttcaatatctgagcttcgggagttggacgaagacaacattaaaatagaattattgctccgtttcaattctatcctgcgacttggacaaattgagacattatttttcggtgattttatgattattgggtaa

SEQ ID NO: 31714 - protein, 181 aa, Unknown
  Obtained from environmental sample
  DOMAIN (31)...(180): Flagellar basal body-associated protein FliL
  misc_feature (1)..(181): Xaa is any amino acid
MVCPYYYQNYLTMKRSCHRRKYMSLAGDRRSRILLFVYWGLIVFLLFLGFCLIGGTIYGVFFHKNPPNKVQSVAFQKAGEGQTFTGIGTLRVSTTDTQPGMVIIFVSFIYYPDDVAFSEELALRIKDFRQIIIDYFSPFSISELRELDEDNIKIELLLRFNSILRLGQIETLFFGDFMIIG

SEQ ID NO: 31715 - DNA, 531 bp, Unknown
  Obtained from environmental sample
  misc_feature (1)..(531): n is a, c, g, or t
gtgacggatatctacgccaccgcgttcgattacgacaaggacgccaaaacgacccgcgatttcttcaagctcgtgcagaacaagctacactacgccgtccaccgccataccgccgcggagttgatcgtcaaacgcgccgacgcggaaaaagagaatatggggctgacgacttgggaaaccgcgccccacggcaagataatcaaagccgacgtctcgatagctaaaaactacctaaacgaacaagaaattaactatttggaacggatcgtatcactctacctcgacttcgcggaattgcaagccgaacgcaaaatccccatgtcgatggaggattgggcgaaacgtctcgacggctttttggaattcaacggcaacgagatattgaccggaccggggaagatatccagcgaagaggcgaagctccacgccgaaaccgagtacgaaaaataccgcgtagtacaagacagggtgttcaagtctgactttgatatgctgttggaggctatgggcgaacaggagagggaaagttaa

SEQ ID NO: 31716 - protein, 176 aa, Unknown
  Obtained from environmental sample
  misc_feature (1)..(176): Xaa is any amino acid
MTDIYATAFDYDKDAKTTRDFFKLVQNKLHYAVHRHTAAELIVKRADAEKENMGLTTWETAPHGKIIKADVSIAKNYLNEQEINYLERIVSLYLDFAELQAERKIPMSMEDWAKRLDGFLEFNGNEILTGPGKISSEEAKLHAETEYEKYRVVQDRVFKSDFDMLLEAMGEQERES

SEQ ID NO: 31717 - DNA, 711 bp, Unknown
  Obtained from environmental sample
  misc_feature (1)..(711): n is a, c, g, or t
ttggagtatagtatttacaggctcaaagtgaattttattattcggtacattctgaaacggcttctctttcttgtgccgatactccttgcggtatcagcggtgatcttttttctgatccgccttacgccttctgaccccatcggttccattacaagcggacggaggatcagcgacgagacgcgggcgtctcttacagcccagtaccatttggacaagagccttccccggcagtaccttatctggatcggcaacgcgctaaagggaaacctgggggacagtttcaggcaccggcagccggtgggaacccttcttgcggcaaggcttccgaccactattcagcttgtcctgatgagcgcggtatttgcggttcttttggccgttcccgcggggattgccagcgccgtcaaacggcataccatcgttgaccgcgttatttcaggctttatggtattctgcgtgtcctcgccggtttttctaaacgctattatattgatgttgatttttgtttttaaactgaggtggtttcccgcgtttggagccggacgcagtttcacggaaaatttgtattatttatgcctgcccgcttttgccttgagccttaatttggtcgctcttataggacgtataatccgggatcgcatgatcgatgaattcaaatccaattatgccctggccctttccgcaaggggacgcctttcccgcgtatcgtga

SEQ ID NO: 31718 - protein, 236 aa, Unknown
  Obtained from environmental sample
  misc_feature (1)..(236): Xaa is any amino acid
MEYSIYRLKVNFIIRYILKRLLFLVPILLAVSAVIFFLIRLTPSDPIGSITSGRRISDETRASLTAQYHLDKSLPRQYLIWIGNALKGNLGDSFRHRQPVGTLLAARLPTTIQLVLMSAVFAVLLAVPAGIASAVKRHTIVDRVISGFMVFCVSSPVFLNAIILMLIFVFKLRWFPAFGAGRSFTENLYYLCLPAFALSLNLVALIGRIIRDRMIDEFKSNYALALSARGRLSRVS

SEQ ID NO: 31719 - DNA, 498 bp, Unknown
  Obtained from environmental sample
  misc_feature (1)..(498): n is a, c, g, or t
atggtgataaagggtttggaacgctaccagcgctgggaccttgcccgcgaatgcgccatacgccacctgtactttatgctggactcgatgagtcccgacggcaaccaccacaggggcaacctttgggaggcctatcttcccacaaaggaaggccccgcaaaatggccgggcaagcccgatttcccgcgggcccagtacctgtcctacgacgcgctctccacaatctgcctgacgattgagaatatcgtaggactgttcatatccctcccgcggaaaaccgtggactgggtcatccccaaccttgaaataatgggaattgaaaacctctccctcaagaaaaacatgataacaatactctcccacagaagcgggcggggctgggaaatacacatggaaagcgagaagctctattactttaccattaacatcctcggaaaaaagaaaaagaccctgcccatcccctctggtaaatgttcaatgcttatagacaagttgtaa

SEQ ID NO: 31720 - protein, 165 aa, Unknown
  Obtained from environmental sample
  misc_feature (1)..(165): Xaa is any amino acid
MVIKGLERYQRWDLARECAIRHLYFMLDSMSPDGNHHRGNLWEAYLPTKEGPAKWPGKPDFPRAQYLSYDALSTICLTIENIVGLFISLPRKTVDWVIPNLEIMGIENLSLKKNMITILSHRSGRGWEIHMESEKLYYFTINILGKKKKTLPIPSGKCSMLIDKL

SEQ ID NO: 31721 - DNA, 510 bp, Unknown
  Obtained from environmental sample
  misc_feature (1)..(510): n is a, c, g, or t
atggcaattccaaaagaaatgcagggcaaatacaatgaaattgctgcaatgatcgttgaattctgcgataaaaaacttggcgtcgactataaaaggttatgcctgggactgctggaaaaactctgccgcaagcgtccatcgccattgctttcggggcgcactaatacatgggcagccggaatagtgtatgccataggctcaaacaattttatttttgacaagacgcagaagatacatttaacgtccaacgagcttgtcgccccttttggcgtttcctccagcacagccagcggtaaagccgctgaattaaagaaaatgtttaagattgattatttcaatatcgaatggatactgccggaacatatagataaaaatccgatggtttggacggtcatgattgacggatttattgtcgatatccgcgatatgccgctggagatacagcagcaggcgtttgaaaagggaattattccatatgtaccgggtgaaaggaatgagcagaaggagtaa

SEQ ID NO: 31722 - protein, 169 aa, Unknown
  Obtained from environmental sample
  misc_feature (1)..(169): Xaa is any amino acid
MAIPKEMQGKYNEIAAMIVEFCDKKLGVDYKRLCLGLLEKLCRKRPSPLLSGRTNTWAAGIVYAIGSNNFIFDKTQKIHLTSNELVAPFGVSSSTASGKAAELKKMFKIDYFNIEWILPEHIDKNPMVWTVMIDGFIVDIRDMPLEIQQQAFEKGIIPYVPGERNEQKE

SEQ ID NO: 31723 - DNA, 438 bp, Unknown
  Obtained from environmental sample
  misc_feature (1)..(438): n is a, c, g, or t
atgtatactaagggatttaatccggtcccaaaaatggaatttgcctctccgttatctgtaggtatcagtgctgagagcgaaatcgcttctgtggagttttccgagatatttccggcggaacgttttacagcgtctcttaacgataatttgccgagcggtattgtcattaaacaggcggagtcttttctaataaaaagtggtatgaaaaaacactcattgtcatcgttattatggggttttcagtacaggtatgatgatgaggcggtttatgttagcatgaaagaagaaaaagtttatagacaaaataagctgaaagaccgcaaatctttgtttttactgaaaagaagtgcggttctggcgcgtaatatgccgtgcgatatggacggatgggcgtcgtatttcgacgtgtaccgatttttatactctgataacgaataa

SEQ ID NO: 31724 - protein, 145 aa, Unknown
  Obtained from environmental sample
  misc_feature (1)..(145): Xaa is any amino acid
MYTKGFNPVPKMEFASPLSVGISAESEIASVEFSEIFPAERFTASLNDNLPSGIVIKQAESFLIKSGMKKHSLSSLLWGFQYRYDDEAVYVSMKEEKVYRQNKLKDRKSLFLLKRSAVLARNMPCDMDGWASYFDVYRFLYSDNE

SEQ ID NO: 31725 - DNA, 897 bp, Unknown
  Obtained from environmental sample
  misc_feature (1)..(897): n is a, c, g, or t
ttggccgagtatcctcgcttcatgaacggagccgctaccaatcccgagttcggagttgtcgctcttgccgcaacacaggtaaaagccgctatcgatgcgaccatcgagcttggcggcgcaggctatactttctggggtggacgcgaaggttacatgagtcttcttaacacggacctcaagagagagaaagaaaatctagcgcgcttccttacaatggcaagggattacggacgtaaacagggctttaaaggcccgttctacatcgaaccaaaaccgatggaaccgacaaaacaccaatacgattttgacacggaaacagttatcggcttcctgcgccaatggggtcttgataaagatttccgcatgaacattgaagctaatcatgcggagcttgccggccacgaattcgcatacgagcttgaaacagcggcagtcgcaggcttcttcggctccgtagacgcaaaccgcggcgattttcaaaacggctgggacacagatcagttcccgattagttactacgaaaccgcaatggcaatgtacacaatcctaaaaataggcggttttacaacaggcggccttaactttgattcaaagattcgcagaaattcaatagacccggcggacctttttatagcccatgtcggcggtatggacactttcgccgtaggactgcaagtcgcgcaacgcatcatcgacgacggagttattcccaactttgtaaaagagcgttatgcgtcattcacaagcggcgacggagcgaagttcagcaagggcgaacttactcttgaacagcttgcgaagattggaacagacgcagggtacggaaaaacaggtatcacaagcggtaagcaggagtaccttgaaaatgtactgaatagttacttacttggactgtaa

SEQ ID NO: 31726 - protein, 298 aa, Unknown
  Obtained from environmental sample
  DOMAIN (5)...(159): Xylose isomerase-like TIM barrel
  misc_feature (1)..(298): Xaa is any amino acid
MAEYPRFMNGAATNPEFGVVALAATQVKAAIDATIELGGAGYTFWGGREGYMSLLNTDLKREKENLARFLTMARDYGRKQGFKGPFYIEPKPMEPTKHQYDFDTETVIGFLRQWGLDKDFRMNIEANHAELAGHEFAYELETAAVAGFFGSVDANRGDFQNGWDTDQFPISYYETAMAMYTILKIGGFTTGGLNFDSKIRRNSIDPADLFIAHVGGMDTFAVGLQVAQRIIDDGVIPNFVKERYASFTSGDGAKFSKGELTLEQLAKIGTDAGYGKTGITSGKQEYLENVLNSYLLGL

SEQ ID NO: 31727 - DNA, 906 bp, Unknown
  Obtained from environmental sample
  misc_feature (1)..(906): n is a, c, g, or t
gtggaaatgccggagatgaccggcaaggaaatgtttgaaatcctaaaagctgatgagagctttaaacgtatcccggttatttttattacagcggcaaacgattcggaaaccgaactgttggcggccggcgcggtggattttatcaacaagccctttacccctgaaatagttaaactgcgcgtaagaaaccagatttcgctaaagaattacagcgacagtcttgagaaaatggtggctgaaaaaaccgccgaggtaattaaaaagaccgaagaggcaaacaagaccctgaataacgcgcttcaaggtttggcaaatgtaatagagcaccgcgatttggaatccggggaacacgtcaagcgtacccagctttttgtgggcgcgttggcggactacctgattaaatcaaagtcgccttacgcagaccagctttatgaaatgcagcctgatattatcgtaaaatccatggcccttcatgatgtaggcaagatagccattcctgaccgtatacttttaaagccgggaaggctggacccggaagaatacgatattatgaaaacccataccacaaggggaaaagagatcatcggtgaacttggagatgtgaatgcttccctgtacttgaagcactgtgaagatatatgctacggtcatcatgagcgctgggacggaaaaggctatccacgctctcttggcggaacagagatacctctgaccgcgaggcttgcctcggttgcggatgtttacgacgctctggtatgtgcccgtgtttacaaggcggcaatcccttattcggaagcggtaaatataataaaagacggcagggggacgcagtttgatcctgttgtttgtgacgccctgattgagattcagggtgaattcagaaagatagccgaacaatatgtatag

SEQ ID NO: 31728 - protein, 301 aa, Unknown
  Obtained from environmental sample
  DOMAIN (114)...(251): HD domain
  misc_feature (1)..(301): Xaa is any amino acid
MEMPEMTGKEMFEILKADESFKRIPVIFITAANDSETELLAAGAVDFINKPFTPEIVKLRVRNQISLKNYSDSLEKMVAEKTAEVIKKTEEANKTLNNALQGLANVIEHRDLESGEHVKRTQLFVGALADYLIKSKSPYADQLYEMQPDIIVKSMALHDVGKIAIPDRILLKPGRLDPEEYDIMKTHTTRGKEIIGELGDVNASLYLKHCEDICYGHHERWDGKGYPRSLGGTEIPLTARLASVADVYDALVCARVYKAAIPYSEAVNIIKDGRGTQFDPVVCDALIEIQGEFRKIAEQYV

SEQ ID NO: 31729 - DNA, 393 bp, Unknown
  Obtained from environmental sample
  misc_feature (1)..(393): n is a, c, g, or t
atggacccgtttgtttttgtgctcttcggccctaccggtacaggaaaaaccgatcttttgcggcggctggactgccacatggaagttatctccgcggattccatgcaggtttaccggggcatggatatagggactgccaagcccacgcctgaagagcgggcgaaaacaccgcaccacctgatagacatcagaaacccggatgagcagttttgtgccggtgattttgtgcgccttgcgcgagaagcctgcaatgctgtgcgggcgcggggagcgctgcctgtggtatcgggcgggacagggttttatataaaaaatctgggtatgggcttaagcgaagcgcccccctcagacaaaaatcttcgncctgggaataaaaaaagaactttgctttaa

SEQ ID NO: 31730 - protein, 130 aa, Unknown
  Obtained from environmental sample
  DOMAIN (35)...(130): IPP transferase
  misc_feature (1)..(130): Xaa is any amino acid
MDPFVFVLFGPTGTGKTDLLRRLDCHMEVISADSMQVYRGMDIGTAKPTPEERAKTPHHLIDIRNPDEQFCAGDFVRLAREACNAVRARGALPVVSGGTGFYIKNLGMGLSEAPPSDKNLRPGNKKRTLL

SEQ ID NO: 31731 - DNA, 882 bp, Unknown
  Obtained from environmental sample
  misc_feature (1)..(882): n is a, c, g, or t
gtgagaaaaactgaaaaagtttttctgtttttacttgttgccataacaatcgccatttgtccgggttttgcccaggtttccggaatgaaaacactggatttggggcttgcttctgacgatgaattaacccaggcgctggacaaagccggcgaaattgaactgattaataaggaagataacttgcccgcggcggttgtcccatccggggctgtctatgcggatgctgtctatgcggagtgggccgacgcgggacaggaaacagccggcgcaagccgcgagaacgcgtacctcctgcaaagccggcgccttgcgagacttgcggaagaggagtttgccgtgggcaactacgacacgtccgccagcttcgccgatgaagccgcccgcttagccaggcagtccgatgtctatgtcgccattgtctcggcgaagcgctgtcttgaccaggctgtcgcatccggcgcttccacgcggtttccccgggaatacaaggaagcggaaaactggtataagcaaagcgcggaagcaagggacaacgaagactgggatgcctccattgatgccgccaacatggttacgcaattacttgaagagcttggaacccccggcagcaatccgcccatgcctggtgttttgcccgcgacttacaccgtgcggccttggtctgtctcaaaggactgtttctggaatattgccggccagccctgggtctatgggaatccgcgccaatggagaacgctttacaatgccaacaaatcaaagctggctgacccgaataacccaaacatcctgaagccgggcattgttttggacatccccagcataaaaggtgaactgcgcgaaggcgcatgggaaagcggcaagacctacgagccgtttaaatag

SEQ ID NO: 31732 - protein, 293 aa, Unknown
  Obtained from environmental sample
  SIGNAL (1)...(24)
  misc_feature (1)..(293): Xaa is any amino acid
MRKTEKVFLFLLVAITIAICPGFAQVSGMKTLDLGLASDDELTQALDKAGEIELINKEDNLPAAVVPSGAVYADAVYAEWADAGQETAGASRENAYLLQSRRLARLAEEEFAVGNYDTSASFADEAARLARQSDVYVAIVSAKRCLDQAVASGASTRFPREYKEAENWYKQSAEARDNEDWDASIDAANMVTQLLEELGTPGSNPPMPGVLPATYTVRPWSVSKDCFWNIAGQPWVYGNPRQWRTLYNANKSKLADPNNPNILKPGIVLDIPSIKGELREGAWESGKTYEPFK

SEQ ID NO: 31733 - DNA, 405 bp, Unknown
  Obtained from environmental sample
  misc_feature (1)..(405): n is a, c, g, or t
ttgagtccgcgcgtattgacggttacggggacttttatatatttacccgcattattcttcctttgtgtcttcccgttcttgccacaatcgggctttttgtcgcggttggctcatggaacgcgtgggtttgacacgatgatttacaattcaggcgacgaaaggctgcatactcttcaatacaaactgatggaatacctgcaatcaagccagtcccacggcaaaacggcctcagacgccggagctatggccctgtccgccggcgcgggaggaggctcgggcatggtaacgccgatgagcatacgcgcggcaattaccgtaatcgccgccgccccgattttgttaatttatccgtttatgcagcgttattttgttgtcggcttgaatgtcggcggagtgaaagaataa

SEQ ID NO: 31734 - protein, 134 aa, Unknown
  Obtained from environmental sample
  misc_feature (1)..(134): Xaa is any amino acid
MSPRVLTVTGTFIYLPALFFLCVFPFLPQSGFLSRLAHGTRGFDTMIYNSGDERLHTLQYKLMEYLQSSQSHGKTASDAGAMALSAGAGGGSGMVTPMSIRAAITVIAAAPILLIYPFMQRYFVVGLNVGGVKE

SEQ ID NO: 31735 - DNA, 441 bp, Unknown
  Obtained from environmental sample
  misc_feature (1)..(441): n is a, c, g, or t
atgaaagaaccaaggataaaagggtggtggcttatcaaaatacttctcactattgtcgggaagaaatgcattaatgaaatgaaaaaagcgtctaaaaacgggaaaaaagcctcggcaatttgcctaagaggcatcctgactacttccaaagatacggtttacggaaaagaacatcactttgaggaaattttaaaggcaaaaacaaataacgaattatttgaactttacaggaaaaacgttcccattaacgattatgaggattttcgcccatatattgaacgccataaaaacggagagccggacattctttttcccggcaagccaaaattttacgccacaaccagcggaacccaccaagagcctaaatggatacctgtaaccgagcagtactatcaggaagtgtataaaaaaatgaaccagggnctggntctatacttttga

SEQ ID NO: 31736 - protein, 146 aa, Unknown
  Obtained from environmental sample
  misc_feature (1)..(146): Xaa is any amino acid
MKEPRIKGWWLIKILLTIVGKKCINEMKKASKNGKKASAICLRGILTTSKDTVYGKEHHFEEILKAKTNNELFELYRKNVPINDYEDFRPYIERHKNGEPDILFPGKPKFYATTSGTHQEPKWIPVTEQYYQEVYKKMNQGLXLYF

SEQ ID NO: 31737 - DNA, 792 bp, Unknown
  Obtained from environmental sample
  misc_feature (1)..(792): n is a, c, g, or t
ttgcagatagtaaatgtctggttctgcggaaatacaagaatctactatgaaaaagtccgcgattcttttccacccgactgcgtgttccatgaattcagttatgtctccaccgaaagcaaagcgggactggtacttaaaagcaatacccaggaaacaacggttttcggccacaaaagctactttgaatttatacatgaatcggatgttgaaaatcccaacccaaaaatttatcagatagacgaacttaaagaaggcgagcgttactgcatgctggctacaaccagttccggactttaccgttacaatatgaacgaccttattgaagtttccagttaccttaatgatttcccgttgataaaatttatccaaaaaataaacggaaccatcagtcttactggtgaaaaattacatgaaagacaatttattgaagctgtgcatgaatcggaaaaaaagaccggaaagatcgcctctttctttgtcggttttgcggatccgcaaaaatcaaattataaattctattatgaattcgcggatcaaagtatttccgttacggaagcggaagaatttacagcccagattgaccgcttacttcaggaatataaccttgaatacagggaaaaacgctcgtccaaccgcgttaaagcgccggacacggctctcttgggacctgaatcctttgaacgtttcaaagcgacctgcatcgaccgcggctaccgcgacggacagtttaagctaaaccttcttatgcaggatgaaaaacgtcacgcgatgtttaaagagttaatcaagtga

SEQ ID NO: 31738 - protein, 263 aa, Unknown
  Obtained from environmental sample
  misc_feature (1)..(263): Xaa is any amino acid
MQIVNVWFCGNTRIYYEKVRDSFPPDCVFHEFSYVSTESKAGLVLKSNTQETTVFGHKSYFEFIHESDVENPNPKIYQIDELKEGERYCMLATTSSGLYRYNMNDLIEVSSYLNDFPLIKFIQKINGTISLTGEKLHERQFIEAVHESEKKTGKIASFFVGFADPQKSNYKFYYEFADQSISVTEAEEFTAQIDRLLQEYNLEYREKRSSNRVKAPDTALLGPESFERFKATCIDRGYRDGQFKLNLLMQDEKRHAMFKELIK

SEQ ID NO: 31739 - DNA, 1305 bp, Unknown
  Obtained from environmental sample
  misc_feature (1)..(1305): n is a, c, g, or t
atggtaataaaggtagttttgttgcttttgttttttgcggtaactatttcggtgggtttctatttccggcgaaaggtcgcgaatgtcaatgatttcgtgctgggcgggcgtgcggtcggcccgtggcttaccgctttcgcctatgggacatcgtatttttcggcggttatttttgtcgggtatgcggggcagtttggctggaggttcggcacagcggccacatgggtcggcttgggtaacgctttcatcgggtcgctgatgccgtgggtgatactcggacggcgcacgcgcgttatgacgaatcatttgaaaagcgcaacaatgcctgagttttttggttcacggtataattcgacggctttgaaaatcggggcggcaattattgcttttatttttcttataccttacacggcttctctttataacgggctttcccgtttgtttgcaatggcgtttaacgttgactttacatattgcatcataggaatggcgattctcacagcgatttacgttgtcgcaggaggttatttcgcaacagctgtaaatgattttattcagggcgtaatcatgcttatcggaattgtcgctgtaataggggcggtgttaaatgacaacggcggcttcataacggcgttaaactccatggcaaaaattgaagaagttaatgtcaataaagtacccacgcccggcgtatnagcgtcattcttcgggccggatccattaagcctgctcggagttgtaattctgacatcgctcggtacctgggggctgccgcagatggtttccaaattttactccattaagtcagaaaaatcgatctcgaagggcgcgattatatccacgttttttgcctttgttgtagcgggcggctgctattttctcggcagcttcgggcggttgtacgctaattcggataagatttcatacggcgctggtggcggcatagtctttgactccatcatacccgccatgctttccaagttccctgatttaatgattggcgtcgtcattctgcttgtgttcgcggcgtccatgtccacgctttcgtccctggttatagcttcggcgtcaaccttgacgctggatttcttgaaaggacacgtaataaagaaaatgaacgacaaaagccagctccttgtaatcaggatgctgattgtggtgtttatcgttatttcctcatttatcgggattgttcagtacaggggcggaatcagctttatcgcgcagcttatgggcgtctcctggggcgctctggcaggatcgttccttgcacccttcgtgtacggcctgtatggaagagggtga

SEQ ID NO: 31740 - protein, 434 aa, Unknown
  Obtained from environmental sample
  SIGNAL (1)...(27)
  DOMAIN (32)...(432): Sodium:solute symporter family
  misc_feature (1)..(434): Xaa is any amino acid
MVIKVVLLLLFFAVTISVGFYFRRKVANVNDFVLGGRAVGPWLTAFAYGTSYFSAVIFVGYAGQFGWRFGTAATWVGLGNAFIGSLMPWVILGRRTRVMTNHLKSATMPEFFGSRYNSTALKIGAAIIAFIFLIPYTASLYNGLSRLFAMAFNVDFTYCIIGMAILTAIYVVAGGYFATAVNDFIQGVIMLIGIVAVIGAVLNDNGGFITALNSMAKIEEVNVNKVPTPGVXASFFGPDPLSLLGVVILTSLGTWGLPQMVSKFYSIKSEKSISKGAIISTFFAFVVAGGCYFLGSFGRLYANSDKISYGAGGGIVFDSIIPAMLSKFPDLMIGVVILLVFAASMSTLSSLVIASASTLTLDFLKGHVIKKMNDKSQLLVIRMLIVVFIVISSFIGIVQYRGGISFIAQLMGVSWGALAGSFLAPFVYGLYGRG

SEQ ID NO: 31741 - DNA, 1038 bp, Unknown
  Obtained from environmental sample
  misc_feature (1)..(1038): n is a, c, g, or t
ttgtattgcttccatgacagggatgtcgcgcctgaaggagccacccccgccgaaagcgagaaaaatcttttcacgctggtagccaaggcaaaaaaacttcagaaagccaccggcgtcaaactgctgtggggaacggcaaatgtattcagcaatccccgtttcatgaacggcgccgctaccaaccctgaatttggcgttgtagcgcttgccgccacccaggtaaaagcggccattgacgccacgattgaactcggcggccagggctataccttctggggcggacgcgaaggttacatgagcctgctcaataccgaccttaaaaaagaaaaagaaaatcttgcccgtttccttaccatggcgcgggattatgggcgcaaacagggctttaagggccccttctatattgaaccaaaaccgatggagccgaccaaacaccagtacgattttgacacggaaactgttattggcttcctgcgccagtggggtcttgaaaaagattttcgcatgaacatcgaagccaaccacgccgagcttgccggccatgaatttgcccatgagcttgaaaccgccgccgccgccggcttcttcggctccgtggacgcaaaccgcggcgacgcgcagaacggctgggacacagaccagttcccatacagttattacgaaaccgcaatggcaatgtacgcaatacttaaagcgggcggttttaccaccggcggcctaaactttgactcaaaaatccgccgcaactcggttgaccccgccgacctcttcatcgcccacatcgggggcatggacgccttcgccgttggccttgaagtcgccaaccggataatcgtagacggaaaaattccttcttttgtcaagaaacgctatgcttcatttaacaccggcgacggcgtgaaattcagcaaaggccaaatgaccctggagcagcttgcggaaatcggcgccaaagccggttatggcaagaccggccttaccagcggtaagcaggagtatttggaaaatattctgaaccagtatttattcggactgtaa

SEQ ID NO: 31742 - protein, 345 aa, Unknown
  Obtained from environmental sample
  DOMAIN (24)...(206): Xylose isomerase-like TIM barrel
  misc_feature (1)..(345): Xaa is any amino acid
MYCFHDRDVAPEGATPAESEKNLFTLVAKAKKLQKATGVKLLWGTANVFSNPRFMNGAATNPEFGVVALAATQVKAAIDATIELGGQGYTFWGGREGYMSLLNTDLKKEKENLARFLTMARDYGRKQGFKGPFYIEPKPMEPTKHQYDFDTETVIGFLRQWGLEKDFRMNIEANHAELAGHEFAHELETAAAAGFFGSVDANRGDAQNGWDTDQFPYSYYETAMAMYAILKAGGFTTGGLNFDSKIRRNSVDPADLFIAHIGGMDAFAVGLEVANRIIVDGKIPSFVKKRYASFNTGDGVKFSKGQMTLEQLAEIGAKAGYGKTGLTSGKQEYLENILNQYLFGL

SEQ ID NO: 31743 - DNA, 402 bp, Unknown
  Obtained from environmental sample
  misc_feature (1)..(402): n is a, c, g, or t
atggtctcgcagaccgtttgggcaagctcgatcccgccttcgccgcctttggcgaagacctcggcgagcggcgccgggacgcccgtttcggcgcatatatcttgtatggccgctatctcggcttgggtatcggtatggaagcggtttaccgctacgaccgccgggacgccgaacttgcggatgttttcgatgtgcaccttcaggttctccgcgccttttttgagggcgtcgatgttttcgtggttcagttctgtcttggggacgccgccgttgtacttcagggcgcgggcggtcgccactatgacggcgcacgagggtttcaggccggcacagcggcacttgatatcgaagaacttttccgcccccaagtcggagccgaatccggcctcggtgacgcagtaa

SEQ ID NO: 31744 - protein, 133 aa, Unknown
  Obtained from environmental sample
  misc_feature (1)..(133): Xaa is any amino acid
MVSQTVWASSIPPSPPLAKTSASGAGTPVSAHISCMAAISAWVSVWKRFTATTAGTPNLRMFSMCTFRFSAPFLRASMFSWFSSVLGTPPLYFRARAVATMTAHEGFRPAQRHLISKNFSAPKSEPNPASVTQ

SEQ ID NO: 31745 - DNA, 1041 bp, Unknown
  Obtained from environmental sample
  misc_feature (1)..(1041): n is a, c, g, or t
gtgctcaagaaaaaggactggatggttgacacagacgagttgttggagttctgcaagaagacgaacacgacgccgatgatcacggtaaacttcggcaccggtacgccggaagaggcggccaagtgggtgaatcacgttaacaaggtaaagaaggccaatgtgaagtattgggagataggcaacgagctctacggcgactggcacgcaaaccattgcacgccggaggagtacggcaagcgcgcaagagagtttgcgaagcagatgaaagcggtggatccgagcatcatcgtcacggcggtctggatgcttgagggcgagtggaacaagaagagttttgagcaactgaaagacgtagtggacggtgtaaacgtccaccactacccgcagggtacgggtcaggagaacgacgcggggcttttggccgcgccgcagaccctaaacgagatactgccgagcgtgcggaagcagcttgagagttacggcgtggccggcaagaagtacgagatctggcttacggagtggaactcggtagactttaaaccggggccccagacattgggtatcgtcaacggcttgtttgtggccgactaccttgggatgctgacgcaccacaacatagaccaggcgtcgtattgggatgttcacaacagcatcaccccggagggcggcgactacggctacctgtcgcgtaccggcgcgccggacggcgacaacgtggcgcgcccttcgtattgggcgttcaagatggcgagccacagtttgggccgcgggtcgctcttagagtcgagcaccgggaatgaccgtgtgtcgagctactacacgctggacggcaagaaaaagtcgctcatgatcatcaacaagcaccccaaaagcgtggcggatgttacgatcaacataccgagtttccaaggcaaagccaagaagctattgttgaacggggaaaacgccaagaaagggccggcggaggagtctattgaggtaaagccggggatgaaactctctatgccggcgcactctatggttactattacccttgagtaa

SEQ ID NO: 31746 - protein, 346 aa, Unknown
  Obtained from environmental sample
  DOMAIN (223)...(339): Alpha-L-arabinofuranosidase C-terminus
  misc_feature (1)..(346): Xaa is any amino acid
MLKKKDWMVDTDELLEFCKKTNTTPMITVNFGTGTPEEAAKWVNHVNKVKKANVKYWEIGNELYGDWHANHCTPEEYGKRAREFAKQMKAVDPSIIVTAVWMLEGEWNKKSFEQLKDVVDGVNVHHYPQGTGQENDAGLLAAPQTLNEILPSVRKQLESYGVAGKKYEIWLTEWNSVDFKPGPQTLGIVNGLFVADYLGMLTHHNIDQASYWDVHNSITPEGGDYGYLSRTGAPDGDNVARPSYWAFKMASHSLGRGSLLESSTGNDRVSSYYTLDGKKKSLMIINKHPKSVADVTINIPSFQGKAKKLLLNGENAKKGPAEESIEVKPGMKLSMPAHSMVTITLE

SEQ ID NO: 31747 - DNA, 537 bp, Unknown
  Obtained from environmental sample
  misc_feature (1)..(537): n is a, c, g, or t
atgcaaaaacctgcgtcaaaaaaggaaaaacgtaaacctttttcacgtttacttgtaattatttcctctgtaatcgcgtgttttcttattattattccggtattaatcggcgttttcatgtattttaacgccccatcttcgccgcgtcaggacagcgtaatatctgaacttagctatgcgccgcctgacggcatttcaaaagaagacgacggttcttattacgttgaagtccgaaaaggggaaagcgcccaatcggtaggaaggcggctggaaagatcgggccttattaaaagcgcgtttttttggaatataatatgccgttttaacaaagggcagataaaaacaggaacttaccgcattgaaatccccgcaagccagatcgcgattcaccgtattcttgttttaggtaggcaaattttatacagggtgacaattcccgaaggggtaacgcttaaaaaaacagcatcgattcttgaagaagcgggcatttgcccgcgaatgattttctttgaggcgcaaaagatccgtctgttttag

SEQ ID NO: 31748 - protein, 178 aa, Unknown
  Obtained from environmental sample
  misc_feature (1)..(178): Xaa is any amino acid
MQKPASKKEKRKPFSRLLVIISSVIACFLIIIPVLIGVFMYFNAPSSPRQDSVISELSYAPPDGISKEDDGSYYVEVRKGESAQSVGRRLERSGLIKSAFFWNIICRFNKGQIKTGTYRIEIPASQIAIHRILVLGRQILYRVTIPEGVTLKKTASILEEAGICPRMIFFEAQKIRLF

SEQ ID NO: 31749 - DNA, 594 bp, Unknown
  Obtained from environmental sample
  misc_feature (1)..(594): n is a, c, g, or t
ttgatggccagcggcgatgatgatgatattgatgatgaaaagccggaaaacttgcaggagcttttggccgggaagatgctcaaaaccaggaccatcctgctttcgggcgaaatccgcaaaggccttgccgagaagaccatacgccagcttctcctgatggaagcgaccggcaatgaacccgtgcgtatatttatcgactcgcctggcggagacgccgacgctggttacgccatttttgacatgatcaggttcataaagcccccggtatggactataggcatggggctcgtggcaagcgccgcggccattatacagcttgccgcgccgaaagaccggcggctgggactgccaaacagccattaccttatacaccagcccctttccggcatacgcggcgtcgccaccgacattgaaatccacgcaagggaacttgaaaaactgcgggcgaagataaaccacctcatagcggaagaaaccggcaaccctgtcgaacaggttgaaaaggacaccgaccgcgactactggatgagcgcccaggaagccgtcaagtacggcttgatcagcaaggtgattataaatagagacgagatgtaa

SEQ ID NO: 31750 - protein, 197 aa, Unknown
  Obtained from environmental sample
  DOMAIN (17)...(194): Clp protease
  misc_feature (1)..(197): Xaa is any amino acid
MMASGDDDDIDDEKPENLQELLAGKMLKTRTILLSGEIRKGLAEKTIRQLLLMEATGNEPVRIFIDSPGGDADAGYAIFDMIRFIKPPVWTIGMGLVASAAAIIQLAAPKDRRLGLPNSHYLIHQPLSGIRGVATDIEIHARELEKLRAKINHLIAEETGNPVEQVEKDTDRDYWMSAQEAVKYGLISKVIINRDEM

SEQ ID NO: 31751 - DNA, 822 bp, Unknown
  Obtained from environmental sample
  misc_feature (1)..(822): n is a, c, g, or t
atgttcccgcttagcaaacttgcggcattaccaagacaccagcgtctgcgaaaagcggcgaaaatttttgaaggggctgaactcaggttaatcacacttggcaagcttccggctgacgaaattgagtatctaaaatctctggcaaatcaacttgctgaaaaagaagattttagtcaggcggctgtagaacttcttgaaaaagcccaatcaggttttacccttcaaagcgaaacccgcaggacgctgaacagcgtttaccatcttcttcttttagagacaggccgtaccaaagcggattgggattttatcaattcgccgggcgttcttgatccttcaaagcggcggcctttcgccggcatgcaggtgtatcttgaagatatccgatcaccttttaacgttggttccatgttcagggccgccgaatctttcggggctgaaaagctctggctttccccgttctgcgccgatccccgtcacaagcgggccgaacgcacagcgatgggctgcgtcgatgtccttccctgggagcgtttatcccacgatccctttgccggccagcgtgaaaaatttaccggggaggcaatctttgcccttgaaaccggcggcacaccgcttgaggactttccatttccaaaacagggaatattaatcgccggttccgaagagttaggcgtaagtccaaacgccctcgccgccgccgatgcctctctcggaagggtcagcatcagcacctacggcgcgaaaggctccctcaacgtgtcggtagccttcgggattgtaatgcaggcctgggcaagcaacaaaataaaagagaaaaaataa

SEQ ID NO: 31752 - protein, 273 aa, Unknown
  Obtained from environmental sample
  DOMAIN (119)...(262): SpoU rRNA Methylase family
  misc_feature (1)..(273): Xaa is any amino acid
MFPLSKLAALPRHQRLRKAAKIFEGAELRLITLGKLPADEIEYLKSLANQLAEKEDFSQAAVELLEKAQSGFTLQSETRRTLNSVYHLLLLETGRTKADWDFINSPGVLDPSKRRPFAGMQVYLEDIRSPFNVGSMFRAAESFGAEKLWLSPFCADPRHKRAERTAMGCVDVLPWERLSHDPFAGQREKFTGEAIFALETGGTPLEDFPFPKQGILIAGSEELGVSPNALAAADASLGRVSISTYGAKGSLNVSVAFGIVMQAWASNKIKEKK

SEQ ID NO: 31753 - DNA, 393 bp, Unknown
  Obtained from environmental sample
  misc_feature (1)..(393): n is a, c, g, or t
ttgctggaaatggttaattgccatgactgcggcgctttgatcaacccaaaaaccgccgaagcgcaggttcacggcggcatgagcatggcgataggctttgggctgtacgagaagatgttatacgatcccaaaaccggaaaactcctcaacggcaacctgcttgactacaaactgccgacgataatggatcatccaaggcttgaggccgaatttatcgaaaaccgtgaaccgaccagcccttacggaacaaaggccctcggcgaaccgccgaccgtgccgggcgcttcggctattcgtaatgccgtgcttcacgcaacgggcattgggatcaataccattccgcttacacctcatgtgctttttacggaattcagcaaagccggattaatataa

SEQ ID NO: 31754 - protein, 130 aa, Unknown
  Obtained from environmental sample
  misc_feature (1)..(130): Xaa is any amino acid
MLEMVNCHDCGALINPKTAEAQVHGGMSMAIGFGLYEKMLYDPKTGKLLNGNLLDYKLPTIMDHPRLEAEFIENREPTSPYGTKALGEPPTVPGASAIRNAVLHATGIGINTIPLTPHVLFTEFSKAGLI

SEQ ID NO: 31755 - DNA, 597 bp, Unknown
  Obtained from environmental sample
  misc_feature (1)..(597): n is a, c, g, or t
ttgaaacttgcggcggggcttttggttccagggcagggagaagttttttacaaaggaaagaacattgcgcagatgaaccgcagtgaaaatcttgatttccgccgcgaaggatcgtttgtttttcaggactcggctctttgggcaaaccaggacctgtatcaaatactggaacttccccttaaaattcattacccgtccatgacaaaatgggaacgcgccaagcgtatcagggaaacaactgcaagggtcggttataaaagggaacttggtataagaccgtcaaggctttcaatgggcgagcagaaacttattgcctttgcgcgggcattgctttgcgagccttctcttctctttctggacgaatggactgaatcgctggatgaaaacgcggcggacaggcttatcgatattgtccgtaagaagcaaagggaaggctcttccgttatttttgtaagccatgatatgcggttaattattgatttagccgattttgtagtaatggtggttgacggtaaggtaacaataaaggctccaaaagattatattattagtgatctattactcaatgattttttgaaaataggaatagcgtcatga

SEQ ID NO: 31756 - protein, 198 aa, Unknown
  Obtained from environmental sample
  DOMAIN (1)...(171): ABC transporter
  misc_feature (1)..(198): Xaa is any amino acid
MKLAAGLLVPGQGEVFYKGKNIAQMNRSENLDFRREGSFVFQDSALWANQDLYQILELPLKIHYPSMTKWERAKRIRETTARVGYKRELGIRPSRLSMGEQKLIAFARALLCEPSLLFLDEWTESLDENAADRLIDIVRKKQREGSSVIFVSHDMRLIIDLADFVVMVVDGKVTIKAPKDYIISDLLLNDFLKIGIAS

SEQ ID NO: 31757 - DNA, 429 bp, Unknown
  Obtained from environmental sample
  misc_feature (1)..(429): n is a, c, g, or t
atgtttgccctattttttgcgcaaagttgcacgggcctttcttccctttctaaaaaaagcctttctttatacctgggcccaaaaaaaaaaaaaacccccctttcccccaaaaaaaaaagggcccccacccaaaaaaaaaaaacccccccccaaccccccccggaaaagaaaccccccctttgggcttttaaaaattttttcccaccaaaaaaccttttggggccccacctaaaaaaaaaatatacccggcccccccccttttttttttttgggggggaaaaaacaaaaaattttttttttttttttagccccccccccccccccctttttttttttaaaaaaaaccccccccccccaaattttttttttgggggggggggggaaaaaaagggaagggggggtttctggggggggataaaaaatttttga

SEQ ID NO: 31758 - protein, 142 aa, Unknown
  Obtained from environmental sample
  misc_feature (1)..(142): Xaa is any amino acid
MFALFFAQSCTGLSSLSKKSLSLYLGPKKKKTPLSPKKKRAPTQKKKTPPQPPPEKKPPLWAFKNFFPPKNLLGPHLKKKYTRPPPFFFFGGEKTKNFFFFFSPPPPPLFFFKKNPPPPNFFFGGGGEKKGRGGFWGGIKNF

SEQ ID NO: 31759 - DNA, 876 bp, Unknown
  Obtained from environmental sample
  misc_feature (1)..(876): n is a, c, g, or t
atgatcagatcggccgagctttatgctgctgaaaattcggtttcgctggcttcggaaattatcaggctggaaaagcttggcgcaagctccccctctgcccaggagcggcacagtgcttttatggcccttgcgaggctttttcagctttccggaaataacgaggcggcccttaaagcctgggaaagcgcgcttaagatcaacagcggcgacgggcgctcgcttttggaaaaaagccggctattaatttccctgggagaatatgaaaaagcccttgagcccctgacggcaatattctctggcagctacagtaagggttttatacttgaagctcgctttttggttgcccagcttgaggcgtttcgttccggcaacttacggctgcttgcctccctggcagatgaaagcgatttttacgaataccgcccgataatttactataccctctggaagattgaacaaaacccggcgtggaaaacttttttagccaaagatttctctttaagcccggaagcaaaaataaccgccggtaaagcgcttcaggcccagacgccgctatggatacttttccccggcagggaagacatcggcttaaccagcctaacccagtcagttcctccaattgcagcggccatgccatcaccggatccggcggcaatcgggacagttctccaggccggtctcttcagccgtgaagaaaacgccctcgcattttccgagaagatcatcaaagcgggtttccagaccattgttcaaacgaagctgcaaaacagcgctacttactgggttgtctatgttccgtacggctccgacatgaacgcgatgattaaaaaactaaaagacgccggcttcgagtccttcccagtaacgctgaactaa

SEQ ID NO: 31760 - protein, 291 aa, Unknown
  Obtained from environmental sample
  DOMAIN (217)...(289): Sporulation related domain
  misc_feature (1)..(291): Xaa is any amino acid
MIRSAELYAAENSVSLASEIIRLEKLGASSPSAQERHSAFMALARLFQLSGNNEAALKAWESALKINSGDGRSLLEKSRLLISLGEYEKALEPLTAIFSGSYSKGFILEARFLVAQLEAFRSGNLRLLASLADESDFYEYRPIIYYTLWKIEQNPAWKTFLAKDFSLSPEAKITAGKALQAQTPLWILFPGREDIGLTSLTQSVPPIAAAMPSPDPAAIGTVLQAGLFSREENALAFSEKIIKAGFQTIVQTKLQNSATYWVVYVPYGSDMNAMIKKLKDAGFESFPVTLN

SEQ ID NO: 31761 - DNA, 720 bp, Unknown
  Obtained from environmental sample
  misc_feature (1)..(720): n is a, c, g, or t
atgagttttaacctgcggggcggggaaattctgggcattgtgggagtcgagggaaacggccagcgggaactggttgaatcggttaccggactgcgtaaacccgacacgggaatcgttgaaatccggggcaggaatattcaacccctatcgataaaacagatacggaacgccggactttcccatatcccccaagaccggatgaacaggggagtcgctctttcttcctcagtggaagaaaacctgatttcggtattgtttaacagcgatgagttttccagagggccgtttctggacattaaaaaaataggtatccattccgaagaacttatccgggattttctgattaaagttgcttctccgcaagtgccggtaaaaatgctgtccggaggcaatattcaaaaagtggttgttgccagggagttttcaaccggagggatctgtattgtggcagatcagcctaccaggggcatagatgtgggagcggcccagtttatccataaaaaactccttcagttaagggaagaaggcgcggctattcttcttgtttccgcagatctgtcggaagttatcgatattagcgatcaacttttggttatgtacggaggaagaacagcggcgttctttacccgcgcatccgatgtcagtgaggaagaattgggcctttatatgctggggcttaaaaaacagtctaaagaggagctgcaaaagagtatccaatga

SEQ ID NO: 31762 - protein, 239 aa, Unknown
  Obtained from environmental sample
  DOMAIN (8)...(202): ABC transporter
  misc_feature (1)..(239): Xaa is any amino acid
MSFNLRGGEILGIVGVEGNGQRELVESVTGLRKPDTGIVEIRGRNIQPLSIKQIRNAGLSHIPQDRMNRGVALSSSVEENLISVLFNSDEFSRGPFLDIKKIGIHSEELIRDFLIKVASPQVPVKMLSGGNIQKVVVAREFSTGGICIVADQPTRGIDVGAAQFIHKKLLQLREEGAAILLVSADLSEVIDISDQLLVMYGGRTAAFFTRASDVSEEELGLYMLGLKKQSKEELQKSIQ

SEQ ID NO: 31763 - DNA, 666 bp, Unknown
  Obtained from environmental sample
  misc_feature (1)..(666): n is a, c, g, or t
ttgagtcttacggaatgcgttcaaaagaaaacgcgcaggactacccgctatttcccggagcctgacctactgccaatggagattgacgactgttggcttgcaaacgttagaaaaaatctaccggaactggcgcatcagaaacgcgaacgctactaccgcgattttaaaatcccagaatccgaagcggcggttctgaccgttcataaaaacatntgcgatctgttcgagactatcgcgcagaagagcggacagcccgtagaaactgcgcatcttttaactggtgaaatcatgcggctgatgaacaatgccaatgttttgccggaagatttggctattgacgccgacaaactttccactctcattacccttattacaaacggaaaaatcaaccgaagcgcgtataaagaaacagttgaagcggtattcacgaataatgttgatcctgaaaaatacatcgccgaaaagggattactcatgatcaatgacgacaacgccgttattacagcggtgaaagcagttataactgagaatcaaagctcggttgccgaataccgcgccggtaaggaaaaagtgtttgggtttttaatgggtcaggttatgaaaaaacttggcggaaaagggaatcccgacatggcgaagaaagtgctggaagacgcgttgagatag

SEQ ID NO: 31764 - protein, 221 aa, Unknown
  Obtained from environmental sample
  DOMAIN (9)...(71): PET112 family, C terminal region
  misc_feature (1)..(221): Xaa is any amino acid
MSLTECVQKKTRRTTRYFPEPDLLPMEIDDCWLANVRKNLPELAHQKRERYYRDFKIPESEAAVLTVHKNXCDLFETIAQKSGQPVETAHLLTGEIMRLMNNANVLPEDLAIDADKLSTLITLITNGKINRSAYKETVEAVFTNNVDPEKYIAEKGLLMINDDNAVITAVKAVITENQSSVAEYRAGKEKVFGFLMGQVMKKLGGKGNPDMAKKVLEDALR

SEQ ID NO: 31765 - DNA, 306 bp, Unknown
  Obtained from environmental sample
  misc_feature (1)..(306): n is a, c, g, or t
gtgtatgataatataagggaaacagatacatacaaggcatggtataaagagctaaaagacattcgtgccaaagctcgtattgacatgagaattaaaagactttcgcagggtaacgcaggcaatgtaaaacctataggcagaggctgttcggaaatgataattgattatggaccgggttatagagtttattttaaggataccggaaagataatttatgttttattgtatggcggtgataaaagcactcaggacaaggatataaaaaaagccttggaattagcagaaaatttggaggaatttttatga

SEQ ID NO: 31766 - protein, 101 aa, Unknown
  Obtained from environmental sample
  DOMAIN (46)...(97): Phage derived protein Gp49-like (DUF891)
  misc_feature (1)..(101): Xaa is any amino acid
MYDNIRETDTYKAWYKELKDIRAKARIDMRIKRLSQGNAGNVKPIGRGCSEMIIDYGPGYRVYFKDTGKIIYVLLYGGDKSTQDKDIKKALELAENLEEFL

SEQ ID NO: 31767 - DNA, 306 bp, Unknown
  Obtained from environmental sample
  misc_feature (1)..(306): n is a, c, g, or t
ttgatgactttccaaaaactttttattactaacttaaaagtttttcgaaaagtacgcaatatttcaccggggaaacttgcggaaatatgcgctgcggggcaaaattatattgaggatattgaagcgggaaaactattcccgtcactcgatatgatcgaaaaaatagcggctgcgctggaaattgaaccgtatcgtttgtttcaggataatgactcaacagactctaaaactttaacgccgttacaaaagcaggaaattatcaatatgttatacaaggctgcttctgaaattatttataattattga

SEQ ID NO: 31768 - protein, 101 aa, Unknown
  Obtained from environmental sample
  DOMAIN (12)...(66): Helix-turn-helix
  misc_feature (1)..(101): Xaa is any amino acid
MMTFQKLFITNLKVFRKVRNISPGKLAEICAAGQNYIEDIEAGKLFPSLDMIEKIAAALEIEPYRLFQDNDSTDSKTLTPLQKQEIINMLYKAASEIIYNY

SEQ ID NO: 31769 - DNA, 558 bp, Unknown
  Obtained from environmental sample
  misc_feature (1)..(558): n is a, c, g, or t
ttgatcagatcggccgaggtgggcacgaaacgcggatatcgattcaggcttgcgtttatgtcgaagctggcgcaaaaggcaaaagctctggacgactcacggcttgtgtctgcggcctgccttatcaaccacgagaaacttctaattcaggatcgccttgctgattttcttgacgtgattggaatcaacgaatattacggctggtatagtccgaattttgaccacctgcctaagatattcgcgaattccaatcccggaaagcccgtgcttgtctgcgaattcggcgcggacgcccgcctgggacagcggggaagcgtggacgagctttggactgaagacaaacaaaaacggctttatgaacagcaggtggaaaccttcaagaagtgcccctacatagccggtacgactccctggatactgtacgatttccgctgtccccggcggctcaaccgctaccaggagggctttaaccgaaagggccttatcgacgccgagcgcaaaaccaaaaagcccgcgttttatgtgatgcagaaattctacgaggagatgaatctataa

SEQ ID NO: 31770 - protein, 185 aa, Unknown
  Obtained from environmental sample
  misc_feature (1)..(185): Xaa is any amino acid
MIRSAEVGTKRGYRFRLAFMSKLAQKAKALDDSRLVSAACLINHEKLLIQDRLADFLDVIGINEYYGWYSPNFDHLPKIFANSNPGKPVLVCEFGADARLGQRGSVDELWTEDKQKRLYEQQVETFKKCPYIAGTTPWILYDFRCPRRLNRYQEGFNRKGLIDAERKTKKPAFYVMQKFYEEMNL

SEQ ID NO: 31771 - DNA, 345 bp, Unknown
  Obtained from environmental sample
  misc_feature (1)..(345): n is a, c, g, or t
atggattttcaattgaaaggctccgacagggagtgggcagaaacgatctttgaaaagctcaacgctaaactgaaagccgaatgtataaggctggggaatacaattccctatattgcaaaagacggtcattatagcgacattgacacaggcgaaagcatttactggtggactaacggtttttggccggggatgctttggcagatgtaccacgccacaaaagaaaccggcgatccccgttattcgcaaattgcccagtgccacgccgataccgcgctgaacgtcattgcccgccctgacggaagctgcaatcacatcgtcgtcctttcagttgaaacaggcgagtga

SEQ ID NO: 31772 - protein, 114 aa, Unknown
  Obtained from environmental sample
  misc_feature (1)..(114): Xaa is any amino acid
MDFQLKGSDREWAETIFEKLNAKLKAECIRLGNTIPYIAKDGHYSDIDTGESIYWWTNGFWPGMLWQMYHATKETGDPRYSQIAQCHADTALNVIARPDGSCNHIVVLSVETGE

SEQ ID NO: 31773 - DNA, 1209 bp, Unknown
  Obtained from environmental sample
  misc_feature (1)..(1209): n is a, c, g, or t
atggaaaatactgaaactgccgttgctctatgcgcggtcggcgctgaaaaagttgtctcaaatgaattacgaaagctaaacctgaaagttgacgattcgctttacggcagagtgcgtttcagggcggatataacaggtctgtaccgggcattgatagggcttcgcgccgccgacagaatactgctggaaattgccaattttaaggcggcggattttgatgcgctttttgaaggaactgccgccgcaaactgggagaggattgttcctaaaggcatgggtctcaaggttgcgaaggttcgctccaacagatcgcagttaaaagcggaaacgagtattcaagcgatagttcacaaagcggcggcgcagcgtctgtgcggtaaatacaaagttaaccggcttcccgaattttcgcaaggttcgcctgtcaaaactgcggaagtgagagtgtatgtcgaaaaagacatggtttcgctgcttgtagatttaagcggtaagccgcttttcaagagaggctaccgaagtgagggcggagccgcgccgctgagggaaacaacggcggcttcactgcttttattgtcaggctggaaacggaaattccccctttatgatccgttttgcggttccgggacaattttgatagaagccgcaatgtacgcatgggacatggctcccggtcttggcagaaaattcgccgttcaggatatgctgatagcggatgcagaaattgaacaacaggtacgcaatgagttctgcgctaaaattgattttggcggtgcggacggagggcggcttgtcagaatagcggggagcgatgaagacctgcgttcgatatcaattgcggcatcgaatgcggcgcgtgtacgagacattgcggagggaagggaaccgcagagagggattcgcgctacggataaatctttggggttggagttaaaagttctccccatggcgcaagcgcagtctccgtatacggacgccggtttgttgataaccaatcctccgtatggaaaacggcttggcgaccaatctgcggcggaacagatatacaaggatatggcgggttttgctcaacgtttttcaggatggaaatttgccgtgataactgacagcagcggttttgaaagtttttatgggaaaaaagcggactcatgtcgtgaaataagtaatggtgcaataccttcctttttttatcaatatgatgtaatatag

SEQ ID NO: 31774 - protein, 402 aa, Unknown
  Obtained from environmental sample
  DOMAIN (170)...(398): Putative RNA methylase family UPF0020
  misc_feature (1)..(402): Xaa is any amino acid
MENTETAVALCAVGAEKVVSNELRKLNLKVDDSLYGRVRFRADITGLYRALIGLRAADRILLEIANFKAADFDALFEGTAAANWERIVPKGMGLKVAKVRSNRSQLKAETSIQAIVHKAAAQRLCGKYKVNRLPEFSQGSPVKTAEVRVYVEKDMVSLLVDLSGKPLFKRGYRSEGGAAPLRETTAASLLLLSGWKRKFPLYDPFCGSGTILIEAAMYAWDMAPGLGRKFAVQDMLIADAEIEQQVRNEFCAKIDFGGADGGRLVRIAGSDEDLRSISIAASNAARVRDIAEGREPQRGIRATDKSLGLELKVLPMAQAQSPYTDAGLLITNPPYGKRLGDQSAAEQIYKDMAGFAQRFSGWKFAVITDSSGFESFYGKKADSCREISNGAIPSFFYQYDVI

SEQ ID NO: 31775 - DNA, 351 bp, Unknown
  Obtained from environmental sample
  misc_feature (1)..(351): n is a, c, g, or t
gtggacgaaggcattgccagggagcttgccagaatcaacctgcccctttcgctctacaccgagtggtattggcagatagatctgcacaacctctttaatttcctgaaactccgcctggacgcgcacgcccaaaaagaaatccgcctttacgccgagcttctttttgagatcgcaaaaaaggtgacccccaggtgctgcgaatcgtttaaaaagcatattcttgatggggtgcgcttttccggcaacgagatggcggaattacaacggcgtcttgacggaaagagcggcgggctttcagggaaagacttggaacgctttgaagaaaaactaaaaagcggcagacagatgtag

SEQ ID NO: 31776 - protein, 116 aa, Unknown
  Obtained from environmental sample
  misc_feature (1)..(116): Xaa is any amino acid
MDEGIARELARINLPLSLYTEWYWQIDLHNLFNFLKLRLDAHAQKEIRLYAELLFEIAKKVTPRCCESFKKHILDGVRFSGNEMAELQRRLDGKSGGLSGKDLERFEEKLKSGRQM

SEQ ID NO: 31777 - DNA, 351 bp, Unknown
  Obtained from environmental sample
  misc_feature (1)..(351): n is a, c, g, or t
ttggatcacgcggcggctgttgccgcgcttaccggcccacaagatacagtcgcgcaaaaccgcctggcctaccgccagcgccgcgacgcattctgcgcgatgctttctaaaaacggctggaacgttccaatgacgccagctactatgtttacctggtttcccatgcctgttaaaaatatgtccagcgaggctttttgcatggatctgctggaaaaagcgggcgtcatctgtgttcccggctcaagtttcggcgaaggcggtgaaggttggctccgctttgcgctcatccagccgccggaaaggcttgaagaagctgcgcgcagaatcggcgagtacttaaaaaaacaatga

SEQ ID NO: 31778 - protein, 116 aa, Unknown
  Obtained from environmental sample
  misc_feature (1)..(116): Xaa is any amino acid
MDHAAAVAALTGPQDTVAQNRLAYRQRRDAFCAMLSKNGWNVPMTPATMFTWFPMPVKNMSSEAFCMDLLEKAGVICVPGSSFGEGGEGWLRFALIQPPERLEEAARRIGEYLKKQ

SEQ ID NO: 31779 - DNA, 849 bp, Unknown
  Obtained from environmental sample
  misc_feature (1)..(849): n is a, c, g, or t
atggaatttgaggagcgtatttttaccattaccgcgcatcctgccgatctgcgggaaaaacttaccgcggcaaaggccaacatgaaagacctcggttcggtcaaccttatggccccggaagaatttgccgagaccaaggaacgctatgaatttctgagtaaccagatagccgacctcgaaaaagcccgcaaagaccttgaggatcttaccgccgaaatccgtacggaatcctcggaactgtttaccaaaacatacaaccgcattaaaaagaattttcataatatgttccgccgtcttttcggcgggggccgggcggaattgcagctttccgacatcaaccatgttcttgaatcgggcatagaaatttttgcccagccgcccggcaaaaagctggaacatatttccctgctttccggcggtgagcgttccatgaccgccgttgccctgctgtttgcaacttacatggtaaaacccagtcccttctgtctgctggatgaaattgacgccgcgctggacgaggccaacgtaggccgctttgtgcagcttttgcgggaatttggcagtacaagccagtttattatcattacccacaataaaaaaaccgttaccggagcgggtacgcttctgggcgttaccatggaagaatccggcgttaccaaacttatttcggtacggcttgaacatggggaattggcgcaagttgatgaagaaccgccccagcagggtttgtgggacgaagaagacgtggaaaccgaagaaggccgcgaactgccccccggcatggatgatccgtccaaagttaccgaagcccaacttcgtccggtacgagcttcccatcccgcctcataa

SEQ ID NO: 31780 - protein, 282 aa, Unknown
  Obtained from environmental sample
  DOMAIN (94)...(214): ABC transporter
  misc_feature (1)..(282): Xaa is any amino acid
MEFEERIFTITAHPADLREKLTAAKANMKDLGSVNLMAPEEFAETKERYEFLSNQIADLEKARKDLEDLTAEIRTESSELFTKTYNRIKKNFHNMFRRLFGGGRAELQLSDINHVLESGIEIFAQPPGKKLEHISLLSGGERSMTAVALLFATYMVKPSPFCLLDEIDAALDEANVGRFVQLLREFGSTSQFIIITHNKKTVTGAGTLLGVTMEESGVTKLISVRLEHGELAQVDEEPPQQGLWDEEDVETEEGRELPPGMDDPSKVTEAQLRPVRASHPAS

SEQ ID NO: 31781 - DNA, 624 bp, Unknown
  Obtained from environmental sample
  misc_feature (1)..(624): n is a, c, g, or t
atgccgggcatagacggtatacaacttgcccgcgaaataaaagcgcgaggagctaaaaattccattgtaaccatgatttccgccgccgaatggggcgcgattgccaaagaagcaaaagcggcgggtgttgataaattcctgtcaaaacctattttcccttctaccatcgcagaagtaatcaatgaatgtctcggcgtcaagcaacaaacggaaaaaacgcagacggctgatattaacggtatatttgcccggcggcgcatattgctggctgaagatgtggaaattaaccgtgaaattgtactgactttgcttgaaccgacacagttggagatagactgcgctgaaaacggcgcagaagcggtccgtatgtttaccgaagccccggacaaatacgacatgattttcatggatatacagatgccggaaatggacggctatgaagcgacacggcgtatcagagaactggataatccgaaggcaaaaacaattcccattattgccatgacagctaacgtattcaaggaagatattgagaaatgccttgcctccggcatgaacaaccatgtaggcaagccgctggattttgaggaagttatgaaccgtctgcgttcatacttaggctga

SEQ ID NO: 31782 - protein, 207 aa, Unknown
  Obtained from environmental sample
  DOMAIN (85)...(203): Response regulator receiver domain
  misc_feature (1)..(207): Xaa is any amino acid
MPGIDGIQLAREIKARGAKNSIVTMISAAEWGAIAKEAKAAGVDKFLSKPIFPSTIAEVINECLGVKQQTEKTQTADINGIFARRRILLAEDVEINREIVLTLLEPTQLEIDCAENGAEAVRMFTEAPDKYDMIFMDIQMPEMDGYEATRRIRELDNPKAKTIPIIAMTANVFKEDIEKCLASGMNNHVGKPLDFEEVMNRLRSYLG

SEQ ID NO: 31783 - DNA, 759 bp, Unknown
  Obtained from environmental sample
  misc_feature (1)..(759): n is a, c, g, or t
atgggcagctacaaactgaataaaataatcgccgaccggaagcataagaaaatttatcttgacggtgacaaggtgataaaactcatgggcgaggaataccccgcgcccgacgtgctttccgaagcgcacaaccttgccgcggtgggagaaaccgccctcaaggttccccgcctggtagaggtaacgaaaatagacggcaagtgggcggtagtgtgggaatatgtcgcgggaaccactcttgcccagcttatggaaaaaaacaaggacaaggaacggcaatatcttgaacgctttgttgacatccagcttgacatgcatcgccatagcgcgacaaggcttccgcggcttaccgaaaagatggaacgcaagataaaagcttccagccttgacgcgaccgcccgttatgaaattttgggaaggctggcaagtatgcccaaacacaccaaactctgccacggcgactttaacccaagcaacattgttatcaccgacaaggacgaggcgtacataatcgactggtcccatgccacccagggtaacgcctcggcggacgcggcgcacacttatatgttgttctggctttcgggcaacgccgcgcttgcggacaaataccttgcgctgttctgcaaaaagagcggcacgacaaagcagtatgtggagaagtggctgtctattgtggcggcgtcgcagcttccgaaagcgaaggcggaggagcgggaacttctgttgctttgggcgaatgttgtagagtatgcataa

SEQ ID NO: 31784 - protein, 252 aa, Unknown
  Obtained from environmental sample
  DOMAIN (60)...(186): RIO1 family
  misc_feature (1)..(252): Xaa is any amino acid
MGSYKLNKIIADRKHKKIYLDGDKVIKLMGEEYPAPDVLSEAHNLAAVGETALKVPRLVEVTKIDGKWAVVWEYVAGTTLAQLMEKNKDKERQYLERFVDIQLDMHRHSATRLPRLTEKMERKIKASSLDATARYEILGRLASMPKHTKLCHGDFNPSNIVITDKDEAYIIDWSHATQGNASADAAHTYMLFWLSGNAALADKYLALFCKKSGTTKQYVEKWLSIVAASQLPKAKAEERELLLLWANVVEYA

SEQ ID NO: 31785 - DNA, 951 bp, Unknown
  Obtained from environmental sample
  misc_feature (1)..(951): n is a, c, g, or t
ttgttatcgcggcgccgagcatnattgaaaagcggtggaaaatacaatatcttcgcgaaactgtcgcccagtcagaaagcccgcattgtaatggccttgcgcgacaacgggcatatcgtagggttcatgggcgacggcatcaacgacgccgccgcgatgagggctgccgacgtaggcatctctgttgacaccgcggttgacatcgcgaaagagtcggcgaacatcattcttttggaaaaagaccttatggtgctggaagaaggcgttattgagggcagaaaaatttacgccaacattatcaaatatattaaaatgacggcaagttccaacttcggcaacatgttctccgtccttgcggcaagcgccttcctccccttcctgcctatgcttcctattcaaattcttgttttgaaccttatctacgacatttcctgcatagcgattccgtgggataatgtcgatcttgatttcctgcgcaaaccgcgaaaatgggacgcttccagtatcagccgatttatgatgtggatagggcctgtaagctcggtttttgacattgcgacatacttcctgctctttttcgtaatatgtcctctctttgccggcggcgcattcaacgcccttgacgaagaatcgcgcgagatatttattatgcttttccactccggctggtttgtggaatccctttggtctcaaactttggttattcacatgatccgcagtcccaagattcctttcattcaaagcagggcttccatacagctaacgctgcttaccactttgggaatcgccataggcacaataattccctacacatggctcggctcgcaattgcacatggcgcacctgccgttatactacttcccctggctgtgcgcgataatactttcatacatgctgctcgcgacggtaatgaaaaaggtgttcgtttggaaatacggggaattgttgtaa

SEQ ID NO: 31786 - protein, 316 aa, Unknown
  Obtained from environmental sample
  misc_feature (1)..(316): Xaa is any amino acid
MLSRRRAXLKSGGKYNIFAKLSPSQKARIVMALRDNGHIVGFMGDGINDAAAMRAADVGISVDTAVDIAKESANIILLEKDLMVLEEGVIEGRKIYANIIKYIKMTASSNFGNMFSVLAASAFLPFLPMLPIQILVLNLIYDISCIAIPWDNVDLDFLRKPRKWDASSISRFMMWIGPVSSVFDIATYFLLFFVICPLFAGGAFNALDEESREIFIMLFHSGWFVESLWSQTLVIHMIRSPKIPFIQSRASIQLTLLTTLGIAIGTIIPYTWLGSQLHMAHLPLYYFPWLCAIILSYMLLATVMKKVFVWKYGELL

SEQ ID NO: 31787 - DNA, 498 bp, Unknown
  Obtained from environmental sample
  misc_feature (1)..(498): n is a, c, g, or t
atgattaaaactgtaaaaacagttgacttaaaaggtaaacgcgtcattatgcgcgtggactttaacgtgccgatgaaagacggcgttgtgcaggatgatacccgcattgtggcggctctgccaactatcaaatatatccttgatcagggggctaagaccctgacgcttatgtcccacctgggcgacccctccaaggatgccaaaaaagcacaggaaaaagccgagaaagacggtaagacgtttgacaaggatgcgtacatcaagggcaagcaccgcatggcgccggttgccgcttatctggagaaaaaactgggcaaaccggtgatttttgccggggaagacggatgttacggcaaaaaagcgtttatcgaaagccagaaagacggctcggtcatcatgctggaaaacacccgtttccacaagaagaaaccgccaaagaacctgcggaactggacaagcttgcgaaagaacttgccacctacggtgaaatttttgtaa

SEQ ID NO: 31788 - protein, 165 aa, Unknown
  Obtained from environmental sample
  DOMAIN (1)...(165): Phosphoglycerate kinase
  misc_feature (1)..(165): Xaa is any amino acid
MIKTVKTVDLKGKRVIMRVDFNVPMKDGVVQDDTRIVAALPTIKYILDQGAKTLTLMSHLGDPSKDAKKAQEKAEKDGKTFDKDAYIKGKHRMAPVAAYLEKKLGKPVIFAGEDGCYGKKAFIESQKDGSVIMLENTRFHKKKPPKNLRNWTSLRKNLPPTVKFL

SEQ ID NO: 31789 - DNA, 918 bp, Unknown
  Obtained from environmental sample
  misc_feature (1)..(918): n is a, c, g, or t
atgttacggcaaaaaagcgtttatcgaaagccagaaagacggctcggtcatcatgctggaaaacacccgtttccacaagaagaaaccgccaaagaacctgcggaactggacaagcttgcgaaagaacttgccacctacggtgaaatttttgtaaacgacgcgttcggaaccgcccaccgcgatcacgcttcaaccgcttctatcgcgaagtttgttccggtttccgtcgctggtttcctaatggaaaaagaggtcaattaccttgaaccgattgttacaaacccgcaaaaaccgttagttgcaattatcggcggcgcgaaagtttcgtcaaaaatcgcggtgctggaaagcctgcttaaaaacgcggccgctcttgttatcggcggcggtatggcgtatacgttccttaaagttcaggggcacaagatcggcaaatcgcttgttgaagacgatcagcttgatactgcgcagaaaatccttgacgcggcaaaaagcgcgaatgtgcagatcattctgccgctcgatcatgttgccgcgacaagttttgactccgcctccgctcccgttccggttgacggactcgatcttcccgacactatgcttggtatggatgtaggaccgaaaacgcttgccaaatacaaagaagttattgcggtcgccaaaaccattgtttggaacggtcctgtcggcgtttttgaatttgacgcttttgccaaaggaactgaagaagttgcaaaacttgtagcggaagctaccggcaaaggaacgatcactgtagtcggcggcggcgattctgtggctgctgtaaacaagttcggacttgcttcaaaaatgagccatgtttctacaggcggcggcgcttcgcttgaacttctggaaggcaaaaaacttcccggcattgaagtttgcagagggtaa

SEQ ID NO: 31790 - protein, 305 aa, Unknown
  Obtained from environmental sample
  DOMAIN (1)...(303): Phosphoglycerate kinase
  misc_feature (1)..(305): Xaa is any amino acid
MLRQKSVYRKPERRLGHHAGKHPFPQEETAKEPAELDKLAKELATYGEIFVNDAFGTAHRDHASTASIAKFVPVSVAGFLMEKEVNYLEPIVTNPQKPLVAIIGGAKVSSKIAVLESLLKNAAALVIGGGMAYTFLKVQGHKIGKSLVEDDQLDTAQKILDAAKSANVQIILPLDHVAATSFDSASAPVPVDGLDLPDTMLGMDVGPKTLAKYKEVIAVAKTIVWNGPVGVFEFDAFAKGTEEVAKLVAEATGKGTITVVGGGDSVAAVNKFGLASKMSHVSTGGGASLELLEGKKLPGIEVCRG

SEQ ID NO: 31791 - DNA, 375 bp, Unknown
  Obtained from environmental sample
  misc_feature (1)..(375): n is a, c, g, or t
atgccgggaagttttttgccttccagaagttcaagcgaagcgccgccgcctgtagaaacatggctcatttttgaagcaagtccgaacttgtttacagcagccacagaatcgccgccgccgactacagtgatcgttcctttgccggtagcttccgctacaagttttgcaacttcttcagttcctttggcaaaagcgtcaaattcaaaaacgccgacaggaccgttccaaacaatggttttggcgaccgcaataacttctttgtatttggcaagcgttttcggtcctacatccataccaagcatagtgtcgggaagatcgagtccgtcaaccggaacgggagcggaggcggagtcaaaacttgtcgcggcaacatga

SEQ ID NO: 31792 - protein, 124 aa, Unknown
  Obtained from environmental sample
  misc_feature (1)..(124): Xaa is any amino acid
MPGSFLPSRSSSEAPPPVETWLIFEASPNLFTAATESPPPTTVIVPLPVASATSFATSSVPLAKASNSKTPTGPFQTMVLATAITSLYLASVFGPTSIPSIVSGRSSPSTGTGAEAESKLVAAT

SEQ ID NO: 31793 - DNA, 1743 bp, Unknown
  Obtained from environmental sample
  misc_feature (1)..(1743): n is a, c, g, or t
gtggattcagaaagtgttttttattcagccgaagtttttttggaatcatttagcctggattccagatttgaagaggtttcttctttttatgagaagtggagcgaaagccccgaaattgattcaaaagcgaggcttaatctggcggagacattcgccgctatggaacggtacagcgccgccatggatcagcttcgcaaggcctgggatacaagcgggcacaataaaacccagggcgagtacctttttgccggaaaacttgccctgcaaatgggccatttggccgaagcggaaaacttaatcagcgagtgttttcaggcggatattgacagccgcgaaggaaaagaggccctggttgaaatggccaagatcctttacgcgggggaacgctttaaagaactaaaagatttctgcgccgaatcgattaaagtaaagccaaacgatccggtgcttttgaatttacagggacatgcctactggaaccttggggataacaaaaaggccgtcaaagcctatagcgcggcttttgaatctgacaggaaaaacgggatcctcgcgaagaacgcggctaatgtttacgaggttatgggccgcaaaaaagaagcaatggaaaaatacattgaagcgggcatagcttttctgcaaaccggaaattacaacgatctgggacttttggttccaaagctcctttcgctcggtgaggacaattgggaggcgcatagccttgcgggcaagtgggcctttgccgtggaagactggaaaatggccaagttagaatttgccctggctgaaaagttgcgacaaaccaaatctccaaaacccaaaaaagacggggctcaggtttttcttgaagccctgctgctcattatggagggaaaacgaaaagaagctctacctttgctcgaagaagcaaccgctttggagaaggattacgccctcttccacttccgccttgcggaaaatattttccttttaaaagacgactgtgacgatccccaaatgctaaaggaaatggaaattgccctgacccttacccagaaagaaaatgatgaagaaaaaagcgccgccaaagagaacgaaggcctctccggttgggtaaacaatttcgccgcccaggtcgctttaaaaaaaggaaatttgaattcggcggccaggcaccttgaaaaggcccgttccgtcctgggagacctgccggcggtgcgcgtaaaccagggcgttttgttttacctgcaaggctcgcttgataaagcccttgaaaccctgtccgccgacaaaaaggacgatccggatggaatcatggcaaactgcgccggaaaccttctggttcgctcgcgccgttttgaagaagcggacgaaaagtaccgccaggctctgagttgccaaagcgataatgttgagtatctctgtaaccgggcatcctgccttatggaaataaacctttacggagaagcggataatcttttagccttagctctccaaaaaaatccaagcccggcactgcttgaaatgataagttatgtggcggcaaagaaaggtgaatatccgcgcgcggaacaagcctgccattccgcccttgaattgatccaaccatgcgccgtcgcttatttcgctggatggatcctaattgacccggggcaaaacaagaaagccgtgatgtgctacggcgtttggataaaatggacgttgacgaccatcccgacaaaacctagaaaaactccgcttacgtcggcgggaactttattatag

SEQ ID NO: 31794 - protein, 580 aa, Unknown
  Obtained from environmental sample
  DOMAIN (148)...(181): Tetratricopeptide repeat
  misc_feature (1)..(580): Xaa is any amino acid
MDSESVFYSAEVFLESFSLDSRFEEVSSFYEKWSESPEIDSKARLNLAETFAAMERYSAAMDQLRKAWDTSGHNKTQGEYLFAGKLALQMGHLAEAENLISECFQADIDSREGKEALVEMAKILYAGERFKELKDFCAESIKVKPNDPVLLNLQGHAYWNLGDNKKAVKAYSAAFESDRKNGILAKNAANVYEVMGRKKEAMEKYIEAGIAFLQTGNYNDLGLLVPKLLSLGEDNWEAHSLAGKWAFAVEDWKMAKLEFALAEKLRQTKSPKPKKDGAQVFLEALLLIMEGKRKEALPLLEEATALEKDYALFHFRLAENIFLLKDDCDDPQMLKEMEIALTLTQKENDEEKSAAKENEGLSGWVNNFAAQVALKKGNLNSAARHLEKARSVLGDLPAVRVNQGVLFYLQGSLDKALETLSADKKDDPDGIMANCAGNLLVRSRRFEEADEKYRQALSCQSDNVEYLCNRASCLMEINLYGEADNLLALALQKNPSPALLEMISYVAAKKGEYPRAEQACHSALELIQPCAVAYFAGWILIDPGQNKKAVMCYGVWIKWTLTTIPTKPRKTPLTSAGTLL

SEQ ID NO: 31795 - DNA, 804 bp, Unknown
  Obtained from environmental sample
  misc_feature (1)..(804): n is a, c, g, or t
gtgccacggtggatatttccgcctaaatatatgacttttatagacactcattgccatatagacacaattttggagcgaactggcggaacggcagaggctttgctagaacaaatgacccctgccccagaagccattgtccatatagcctgcgatccaggtgattttaactggggaaaggaatttttattaaaaaaaacactgagcggaattaaaatttacggtgcctttggcgtacacccactggtggtagaaaaatttagcccacaggcagaagaaggcattttagaggggttaaagctgccaaatacccttgcccttggcgaaattgggctggattaccattatgaaaagtacaatgctgatttgcaaaaaaaggtttttttaaggcaattggaaataggtttggaactaaaaagcaattttgtgtttcacctaagagaggcagaagaagatgccttagaaattttgcaaaaaatagataacaaagatataaaggctcatattcactgctacacaggcacagtggaatttgccgaaaaagttttatccttaaagggaacctatttttttggctttaccggcgcggtaacttttgataaaaccataaccataagagaggcagcaaaagccattccagcaaacagaatccttttggaaaccgatgccccctatcttgctcctgtgcctttcagaggcaaaacttgtacccctgctatgattccaaatatagctcaagtgctttcaaacgtaaaagaaatacctttagatgatttgttaaaaatttgtagggaaaacacgaaataa

SEQ ID NO: 31796 - protein, 267 aa, Unknown
  Obtained from environmental sample
  DOMAIN (11)...(267): TatD related DNase
  misc_feature (1)..(267): Xaa is any amino acid
MPRWIFPPKYMTFIDTHCHIDTILERTGGTAEALLEQMTPAPEAIVHIACDPGDFNWGKEFLLKKTLSGIKIYGAFGVHPLVVEKFSPQAEEGILEGLKLPNTLALGEIGLDYHYEKYNADLQKKVFLRQLEIGLELKSNFVFHLREAEEDALEILQKIDNKDIKAHIHCYTGTVEFAEKVLSLKGTYFFGFTGAVTFDKTITIREAAKAIPANRILLETDAPYLAPVPFRGKTCTPAMIPNIAQVLSNVKEIPLDDLLKICRENTK

SEQ ID NO: 31797 - DNA, 813 bp, Unknown
  Obtained from environmental sample
  misc_feature (1)..(813): n is a, c, g, or t
atgctcactttctcccaactaaccgaactcacaaacgccgttttagaaccggcaaacattcaaggctgcgtggaaaaatgcgcaacacttgcttttgcaacagcaaacgatatttctttttgcatagacgaagccgcttacggagcggctagaacaacaaaagccgccgccgtctttgtgccagagaatttcacaggttgggcaggggaggcaaaagttttggctagggtaaaaaatccttatgaggctataataaagtgtgcggaaatattgaataagaatgaggttgtgaaatgtgaaattcaccctacggcgcagataagcccccaagctttggtgctcggttctgttggtgcaaattcggttgttggtgctttttgttcggttttagaaggcgtgaaaataggggagaattgtgttttgcatccaggcgttgtagttggctctcgtggctttggtttttacagcggcgaaaatggcgagcaaataaccgtgccacattttggcggcgtggtgattggggataattgcgaaattggtccaaactccgttgtggctgctggttttttggaacccactaggcttggaaatttttgcaaactggatagctttgtgcaaattgngcataactgcatagttgggagcaatgcaattttctgctcgcagtctgggcttgcaggctcggttattgtggaagacgatgtgactttggcaggcggtgcgcaggtcgcggggcatttaaccctggcaaaggttgcattatcgcggcaaaagctgggggtacaaagagcattaagccgggggcaaaagtag

SEQ ID NO: 31798 - protein, 270 aa, Unknown
  Obtained from environmental sample
  DOMAIN (5)...(103): UDP-3-O-[3-hydroxymyristoyl] glucosamine N-acyltransferase, LpxD
  misc_feature (1)..(270): Xaa is any amino acid
MLTFSQLTELTNAVLEPANIQGCVEKCATLAFATANDISFCIDEAAYGAARTTKAAAVFVPENFTGWAGEAKVLARVKNPYEAIIKCAEILNKNEVVKCEIHPTAQISPQALVLGSVGANSVVGAFCSVLEGVKIGENCVLHPGVVVGSRGFGFYSGENGEQITVPHFGGVVIGDNCEIGPNSVVAAGFLEPTRLGNFCKLDSFVQIXHNCIVGSNAIFCSQSGLAGSVIVEDDVTLAGGAQVAGHLTLAKVALSRQKLGVQRALSRGQK

SEQ ID NO: 31799 - DNA, 1251 bp, Unknown
  Obtained from environmental sample
  misc_feature (1)..(1251): n is a, c, g, or t
gtgccgcttgacgaaaaaggaaagcccgtttacaacgtcaaactctggtgcgatacctctactgttcgggaatgtgaggaattgaccaaattggcgggcggcgagaaaaaacttatcgccagggcggggctgcccatgcgccccggctacaccgccccaaagctccagtggctgaaaaaccacaagcccaaagccttcgcgaaaataaagcatatattattgccccataattatttaaattatcttctgaccggcgtttttagcgccgaatacggcgacgcttccggcatggcgatttttgacgtgcgcaagcgaaaatgggccagggatatctgcaaattaatttcccccgaccttgagtcctggctgcccccgcttatagaggcggacgctgtcgcgggcagggtcacaaaagaagcggaaaaaatatacggcattccggaagggaccctggtttcatcgggcggcggggacaatatgatgagcgcgattggaaccggcacggtgcgggacggctttctttccatgagtctgggaacttccggcaccttgtttggtttttcaaaaacgccggtgattgacccgaccgggaatcttgccgcgttctgttcgtcaacgggcggctggctgcccttgctctgcacgatgaactgcaccgtggcaagcgaggaattccgcgccctgttcggccaggacgtgaaggcgtttgacatggaagccgaaaaggctcccataggcgcggacggcatagtgtccctgcccttcttcaacggcgagcgtacacccaatctgcccaacggcagggccggaataaacggcattaccgccgctaacttcaagagggaaaacctggcccgcgccgcgctggaatccgctattttcggcatgagaatcggccttgaaggctttaacacgctgggtttcaaagcgaaggaaatccggcttacaggcggcggctcaaaaagcccaatctggcagagcatcgcggcaagcgtgacgggcctccctgtaaaaatcccggcaagcagcgaagccgccgcaatgggcggggcaattcaggccctgtggtgcttgcagaataattcaccggaaaaaacaaaaagcagtacgatagaggctttaacggatgagcatgttgttcttgaaggcggaaaggttataaagccggaaaaaaaggatgtggcggcctatgacaaggcttacgccgtttattcacggtatctaggggcattaagcccattattccaataa

SEQ ID NO: 31800 - protein, 416 aa, Unknown
  Obtained from environmental sample
  DOMAIN (1)...(165): FGGY family of carbohydrate kinases, N-terminal domain
  misc_feature (1)..(416): Xaa is any amino acid
MPLDEKGKPVYNVKLWCDTSTVRECEELTKLAGGEKKLIARAGLPMRPGYTAPKLQWLKNHKPKAFAKIKHILLPHNYLNYLLTGVFSAEYGDASGMAIFDVRKRKWARDICKLISPDLESWLPPLIEADAVAGRVTKEAEKIYGIPEGTLVSSGGGDNMMSAIGTGTVRDGFLSMSLGTSGTLFGFSKTPVIDPTGNLAAFCSSTGGWLPLLCTMNCTVASEEFRALFGQDVKAFDMEAEKAPIGADGIVSLPFFNGERTPNLPNGRAGINGITAANFKRENLARAALESAIFGMRIGLEGFNTLGFKAKEIRLTGGGSKSPIWQSIAASVTGLPVKIPASSEAAAMGGAIQALWCLQNNSPEKTKSSTIEALTDEHVVLEGGKVIKPEKKDVAAYDKAYAVYSRYLGALSPLFQ

SEQ ID NO: 31801 - DNA, 351 bp, Unknown
  Obtained from environmental sample
  misc_feature (1)..(351): n is a, c, g, or t
atgatcagatcggccgaggaatcaggttcgatctatcgatattgtcacgaacttgaatactcaaagccgagcgtaagcgtcgcaatgaaaaacctgaaaactcaaggctacatcgcaatagacgacgaaggatttataactctgaccgctaagggacggaaaattgcggagacgatgtatgaacggcatgtcgcgatttccgattggttaatttttttgggcgtcgataaaaaaacggcggtaaacgacgcttgtaaaatggaacatgccatgagcgagaaaagttttacggctataaaaaaacatatagagaactggaaaagcggcggttacgctcccaagaacgaatga

SEQ ID NO: 31802 - protein, 116 aa, Unknown
  Obtained from environmental sample
  DOMAIN (49)...(115): Iron dependent repressor, metal binding and dimerisation domain
  misc_feature (1)..(116): Xaa is any amino acid
MIRSAEESGSIYRYCHELEYSKPSVSVAMKNLKTQGYIAIDDEGFITLTAKGRKIAETMYERHVAISDWLIFLGVDKKTAVNDACKMEHAMSEKSFTAIKKHIENWKSGGYAPKNE

SEQ ID NO: 31803 - DNA, 624 bp, Unknown
  Obtained from environmental sample
  misc_feature (1)..(624): n is a, c, g, or t
ttggacgggttacaaactcaccccgtgaataaaaatcccgcgtatcgcaaaaattccatagtaataatgatttccgcccttgaatggagcgcgattgccgatgaagcgaaagcggctggcgttgacaaatttttgtccaagcctctgttcccctctaccattgcggaagttattaatgaatgtcttggggtagacaaacgtcaggcggaaaaatcacattcggcggaaattgccggtatttttgccgggcggcgcatactgcttgccgaagacgtggaaattaaccgcgaaattgtacagacattgcttgaaccgacaaaggtagaaatagactttgcagaaaacggcgcggaagccgtccgcaagtttaccgaaaatccgaaaaagtacgaaatgattttcatggatatacagatgccggaaatggacggctatgaagcgacgcggagtatcagggcgctggatattataatggcaaaaaccatacccattgtcgcaatgaccgcgaatgtatttaaagaggacattgaaaaatgccttgaagccggcatgaacagccacataggcaaaccgattgattttgatgaagttttaaaaacgcttcattcgttcttgggagcgtaa

SEQ ID NO: 31804 - protein, 207 aa, Unknown
  Obtained from environmental sample
  DOMAIN (84)...(202): Response regulator receiver domain
  misc_feature (1)..(207): Xaa is any amino acid
MDGLQTHPVNKNPAYRKNSIVIMISALEWSAIADEAKAAGVDKFLSKPLFPSTIAEVINECLGVDKRQAEKSHSAEIAGIFAGRRILLAEDVEINREIVQTLLEPTKVEIDFAENGAEAVRKFTENPKKYEMIFMDIQMPEMDGYEATRSIRALDIIMAKTIPIVAMTANVFKEDIEKCLEAGMNSHIGKPIDFDEVLKTLHSFLGA

SEQ ID NO: 31805 - DNA, 696 bp, Unknown
  Obtained from environmental sample
  misc_feature (1)..(696): n is a, c, g, or t
atgagcgataattcaggaaacaacaacaacaaagagggaccgcaatttccgttcggcggtccgaattttcccgattttaagccttccggcgggtggaaatatttccttatctacagcgccgtcattcttatcgggattacattgtttaattatgtgtttcttaacaagtcaaattcagccattgatttttcagaatttaaagcgcgtatcgcttccggcgaaattaagcgcgtagaattaaccgactcctactttacggggtataccagcgcttcaaagcgtgaatcttcgttgtcgcgtatggcgaggtcttcgtatgccgctgtgcaggacaaagtatacagaacagtgtccatctatgatcaggattttattaaattaatggatgaaaaaaatgtcgcgtacggcgctgttccgcgcgagggaggcgcgatactcagttccattatcagttgggttttacctattgccatttttatttttctttggcgctttgttttaaaacgcataggcaatataggcggcaatgttctttccgtcgggcagaaccgcgccgtgattgtcgcggaaggtgacattattacgcgcttcagcgatgttgcgggcgttgacgaggcaaaagaggaactttttgaagttgtcgattttttgaaaaacccngcagaagtacaaagatataggcggaaaaattcctaa

SEQ ID NO: 31806 - protein, 231 aa, Unknown
  Obtained from environmental sample
  DOMAIN (59)...(207): FtsH Extracellular
  misc_feature (1)..(231): Xaa is any amino acid
MSDNSGNNNNKEGPQFPFGGPNFPDFKPSGGWKYFLIYSAVILIGITLFNYVFLNKSNSAIDFSEFKARIASGEIKRVELTDSYFTGYTSASKRESSLSRMARSSYAAVQDKVYRTVSIYDQDFIKLMDEKNVAYGAVPREGGAILSSIISWVLPIAIFIFLWRFVLKRIGNIGGNVLSVGQNRAVIVAEGDIITRFSDVAGVDEAKEELFEVVDFLKNPAEVQRYRRKNS

SEQ ID NO: 31807 - DNA, 1314 bp, Unknown
  Obtained from environmental sample
  misc_feature (1)..(1314): n is a, c, g, or t
atgggtatgctaaacaggggaacaaacacagatgttgctntgaatgatgctccaaggctgcagggctcggcaaaaacttctttgccagacgaagtttacgacccaatggttataaaaataaatttcaacgcaatgccaattatgaatttggctgtgagagcagacaatatttccgcaacggaattgtacgatttgctgaattaccgcattataccagagttttccagtattctcggcgtgggagaagtatccataatggctgcctctcagcgcgaaattcaggtgaatgttgacccagcaaaattgcaatcgcaaaatttatcccttttgcaggttgttaacacggtaaaaacaaataatatgagttttccagtgggtaacataaagacagatagtttaacaagttccataaggctttccgcaaaatattcagaaatagaagatatagccaacaccataataaaaagaaacggagatggctctctgctaaaagtttccgatattgcagaggtgaccgatgccgttaaagatgtaacgggtttttataggttagacggacaacctgcagttggtatgtacatatccaagcaagacgatgcgaacacagtggaagttgctaattcggcaaagaaaaaagcggcagaattggaaaaacgttacaaagaacaaggtcttaaatttggcatagctatggacggctcaataataatccgcaatgccgcagacgcagttcgcacagatttgattttggcggtggtatttgtaaccatacttatgattttctttttgcactccatgcgcaatggcattatagttatggttgccgttccgctctcggtgattacctcttttatcgggcttgcagttatggattttaccttgaacatagtaaccctgctcgctttgtctttgatgattggaacccttgttgatgatgccatagttgttttggnnnttctttnccgccncttggnnntgggcnnnnncgcgttgcnggcttctgtggntggcntnnnngnnnttgggctttccgtgctttccntnnctttggtgcttttggtggtgttcttgcctgtttctnttgcgcccggnntgcttcgccccgtntttcngtcttttgctctnnccntggttttctctgttnccntntcnttgctcgttgcnttcncggttgttcccctggtgncnngccgctttgggcccttcccgcncnttgngnntnnnggtntttggggcngcntncttcnctcttttgnntgttttgtgggccccgttccncngtctcntnntntctgttttaaaaaaaaatattag

SEQ ID NO: 31808 - protein, 437 aa, Unknown
  Obtained from environmental sample
  misc_feature (1)..(437): Xaa is any amino acid
MGMLNRGTNTDVAXNDAPRLQGSAKTSLPDEVYDPMVIKINFNAMPIMNLAVRADNISATELYDLLNYRIIPEFSSILGVGEVSIMAASQREIQVNVDPAKLQSQNLSLLQVVNTVKTNNMSFPVGNIKTDSLTSSIRLSAKYSEIEDIANTIIKRNGDGSLLKVSDIAEVTDAVKDVTGFYRLDGQPAVGMYISKQDDANTVEVANSAKKKAAELEKRYKEQGLKFGIAMDGSIIIRNAADAVRTDLILAVVFVTILMIFFLHSMRNGIIVMVAVPLSVITSFIGLAVMDFTLNIVTLLALSLMIGTLVDDAIVVLXXLXRXLXXGXXALXASVXGXXXXGLSVLSXXLVLLVVFLPVSXAPGXLRPVFXSFALXXVFSVXXSLLVAFXVVPLVXXRFGPFPXXXXXGXWGXXLXSFXCFVGPVPXSXXXCFKKKY

SEQ ID NO: 31809 - DNA, 432 bp, Unknown
  Obtained from environmental sample
  misc_feature (1)..(432): n is a, c, g, or t
atgttaaaaaggaataacctaaggagccccctaatgcctaagaaaacccccgccatcgacacctcaaaactcaaccaaatagacgcctacacctaccccgaacacgaccgtgccaacataccccctattggcatggcacaatacgacacagtagccagccccgaagttaaatacgaatatgacccccacatagacccgtccctgcaatgggcaggaaaaaaagaaggaacaacttttgaagtaccgacatcttcaatccatatccacgaaagcataaaaccccataaaataatccgctccgttcagacaattggagacgattatgccgatgaacaaggctggttattcgaatcagacgcggaaagggcgaaacgccgcaacgactctattgagttttaccagcataaaaacaatggacaaaccgcctcatag

SEQ ID NO: 31810 - protein, 143 aa, Unknown
  Obtained from environmental sample
  misc_feature (1)..(143): Xaa is any amino acid
MLKRNNLRSPLMPKKTPAIDTSKLNQIDAYTYPEHDRANIPPIGMAQYDTVASPEVKYEYDPHIDPSLQWAGKKEGTTFEVPTSSIHIHESIKPHKIIRSVQTIGDDYADEQGWLFESDAERAKRRNDSIEFYQHKNNGQTAS

SEQ ID NO: 31811 - DNA, 618 bp, Unknown
  Obtained from environmental sample
  misc_feature (1)..(618): n is a, c, g, or t
atgttttacaggatactcactaacaagaaggccaactgctatgctgatatgtggtggcaaggcaactatgcttccatactattcccgggggcgaagcttgccagtcagagagtcagcgaatttctagtggatatcggtagcgaggaggttcagcgaagattctttcatgaatatttccgcattttatacggaagtcaaagtgccacgggaatattgattgacagttctggatgtcccaatgcgtccaagatgtccatcacgcagatcagcaatcacaacggcgatataaatttggaggcgagactcatctatgtgatcgacagggtgacagggatgccaatatacttcaggtactgccccagcaacattgtcgatgtcaccactttgtgtacgaccttggccgagttgcggcagtacagcatagctatcgactacgcaattgtcgatgctggctactgtagcgagtataatatcttggaactatatgaaaaccatgtgaggttcctcacccgtctcgcccccaaccgaactctgttcaaagatgtcgcanaggaacatctgccgagcctcatgacttccgcgaatgccttgagatacggcaccgtctgctgtacatga

SEQ ID NO: 31812 - protein, 205 aa, Unknown
  Obtained from environmental sample
  misc_feature (1)..(205): Xaa is any amino acid
MFYRILTNKKANCYADMWWQGNYASILFPGAKLASQRVSEFLVDIGSEEVQRRFFHEYFRILYGSQSATGILIDSSGCPNASKMSITQISNHNGDINLEARLIYVIDRVTGMPIYFRYCPSNIVDVTTLCTTLAELRQYSIAIDYAIVDAGYCSEYNILELYENHVRFLTRLAPNRTLFKDVAXEHLPSLMTSANALRYGTVCCT

SEQ ID NO: 31813 - DNA, 1074 bp, Unknown
  Obtained from environmental sample
  misc_feature (1)..(1074): n is a, c, g, or t
atgaaaaaactcaaaaactacatattggtgtgcggcgggacggggtgcgagtcgagcaaggccgacgatatctaccgtagcttgatgaaagagctgaaagaccagaacgtcgacggcgaggcgcaggttatcaagaccggttgcttcggtttctgcgagaaggggccgatagtcaagatactgcccgacgacagcttctacgtccacgtgaaggccgacgacgccaaggagatcgtctccgaacacattatcaaggggcgtcaggttcagaggctgctctacaagaggagcgacgagaagatccacacgaagatcgaggacatcgacttctaccagaagcaagtgcgcgtggtgctgcgcaactgcggcttcatagaccccgagaacataaacgagtatatcgctcgtgacgggtacgtggcgctcgagaaggcgctattcgagatgaagcccgacgatgtcatcaaggagcttgaaatctccggattgcgcggtcggggcggcgcgggttttcccacgtttcgcaagtggttgttctccaagggcgttccgagcgaccaaaagttcatcgtctgcaacgccgacgagggcgatccgggcgcgtacatggaccgcagcacgcttgagggcgacccgcactcggtgctcgaggcgatgaccatagccgggcatacggtgggcgcgaaccaagggttcatctacatccgcgccgagtacccgctggccatccaccgcctcgagatcgccatcaggcaggccaaggagaacggtctcttgggtaacgatatcctcggaagcggtttcaatttcgacatagagataaggctcggcgcgggcgctttcgtctgcggcgaggagacggcgctcttggcctccatagagggcaagcgtggcatgcccgttccacgcccgccgttcccggcggtcaaggggctttggggcaagcccacctgttatcaacaacgtggagacgtgggccaacatccccgttatcataatgaaaggcggcgcgtggttcgccaagatcgggacggagaaatccaaaggcacaaaggtgttcgccctcacgggtaa

SEQ ID NO: 31814 - protein, 357 aa, Unknown
  Obtained from environmental sample
  SIGNAL (1)...(21)
  DOMAIN (137)...(357): Respiratory-chain NADH dehydrogenase 51 Kd subunit
  misc_feature (1)..(357): Xaa is any amino acid
MKKLKNYILVCGGTGCESSKADDIYRSLMKELKDQNVDGEAQVIKTGCFGFCEKGPIVKILPDDSFYVHVKADDAKEIVSEHIIKGRQVQRLLYKRSDEKIHTKIEDIDFYQKQVRVVLRNCGFIDPENINEYIARDGYVALEKALFEMKPDDVIKELEISGLRGRGGAGFPTFRKWLFSKGVPSDQKFIVCNADEGDPGAYMDRSTLEGDPHSVLEAMTIAGHTVGANQGFIYIRAEYPLAIHRLEIAIRQAKENGLLGNDILGSGFNFDIEIRLGAGAFVCGEETALLASIEGKRGMPVPRPPFPAVKGLWGKPTCYQQRGDVGQHPRYHNERRRVVRQDRDGEIQRHKGVRPHG

SEQ ID NO: 31815 - DNA, 843 bp, Unknown
  Obtained from environmental sample
  misc_feature (1)..(843): n is a, c, g, or t
ttgacaactcggtattcatggcgggaaaaagaacataatccggggaatgtaaaaccaaaccgatcgtggaccagcgtgctgggaacaaagataacgttttccgaaggtttgattcttaatattgaaggttattataaatatatatttaaccggatgtatattcccgtaagcatcggccttgacgattttgacataaggccccaattcaacggcgaaggcagggtctggggcattgacctgatgctgcaaaaattgcaatcaaggtattgggacggatggctttcctattcctacagttgggctcgttaccgcgatccgtcaagcggcaacgcgaccattggtttttccggcggcacgcggggcaatgactggtacttcccgaattttcaccgtttccataacctgaacctcgttatcaatatcaagcccgctccccaattcaatttctatacgcgctttggccttgccagcggaacccagcttccccggcgcaccaccgaccgcccggcaacgtatccggtgtttatgtttgatgatcctgaaactcccggcattccaaaatttgtacaaaggtacaattggccgtccgagactgatgaagacaaccgcactacccctaccctgtcgatggatattaaattttctttttttggaaaaaaccggaccgggaaaacccgctacgaaatatattttgccctggagaacgtgctttcgctggtgtacaggccccaggggaatacgaggttcaacacatttacaggcgtgattgaaacgggcagcgacgcggcaagttacgggctgcctatacctataccttcgtttgggtttaagtttagctattaa

SEQ ID NO: 31816 - protein, 280 aa, Unknown
  Obtained from environmental sample
  misc_feature (1)..(280): Xaa is any amino acid
MTTRYSWREKEHNPGNVKPNRSWTSVLGTKITFSEGLILNIEGYYKYIFNRMYIPVSIGLDDFDIRPQFNGEGRVWGIDLMLQKLQSRYWDGWLSYSYSWARYRDPSSGNATIGFSGGTRGNDWYFPNFHRFHNLNLVINIKPAPQFNFYTRFGLASGTQLPRRTTDRPATYPVFMFDDPETPGIPKFVQRYNWPSETDEDNRTTPTLSMDIKFSFFGKNRTGKTRYEIYFALENVLSLVYRPQGNTRFNTFTGVIETGSDAASYGLPIPIPSFGFKFSY

SEQ ID NO: 31817 - DNA, 357 bp, Unknown
  Obtained from environmental sample
  misc_feature (1)..(357): n is a, c, g, or t
atggaaaaagataccgtcatatcaattcaaaagataagtaaatcgttccccggcgttcaggcgttggataatgttgattttacgcttcgtaaaggagaaatccacgcccttatgggcgagaacggagccggtaagtcaactttgattaaggtattgacaggtgtttatcaaaaagacaccgggcagatttacataagcgggatagacagggcggttacgatcaagtctccgcaggaagcgcagaatatgggcatcagtacggtatatcaagaaatcactctttgtccaaacctgactgtggcggagaatatgtttatcggtcggggtaaatacaaatttgtaaactggacgccatga

SEQ ID NO: 31818 - protein, 118 aa, Unknown
  Obtained from environmental sample
  misc_feature (1)..(118): Xaa is any amino acid
MEKDTVISIQKISKSFPGVQALDNVDFTLRKGEIHALMGENGAGKSTLIKVLTGVYQKDTGQIYISGIDRAVTIKSPQEAQNMGISTVYQEITLCPNLTVAENMFIGRGKYKFVNWTP

SEQ ID NO: 31819 - DNA, 450 bp, Unknown
  Obtained from environmental sample
  misc_feature (1)..(450): n is a, c, g, or t
atggaaaattatattcccttctttggcccacccactgaaaaaaaaatcgcaaaacgtacagccatgcaggaagaagcgagcgaaaaagcggcgcgttatgtgatagaaaggaaaacaaacaaaattaataccttccgtccgctgtccgcctttatttcatttcttttctcgcttggagtaaaaatattttacaagcattacaaggtaagcgacaaatgtaacggttgcggcgtttgcgaaaaagtctgccccgtagccggaattgaaatgaaagaaaagcgccccgtattcagcgataaatgtgaaaattgctccgcctgcatcgacatctgcccattacgcgccattcagttcggacgggcgaaatttggcgcgaggggatattgccatccggggatcgggattaaagaacttggaagggtaccacttttcacttctaggaaggaataa

SEQ ID NO: 31820 - protein, 149 aa, Unknown
  Obtained from environmental sample
  DOMAIN (94)...(117): 4Fe-4S binding domain
  misc_feature (1)..(149): Xaa is any amino acid
MENYIPFFGPPTEKKIAKRTAMQEEASEKAARYVIERKTNKINTFRPLSAFISFLFSLGVKIFYKHYKVSDKCNGCGVCEKVCPVAGIEMKEKRPVFSDKCENCSACIDICPLRAIQFGRAKFGARGYCHPGIGIKELGRVPLFTSRKE

SEQ ID NO: 31821 - DNA, 852 bp, Unknown
  Obtained from environmental sample
  misc_feature (1)..(852): n is a, c, g, or t
ttgttcgcctcgcccccttttggcgtggggacctgggaggagatcaaaagaatactggaacttctggggctggaagtaaatatactgtttggctcgggaagcgcgggaataagcgaatggcgcgacattcccaacgcggaatttaaccttgttctttccgcgtgggttggagaaagcgccgccaaactgcttaaaacaaagtacggaaggccgtatttgcacatcccctatatccccacgggagccgcggcgacaagccgcgtgttacgcgaagttgcggcgtttgccggaatagaaagtgaaaaaaccgaaaaaattattgagcgcgaggaaaaacgattttacaactattttgtatcgctggcggactttttcgcggattttcgcaacgtcataccttatgaattgtatcttgtatccgactcgtcatacgcgataggggttagcgattttttggtaaacgaactcgggtttacccccgaaggcatatatatcaccgacacgccgggtgagtccgcaaagaaaaaaatactggaaacattcgacaagttaggcggtgaatttgcgggaaaaattatttttgaagacgacggcggaataatacagtctgatatacggaaacgtctgaacggatcgaaaaaagccgccatattcggcagcctatgggaagacgcgcttgccgaggaaacaggtaatctgtcttaccacctgagccttcccttaacgaacgatattgtaaccaaccgttcgtttgccgggtataacggcggcatacgccttatggaggaattatatgccggaatgttccgccacggtattatttccaggcaaacattacttggtaaacattag

SEQ ID NO: 31822 - protein, 283 aa, Unknown
  Obtained from environmental sample
  misc_feature (1)..(283): Xaa is any amino acid
MFASPPFGVGTWEEIKRILELLGLEVNILFGSGSAGISEWRDIPNAEFNLVLSAWVGESAAKLLKTKYGRPYLHIPYIPTGAAATSRVLREVAAFAGIESEKTEKIIEREEKRFYNYFVSLADFFADFRNVIPYELYLVSDSSYAIGVSDFLVNELGFTPEGIYITDTPGESAKKKILETFDKLGGEFAGKIIFEDDGGIIQSDIRKRLNGSKKAAIFGSLWEDALAEETGNLSYHLSLPLTNDIVTNRSFAGYNGGIRLMEELYAGMFRHGIISRQTLLGKH

SEQ ID NO: 31823 - DNA, 525 bp, Unknown
  Obtained from environmental sample
  misc_feature (1)..(525): n is a, c, g, or t
atgtcgcgctttcgaacgatgatattcagggcacttctgtcataccccccctatatatctatggcgaatgacgatgggcacatacctgtatttttttctaaaaatactgaagaatttgaaaatataccttgctgccgccagattgctttgacaaacgcattagctgctaatccggagatttatatagcttttgaacgcgctatgattaaagcgtataaattcaaggaggaaaatcacgaaaaaacaattgagggtttgtcaaaatatgttcccatagacaaaagaatccttgattatgagatttaccgcgggcattctcttaatcaccccgatcctgacaaaaaagcaacgacagctttaaagaacggcgttattgaatttggttttacagatggcgtagattttgatctggaagaacattataacattgatatttacaggaaagcgctggctaaacttttagccgagaatcccaacgatcctgtctacaaatcaatggaagaacgtttcaattccaacaattag

SEQ ID NO: 31824 - protein, 174 aa, Unknown
  Obtained from environmental sample
  SIGNAL (1)...(22)
  misc_feature (1)..(174): Xaa is any amino acid
MSRFRTMIFRALLSYPPYISMANDDGHIPVFFSKNTEEFENIPCCRQIALTNALAANPEIYIAFERAMIKAYKFKEENHEKTIEGLSKYVPIDKRILDYEIYRGHSLNHPDPDKKATTALKNGVIEFGFTDGVDFDLEEHYNIDIYRKALAKLLAENPNDPVYKSMEERFNSNN

SEQ ID NO: 31825 - DNA, 819 bp, Unknown
  Obtained from environmental sample
  misc_feature (1)..(819): n is a, c, g, or t
gtgcgattaagacggcaaataacggagcttgaagcctcttacgaaaaaaaccgccggggcgcggtctttcagaccaagcacaaagctctggaggattcgcttcttgattataaaaacaggatgattaaatccaaccttcgcttggtggtttcaatagcaaaaaattaccagcatcgcgggctttcgcttttggatctgattgacgagggcaatatcggccttattgaggctgttgagcgttttgattatacaaggggctgcaggttctccacatacggcacatggtggatacgccaggccattataaagagcatagcggacaagggcagggtgatacgaataccaatccacatgctcaacacaatcaaaaaatgctatttcgcggccaaacagctcactcaggatttgggcagagacccaagcaatgaagaattatcggagcagttgggacttcccgtttccaaagttaaggaaatcgtaaaattatcccaggaaaccacaagcctcgatacaatagttgataagggaaacctgacccgtcttgcggatcttatcaaagacgataatctgaccgaaccttttgaggccgttttttcaatgaccatacaggaaaccataggagatattctttccagtctttccgagcgagaaatgaaaattatccagcttcgctttggtctgacaggagagagccctatgaccctggaagaaaccggcaagctccttggtataacacgggagcgtgtccggcagattcaggaaaaggccactttcaaactgaggggcctaagggagcttcgcgagcttaaggacgcatag

SEQ ID NO: 31826 - protein, 272 aa, Unknown
  Obtained from environmental sample
  DOMAIN (209)...(262): Sigma-70, region 4
  misc_feature (1)..(272): Xaa is any amino acid
MRLRRQITELEASYEKNRRGAVFQTKHKALEDSLLDYKNRMIKSNLRLVVSIAKNYQHRGLSLLDLIDEGNIGLIEAVERFDYTRGCRFSTYGTWWIRQAIIKSIADKGRVIRIPIHMLNTIKKCYFAAKQLTQDLGRDPSNEELSEQLGLPVSKVKEIVKLSQETTSLDTIVDKGNLTRLADLIKDDNLTEPFEAVFSMTIQETIGDILSSLSEREMKIIQLRFGLTGESPMTLEETGKLLGITRERVRQIQEKATFKLRGLRELRELKDA

SEQ ID NO: 31827 - DNA, 765 bp, Unknown
  Obtained from environmental sample
  misc_feature (1)..(765): n is a, c, g, or t
gtgctacataaaccttgggcagagaaaggaattttcagttttattaaaaaaattgcgtatattatattggataagaatttttacaaacaattcaaaaactacgatgaccttatagtctcatctaaattcgcaagattattgctagaagaaaagggacttagcaatattgttgaatttccttttggcgcgccggattcgttttntgatgcgtacaaggaaagagtgcgttccgaaaacgagccgcttcgctttatttatgcgggcagattgcaaaacgacaaggatgtttttttgcttataaaagggattccgttgcttttgcaagacccgcaaattcatatcactgttatggggcacggagcggaaatgggtttctttgagaatttcaagcacccgcagttccgctatttgggctatgttcaagacaagcaaattattgaaaatgaatttcgcagccaccatatacttttagccacttctcccaatgaaacattcgggctaagcattttagaggctatggctatgggtatgcctgttgttggtccagacatgggtgcagccattgagcttttgcaaaaacttgagaacaatctgatttttaagacaaaatccgtagagtcctttgtggaaacggcaaaatcggcaaaatccatagatttgggcaagtattccagagatgcccgcagagtggcggagttgtatgggacttgggatgctgcgatggataggcagatgaattattatttggaaaaatacaatgcttga

SEQ ID NO: 31828 - protein, 254 aa, Unknown
  Obtained from environmental sample
  DOMAIN (68)...(230): Glycosyl transferases group 1
  misc_feature (1)..(254): Xaa is any amino acid
MLHKPWAEKGIFSFIKKIAYIILDKNFYKQFKNYDDLIVSSKFARLLLEEKGLSNIVEFPFGAPDSFXDAYKERVRSENEPLRFIYAGRLQNDKDVFLLIKGIPLLLQDPQIHITVMGHGAEMGFFENFKHPQFRYLGYVQDKQIIENEFRSHHILLATSPNETFGLSILEAMAMGMPVVGPDMGAAIELLQKLENNLIFKTKSVESFVETAKSAKSIDLGKYSRDARRVAELYGTWDAAMDRQMNYYLEKYNA

SEQ ID NO: 31829 - DNA, 696 bp, Unknown
  Obtained from environmental sample
  misc_feature (1)..(696): n is a, c, g, or t
ttgatggccggttctggatccctggngaaatccggcaaggggcctattctcgcggtggacgctgatgccaattccaatcttaatgaagtgctcggcgtcgcgaaaccggtttcattgggcgagattcgggaggaagttgcccactcggagacttccggaatgtccaagcaggaatacatggatttccgtttcgatgacgccctcacggaaaaagaaaattatgatttgctggtcatgggaagaactcagggcgtgggctgttactgttttgtcaatgacgtgctgaaggagcagatccgcaagtactataaaaattaccgttacctgatcgtagacaacgaggcggggcttgaacatgtcagccgcgggattttaccgcctgtggaattgatattgctggttagcgactgctcgcggcggggcatacaggccgccggaagaatcgccgccatgattattgaactggacattaaagcgcaaaaggtggggcttatcgtaaaccgcgccccgggtgggcaactcgccgaaggcataaaggaagaaatcgccctgcagaaactcgacctgattggcgtgcttcccaatgatcctctggtttttgaatatgataccgagggaaccccgcttgtcaatttaccgttagaatctccggtgcgtcaggcgctggaaaaaataatccaatctttaaatttatag

SEQ ID NO: 31830 - protein, 231 aa, Unknown
  Obtained from environmental sample
  DOMAIN (1)...(201): CobQ/CobB/MinD/ParA nucleotide binding domain
  misc_feature (1)..(231): Xaa is any amino acid
MMAGSGSLXKSGKGPILAVDADANSNLNEVLGVAKPVSLGEIREEVAHSETSGMSKQEYMDFRFDDALTEKENYDLLVMGRTQGVGCYCFVNDVLKEQIRKYYKNYRYLIVDNEAGLEHVSRGILPPVELILLVSDCSRRGIQAAGRIAAMIIELDIKAQKVGLIVNRAPGGQLAEGIKEEIALQKLDLIGVLPNDPLVFEYDTEGTPLVNLPLESPVRQALEKIIQSLNL

SEQ ID NO: 31831 - DNA, 351 bp, Unknown
  Obtained from environmental sample
  misc_feature (1)..(351): n is a, c, g, or t
ttgcaggacgtgattggcgcactgtgggccggtggagccgaagcgatgacgctgatgggcgaacgggtgaccatgacctccgcgttccggtgcagcggcaacgtgttgttgttgcacgggcgggtgtttagcccgccgtacgtggtgcaagccatcggtgacccgcagcggctccaggccgcgttagacgactcgccgggaatcgccacgttcctcgactacgtagcctggttgggtctcggctttagcgccacacaagaggaaaacctcgagatgccgccgttcaacggcgtgatcgaattgcggcacgccacgattccggaccaagtcgatccgttccgaacggcctga

SEQ ID NO: 31832 - protein, 116 aa, Unknown
  Obtained from environmental sample
  DOMAIN (1)...(106): Bacterial protein of unknown function (DUF881)
  misc_feature (1)..(116): Xaa is any amino acid
MQDVIGALWAGGAEAMTLMGERVTMTSAFRCSGNVLLLHGRVFSPPYVVQAIGDPQRLQAALDDSPGIATFLDYVAWLGLGFSATQEENLEMPPFNGVIELRHATIPDQVDPFRTA

SEQ ID NO: 31833 - DNA, 855 bp, Unknown
  Obtained from environmental sample
  misc_feature (1)..(855): n is a, c, g, or t
atgaaatcaaaacacggaatactgtttttttttatcgggctaattctctactgtccttccgctttttcaatggaatttttctacaagtacaaagccggcgacaagtaccggatagtttccaaagtaaacatggatatttttgttgaccggaaactcggctacagggcggaaattgtaaaccgtatagcaatggaaatcatctctgtttcaggcgatagttccaggcagtcggcggtttttcagtcagcggaaactaccgttccggtgggcgcgaacacggcggcaagcacttttacatgggcgaaggattacgaggcggaatttgagcaggacaggctgggccgcatgacgattgacagccaatactatatgcccaatgtaagggacgtgcctgtttttcccggcagggatctggcggttggcgagacctggatcgccaacggaacagaggttcatgatttccgcgacagttacgggattgaaaaaccctacaccattccctttacggctctttatacctaccttggtgtgaggatgtggaaggatatggagtacccggcttttactgtctcttacagggtttttatggagccggcgccggttccgggtaaggtctaccccaggcgcattcagagctcttccgatcagaccgtttactgggataccgaccgcggacaggcggcggcctacgaagaattcttcagaactattttggatctttcggacgggcaaacctgggaataccggggcagggccgaagcggaagtggtggaagcaccgcccatggacaaggaagatctggcaaaaagcattgccgaagaaatcgccgagattcccgacgccacgtacgcgtga

SEQ ID NO: 31834 - protein, 284 aa, Unknown
  Obtained from environmental sample
  SIGNAL (1)...(23)
  misc_feature (1)..(284): Xaa is any amino acid
MKSKHGILFFFIGLILYCPSAFSMEFFYKYKAGDKYRIVSKVNMDIFVDRKLGYRAEIVNRIAMEIISVSGDSSRQSAVFQSAETTVPVGANTAASTFTWAKDYEAEFEQDRLGRMTIDSQYYMPNVRDVPVFPGRDLAVGETWIANGTEVHDFRDSYGIEKPYTIPFTALYTYLGVRMWKDMEYPAFTVSYRVFMEPAPVPGKVYPRRIQSSSDQTVYWDTDRGQAAAYEEFFRTILDLSDGQTWEYRGRAEAEVVEAPPMDKEDLAKSIAEEIAEIPDATYA

SEQ ID NO: 31835 - DNA, 306 bp, Unknown
  Obtained from environmental sample
  misc_feature (1)..(306): n is a, c, g, or t
ttggggacggggtttcccattccggtggaagtgatccctgaggcgaggaccagcgcgtgtatggcactggagactatgggcgcgacggtcaccctgcgcgaagccctgcgcaaagccggtcctgttatcaccgagcatgggaatctgatactggacattcgctttgcaaaacccgtcgatcccgtggcaatggagcgtgagataaattttattcccggcgtcgtggagaatggtttttttacgcgcaatcgtccggctgtctatatcgcgcgtatggacggaaatattgaagtaagagggaaataa

SEQ ID NO: 31836 - protein, 101 aa, Unknown
  Obtained from environmental sample
  DOMAIN (2)...(96): Ribose 5-phosphate isomerase A (phosphoriboisomerase A)
  misc_feature (1)..(101): Xaa is any amino acid
MGTGFPIPVEVIPEARTSACMALETMGATVTLREALRKAGPVITEHGNLILDIRFAKPVDPVAMEREINFIPGVVENGFFTRNRPAVYIARMDGNIEVRGK

SEQ ID NO: 31837 - DNA, 882 bp, Unknown
  Obtained from environmental sample
  misc_feature (1)..(882): n is a, c, g, or t
atgagagtctttcttatttgtctggaagaagaaaaagaaaatgcctttctgctttctgctttccttgaaaaaacaggtatttacacggaaaagctccttattaaaaccagggatgaaggattgaaactcattacagattacacccacgttgtgattctttcggcgcttgggccgggatggatagattttcttgctgggtttttctgcggttcgcatcttcctattcttgtattaggggaaaaagctatcgaaagcattccggccgtatttgccttttgctttaaattttttgacactgaagaaaaattacatgactatttcaccgaagaattaaaaattttcaaaaaaaatgaagccgtgtgggagacaaatcatattaagcaagccctgcttgacaagggcattcccacgacaattgaggctcttgcccagtgtgttgccgaaaataaagttgacgaaatttctctttttatagccgcgggttttttacccgacgcaaaagacaaaaaagggattcccctgctttgtattgccgccagaaacgggcatgtagacaccgttgagtttctgctccgttccaaagcacaggtggatattcttgccgaggacaggggttctacccctcttattgacagcgctatgggaaggcataaagaagtaataaaaatccttattgatgccggagcggatgtgaatatcaagaatagggacggacagaccgcgctgattatcgttgtaggcgccggggatgtagaaattactgaaatactggttaaggccggggctgatcctgacattgaagacgcttttggcgtcagcgcgagaatgtacgctaacatctttaagagcgaaaaaataaaagccatctttgacgctaaatga

SEQ ID NO: 31838 - protein, 293 aa, Unknown
  Obtained from environmental sample
  DOMAIN (237)...(269): Ankyrin repeat
  misc_feature (1)..(293): Xaa is any amino acid
MRVFLICLEEEKENAFLLSAFLEKTGIYTEKLLIKTRDEGLKLITDYTHVVILSALGPGWIDFLAGFFCGSHLPILVLGEKAIESIPAVFAFCFKFFDTEEKLHDYFTEELKIFKKNEAVWETNHIKQALLDKGIPTTIEALAQCVAENKVDEISLFIAAGFLPDAKDKKGIPLLCIAARNGHVDTVEFLLRSKAQVDILAEDRGSTPLIDSAMGRHKEVIKILIDAGADVNIKNRDGQTALIIVVGAGDVEITEILVKAGADPDIEDAFGVSARMYANIFKSEKIKAIFDAK

SEQ ID NO: 31839 - DNA, 366 bp, Unknown
  Obtained from environmental sample
  misc_feature (1)..(366): n is a, c, g, or t
ttggacaacctgtncgctggtcagggccttcccgacaggccccgcgaaggagtcaagctaatgaccattcacgcctcaaagggtctggagtttgatcatgtttttgttgccggcctggaagaaactatactccccttcaccctctacaatgaccatcctgacattgaagaagaaaaacggctcctttatgtagcaatgacccgtgcgcgtcgcggtctttggctttcatattccgctgtccgtaatttccgcggacgcgtgctgaaaaatcctcccagccgttttctttcagaactggaaacacttgttccgcttgttacagaggaacgtcaatccaaatgggacgggcagatgtgtttgttttaa

SEQ ID NO: 31840 - protein, 121 aa, Unknown
  Obtained from environmental sample
  misc_feature (1)..(121): Xaa is any amino acid
MDNLXAGQGLPDRPREGVKLMTIHASKGLEFDHVFVAGLEETILPFTLYNDHPDIEEEKRLLYVAMTRARRGLWLSYSAVRNFRGRVLKNPPSRFLSELETLVPLVTEERQSKWDGQMCLF

SEQ ID NO: 31841 - DNA, 837 bp, Unknown
  Obtained from environmental sample
  misc_feature (1)..(837): n is a, c, g, or t
atgcggctctccgcggcgagaagcatgatggaacgcgaggacgtaatcatcgtggcgactgtgtcgtgtatctacggaatggttacgccggacgtttaccgaaaaatgaccgccacctgttcaaagggcgaaaccatagacgtggacgcgctaatccgccgcttcgtggaactgcaatatgagcgtaacgacgcggttttagaccgagggcgtttccgcaggcgcggcgacactctggaaatttttcccgcctacatggaagaggcctaccgcatcgatcttgactgggacaaggttgaacggatacggcgtttcaatcctgtatccggcgaaatccttgaggagcttgatcacgccctcatctaccccgccaaacagtttgttatgccggcggaaatggtgcagaacgcgttaggcgccatcagggaagaacttgaaaaaagactggagtattttaaggcaaacggaaaaattctggaagcggaaaggcttaaaacccgcgtcgagtacgatatcgaaatgcttaccgagatgggctactgttcgggcatagaaaattattcggcgctcctggcggggcgcaaacccggcgaatcgccggatacgcttgtcgattatcttccgaaagaacatttaacgttcatcgacgaaagccacgtcacgcttccgcagttgggcgcgatgtacttaggcgaccgcagccgcaagcagaaccttgttgactacggtttccgcctgccctgcgccctggacaaccgccccctgcgctacgacgaatttgaagcgcggttggacaagacggtctttgtttccgcacgccggggcagaaagagatga

SEQ ID NO: 31842 - protein, 278 aa, Unknown
  Obtained from environmental sample
  misc_feature (1)..(278): Xaa is any amino acid
MRLSAARSMMEREDVIIVATVSCIYGMVTPDVYRKMTATCSKGETIDVDALIRRFVELQYERNDAVLDRGRFRRRGDTLEIFPAYMEEAYRIDLDWDKVERIRRFNPVSGEILEELDHALIYPAKQFVMPAEMVQNALGAIREELEKRLEYFKANGKILEAERLKTRVEYDIEMLTEMGYCSGIENYSALLAGRKPGESPDTLVDYLPKEHLTFIDESHVTLPQLGAMYLGDRSRKQNLVDYGFRLPCALDNRPLRYDEFEARLDKTVFVSARRGRKR

SEQ ID NO: 31843 - DNA, 966 bp, Unknown
  Obtained from environmental sample
  misc_feature (1)..(966): n is a, c, g, or t
gtgctggaaattaattggcgtaagctcatacatgtgtatcgcagtaccgatgaagacggtccctatattttaattaaagaagggatcaatagcgatcagatccggtatactgacctcgatattgaaataaacacaatatattattataaagtgtccgctgttagcgaaggcggcgagggatctcaatcacaggtcgtttcaatagaaacccagccgggaacatcagttgcaaaaaccgaagtaatatactggatcggcggcgctgatattcgtatcagttggataccaataaaagacgcggattcatataatgtgtaccgcagcgccaacgcgaatggtccctatacgctgttaggagaaaaaataaagaacgacaagaaccaatattattacaacgaatccgtgcgggacgctttctgttactataaagtatccgtcgtttacaaaagcggggaaagcaaactgtcagaatattccgctataattttgtggacggcgccaagcggctttaaggcggtatttttacaaaccgcgcttaatcctgaagtgactgccgatcatgtaaagatagattgggatgtgtataccggcgccggtgtaacagagtacaagttgtaccgcagaacgggtaacaacagcgcctatacttatttgggaacatcatatacaaacacttacattgataccgcgtttgagaaaaatacttctaatagctacatgttaaccgccgttgttaacggtgacgaaagcgaaccatcgtatgccggcgtgcttgccaaaatatttgatcccaacgcgcctaccagaccgccattggctcccactggagtaaaaatttcttttatccctttgcctatattatttatcctctacttacttggaataaaagtttcgggcgctgatttttaccgtgtataccgccgcgactcattgacaggtacaacaaggataggttccacgggatga

SEQ ID NO: 31844 - protein, 321 aa, Unknown
  Obtained from environmental sample
  misc_feature (1)..(321): Xaa is any amino acid
MLEINWRKLIHVYRSTDEDGPYILIKEGINSDQIRYTDLDIEINTIYYYKVSAVSEGGEGSQSQVVSIETQPGTSVAKTEVIYWIGGADIRISWIPIKDADSYNVYRSANANGPYTLLGEKIKNDKNQYYYNESVRDAFCYYKVSVVYKSGESKLSEYSAIILWTAPSGFKAVFLQTALNPEVTADHVKIDWDVYTGAGVTEYKLYRRTGNNSAYTYLGTSYTNTYIDTAFEKNTSNSYMLTAVVNGDESEPSYAGVLAKIFDPNAPTRPPLAPTGVKISFIPLPILFILYLLGIKVSGADFYRVYRRDSLTGTTRIGSTG

SEQ ID NO: 31845 - DNA, 996 bp, Unknown
  Obtained from environmental sample
  misc_feature (1)..(996): n is a, c, g, or t
atgaaaacagagaaaaaaccggncaggcaatccttgccaaaaacagcattgccgaggatttacaaaattgacgtggaaatagcttcgggaaagtttcccaactcggacgatttggcgcggctctgcgaaaccagcatttctaccatcagccgcgatattgaatttttgcgggatcagctttccgcgccgattgagtatgacgcgcttaaccgcgggtattattacacgaaaaagacattccgtctgccggcggggttcacaagctccgatgatttactggccctcggcatggcaagaaacatctnttcgctgtacagggaaacccctctgtatgaagcgtcccgccagcttttggaaagtatcaccactcccatcgcttccgacggcaaccgggactggctggataaccggattgttgttcccagaatcgcttccgcgaaagttaaccccgatatctggaaaattgtcgtttccggattaaaagaaaaccgcgttatcgcttttgattacaggggaacatgggacgaggaatatcaaaacagacgggtgcgcccctatcagctcttgttcaataacggagtatggtatctgtacggtttctccgaggaacgcagggcggcgcgtattttttccctgccgcggataaaaaacgccgtactcaccaaagacggtttcagcctgccgaataattacagttatgccgagctttccggcgacagctacttcggcgtttttatcggtgaggaaaaaaagagttattcaatagactgttatgaagaagctgttgttttcgcgaccgatcggcaatgggccgcggatcaaagaatcaccgaaatagaagacggaattaaaatcgaatttaccagcactcaatacgggaaggtattaaggtgggttttgtcctgcggctgctgcgctgttccgagaaaaccaaagaaactggttgatgactggaaattgcacatacatgaaatgcgcaaattggcgtcaaaatga

SEQ ID NO: 31846 - protein, 331 aa, Unknown
  Obtained from environmental sample
  misc_feature (1)..(331): Xaa is any amino acid
MKTEKKPXRQSLPKTALPRIYKIDVEIASGKFPNSDDLARLCETSISTISRDIEFLRDQLSAPIEYDALNRGYYYTKKTFRLPAGFTSSDDLLALGMARNIXSLYRETPLYEASRQLLESITTPIASDGNRDWLDNRIVVPRIASAKVNPDIWKIVVSGLKENRVIAFDYRGTWDEEYQNRRVRPYQLLFNNGVWYLYGFSEERRAARIFSLPRIKNAVLTKDGFSLPNNYSYAELSGDSYFGVFIGEEKKSYSIDCYEEAVVFATDRQWAADQRITEIEDGIKIEFTSTQYGKVLRWVLSCGCCAVPRKPKKLVDDWKLHIHEMRKLASK

SEQ ID NO: 31847 - DNA, 888 bp, Unknown
  Obtained from environmental sample
  misc_feature (1)..(888): n is a, c, g, or t
ttggttttaaataccgaatcattcgctgtaagcataattcccgcggaggttcccgccgcccaaatgcaggaactattgggccgcctcgcttcaattcttgggctgccgcttgatcagcttgaaaggaaagttccccgatcaatttatttcctttaccagcctgtggaaatcgcgattaacgtttccttcagcacaatttccgttctttccgaacaggcggattcgctgccgggcgttttctggcaggcgaaacccctgcgcaattatcctgattcaggcagtctcgcgcacataatcggctatgtgggaagcattaccagggacgagcttacggttctttacaaccagggctaccagcagggggatataatcgggaagagcggcattgaaaaacagtacgatgaactgcttcgggggaaagaaggcagggaaaccaggactgttgacgtaaggggaagaaacgtcgcgggggacagtacgcggataaatcctgaaacggggaaaaacctggttcttaccattgaccgcaaaatacagaccctggcggaaaaagctctgggcagtcggatgggagctgttgtagtgctgcgtcccacgagcggagagatactggctatggtctcatatccgtggttcgatcccaacatttttaaccaatcggatctggaagagtcatatcttgcattgcttgacgatccgaacaagccttttatcaaccgggccatacaatccagctatcctccggcttcgacattcaaggttataatgaccaccggcatcctggcggaaaacgccttcccgcctgaacaactggtggaatgtaagggagaaatcgattacggcgacagacaatggcattgccatatcaggcggggccacggcaggtga

SEQ ID NO: 31848 - protein, 295 aa, Unknown
  Obtained from environmental sample
  DOMAIN (1)...(159): Penicillin-binding Protein dimerisation domain
  misc_feature (1)..(295): Xaa is any amino acid
MVLNTESFAVSIIPAEVPAAQMQELLGRLASILGLPLDQLERKVPRSIYFLYQPVEIAINVSFSTISVLSEQADSLPGVFWQAKPLRNYPDSGSLAHIIGYVGSITRDELTVLYNQGYQQGDIIGKSGIEKQYDELLRGKEGRETRTVDVRGRNVAGDSTRINPETGKNLVLTIDRKIQTLAEKALGSRMGAVVVLRPTSGEILAMVSYPWFDPNIFNQSDLEESYLALLDDPNKPFINRAIQSSYPPASTFKVIMTTGILAENAFPPEQLVECKGEIDYGDRQWHCHIRRGHGR

SEQ ID NO: 31849 - DNA, 699 bp, Unknown
  Obtained from environmental sample
  misc_feature (1)..(699): n is a, c, g, or t
ttgccggagatcgggattcccaatgcctcaaggctttacattacccgcccggctttcaattcttcccggctggaggacaagtaccacttttaccttggacccaaaaaccaggaaaccctcagtacttacaaccgcggagataacggctttaagctctttgagaccgaccttttcgaaattgccaacaccaagggtttccttgccccattggaaaaagtgctgaaatggcttctgcaaatcttctacaaaatcattcccaattacggggttgccattattcttcttacgctgcttgtcaggctcctgatgtttccgctcacaaagaaagggtccgaatcgactttgcgtatgcaggccttgtctccaaagatcaaggagatacaggcaaagtataaggacaacccccagaagatgaacgccgagatggcggagttttacaagaaagaaggctataatcccctttccggctgcctgcccatgatcatccagattcccatcttttttgcgatgtataatctctttaacaatcattttgatcttcgcggcgcaatgtttattccgggatggattccggatctttcagcgccggaagcgatatacaatttcccggacggttttaagctgccgcttttgggatggacagcattaaggcttttgccttttatctatgtcggctcccagcttgtttacggcaggtaa

SEQ ID NO: 31850 - protein, 232 aa, Unknown
  Obtained from environmental sample
  DOMAIN (86)...(232): 60Kd inner membrane protein
  misc_feature (1)..(232): Xaa is any amino acid
MPEIGIPNASRLYITRPAFNSSRLEDKYHFYLGPKNQETLSTYNRGDNGFKLFETDLFEIANTKGFLAPLEKVLKWLLQIFYKIIPNYGVAIILLTLLVRLLMFPLTKKGSESTLRMQALSPKIKEIQAKYKDNPQKMNAEMAEFYKKEGYNPLSGCLPMIIQIPIFFAMYNLFNNHFDLRGAMFIPGWIPDLSAPEAIYNFPDGFKLPLLGWTALRLLPFIYVGSQLVYGR

SEQ ID NO: 31851 - DNA, 315 bp, Unknown
  Obtained from environmental sample
  misc_feature (1)..(315): n is a, c, g, or t
atggacagcattaaggcttttgccttttatctatgtcggctcccagcttgtttacggcaggtaacccaaacgcctgatcagcagggaaattcgcagatgaaatttatgctatacatcatgccgatagcatttttctttatcctgtacgatgtgccctcagggcttctcatctactggattatgtcaaacgttttaactttggtgcagcaggtgatcatcaacaagtttattcttcacaagaagggagttgtagcggaagtggagtcaaaacatgtgattgccccaaacataccaagaaagaaaaagaaaaagtaa

SEQ ID NO: 31852 - protein, 104 aa, Unknown
  Obtained from environmental sample
  DOMAIN (1)...(78): 60Kd inner membrane protein
  misc_feature (1)..(104): Xaa is any amino acid
MDSIKAFAFYLCRLPACLRQVTQTPDQQGNSQMKFMLYIMPIAFFFILYDVPSGLLIYWIMSNVLTLVQQVIINKFILHKKGVVAEVESKHVIAPNIPRKKKKK

SEQ ID NO: 31853 - DNA, 702 bp, Unknown
  Obtained from environmental sample
  misc_feature (1)..(702): n is a, c, g, or t
ttgccccaaacataccaagaaagaaaaagaaaaagtaaatggagaatatttatggtttacgaatttgaaggccgcaccgaaaaagaagcgatagatcgcgcggcggaagaattgggtcttaaaacagacgattttgatgtcgagattgttgaaacccagcgttcgagtttgttcaaaaaaggcttcgtcaagatcaaggttcacttaaatcatcttgaacgaagcgccgcttcgaacccgaagagcccgcttgaggttgacggcaacaaaagcaattttggcgttaaacaaccaaacggtcaaaaacaggtaagccacagcgtatttggtgatcctgagcctaaaaatgaatttgaaaagcagttgatcgattttctggagggtctcatcgaacggatgggttattacggaaaggtcatggttcttttccgcgaagagcacaagatcgggttgaagatcgattcggagtattcatccatcctaatcgggaagaagggaaaaaaccttgatgcccttcagcttttggccaacatttatgccggacgcaaggggcgcgaagatatgcgggtaattctggacagtgaaaattaccgcatccgtcgcgaggaatcccttgtgcgtctggcttatacggttgccgaacgcgtgcgggaaacaggggctcgntttactgaacccatgaacccccttgaccgagactga

SEQ ID NO: 31854 - protein, 233 aa, Unknown
  Obtained from environmental sample
  misc_feature (1)..(233): Xaa is any amino acid
MPQTYQERKRKSKWRIFMVYEFEGRTEKEAIDRAAEELGLKTDDFDVEIVETQRSSLFKKGFVKIKVHLNHLERSAASNPKSPLEVDGNKSNFGVKQPNGQKQVSHSVFGDPEPKNEFEKQLIDFLEGLIERMGYYGKVMVLFREEHKIGLKIDSEYSSILIGKKGKNLDALQLLANIYAGRKGREDMRVILDSENYRIRREESLVRLAYTVAERVRETGARFTEPMNPLDRD

SEQ ID NO: 31855 - DNA, 642 bp, Unknown
  Obtained from environmental sample
  misc_feature (1)..(642): n is a, c, g, or t
atggtacagatgcgtacgacgggaagcagggattctcaggctgttatcgacataataaaagaatatattgccgttaacttccccaaaaacgtggaggtgataatcggcggcggcgtaacctatgaaatggcggttaccgatcttatttttaactctcaaatcatatcaatttttatttctgtgcttatagtatttctcattatcgcggtttccaacaaatcgctgattgccggagtcataggcgcggtccccttgacgctggcgatcctgtgcaatttcgcggtgatgggttttcttggaattaaactcactctcggaaccgccctgatttccagccttgcggtcggtatcggcattgattataccattcactttatcgaatttttcaaacatgaataccagtcagggaaacaggcttttcttcgccagacttttatcggctgcgggaaagccattatgattaacgccctggccgtaggcgcgggattcggggtgcttgcgttttcccagttcaaaattatcgcggaacttggcttgcttatcgctttaagtatgctgataaccgcctttgtcagccttacggtaataccggcgctgcttaccaccataaaaccaaaatttatttatggaaaaaataaatga

SEQ ID NO: 31856 - protein, 213 aa, Unknown
  Obtained from environmental sample
  misc_feature (1)..(213): Xaa is any amino acid
MVQMRTTGSRDSQAVIDIIKEYIAVNFPKNVEVIIGGGVTYEMAVTDLIFNSQIISIFISVLIVFLIIAVSNKSLIAGVIGAVPLTLAILCNFAVMGFLGIKLTLGTALISSLAVGIGIDYTIHFIEFFKHEYQSGKQAFLRQTFIGCGKAIMINALAVGAGFGVLAFSQFKIIAELGLLIALSMLITAFVSLTVIPALLTTIKPKFIYGKNK

SEQ ID NO: 31857 - DNA, 345 bp, Unknown
  Obtained from environmental sample
  misc_feature (1)..(345): n is a, c, g, or t
atgtatggaaaaatgctttccgccgttggcttcacatcagcttccaaggcggcaagatgccgagacagttatgccaattttcccatagccggaaaagtaaaccagcttcccctcctgggcactccctggatgttcggccttaccatgaaaagccccggaaattgggctgacggttttatcgtcaaccctgaagacggcaatatgtataaattatcgcttatatatcatccggcggacggcaagaaattccagcatgaaacgctggaagtacgcgggcagcttctttttttctcgggcagccaatactggcgccgggcgacgcgcgaggaagcgagttcgctgtag

SEQ ID NO: 31858 - protein, 114 aa, Unknown
  Obtained from environmental sample
  misc_feature (1)..(114): Xaa is any amino acid
MYGKMLSAVGFTSASKAARCRDSYANFPIAGKVNQLPLLGTPWMFGLTMKSPGNWADGFIVNPEDGNMYKLSLIYHPADGKKFQHETLEVRGQLLFFSGSQYWRRATREEASSL

SEQ ID NO: 31859 - DNA, 333 bp, Unknown
  Obtained from environmental sample
  misc_feature (1)..(333): n is a, c, g, or t
ttgtcaactgggttccgcaaaaacgccgaaggcaaattcatgtggccgggttacggtgaaaacagcagagtcctcgcgtggatttttgaccgctgtgacggtatagacaactacatcgaaacgccaatcggcaatctccccaaaccgggaagcattgaaccgcccgccggcgtaagccccgaagcgatggcggagcttataaaaattgacgttgaaggttggaagaaagaaatctccgacgttaggggaaaacactacgccaaatttggcgacaaactccccaaagatttactgacacaactcgacatcatggagaaaggattaaattcctga

SEQ ID NO: 31860 - protein, 110 aa, Unknown
  Obtained from environmental sample
  misc_feature (1)..(110): Xaa is any amino acid
MSTGFRKNAEGKFMWPGYGENSRVLAWIFDRCDGIDNYIETPIGNLPKPGSIEPPAGVSPEAMAELIKIDVEGWKKEISDVRGKHYAKFGDKLPKDLLTQLDIMEKGLNS

SEQ ID NO: 31861 - DNA, 1137 bp, Unknown
  Obtained from environmental sample
  misc_feature (1)..(1137): n is a, c, g, or t
ttgggtgaaatcttcgtagaatcaatttgccatattatgaataaaatactgaaagaaaaaatcatggaagcgtttttttcggtgcttccaattacaattattgtactcattgtcagcgtgttccttacttcgctgccgtctggaactatactgatgttccttacgggagccgccatgctgatagtcgggatgggttttttcactttgggcgcggatatggcgatgatgcagatgggggaaggcattggcgttcaccttacaaaaagttcaaaactttttatcataatttttataacatttataatcggactgattattacaattgccgaacctgatttacaggtgcttgcgaaggaagtcccctctattccgagcatgagccttataatgacagtttccgtcggagtaggcattttccttgtaatcgcggtattgcgttcgcttttaaaaatacgcctttcgttactgttggttattttttacattattacttttacggtggcatgctttacaccgataacctttgttcccgtcgcgtttgattcaggcggagttacaacaggtcctattacagtcccttttatattggcaatgggggcaggtatcgcgtctatccgcagcgataaagattctatggacgacagtttcggtctggtagcgttatgcagtgtgggaccgattcttgcggtgcttttacttggtatcttttacaaacccgaagccgtagaaatagaaaaatatatccttcaggaagcgcaaacttcgcgcgatgtcgcccagtattttgttcatgaactgccaaacttttttaaagaggtttcttacgctttgagcgctatagtcatcttttttgtcatattccagttatttacgcgcagataccaccgccgtcagcttgtccgtatcgcggtaggttttgtttatacattgatagggcttgtaatctttttaaccggcgtaaacgtcggctttattcccgtaggagagcttttaggttcccagcttgcggcttcggaatttaaatggatattaattccgctggggatcattatcggctactatattgtcgccgcggaaccggcggtacacgtcctgaaacaacaggtggaagagatctcttccggcgcattcacgtaa

SEQ ID NO: 31862 - protein, 378 aa, Unknown
  Obtained from environmental sample
  DOMAIN (27)...(238): Protein of unknown function (DUF1538)
  misc_feature (1)..(378): Xaa is any amino acid
MGEIFVESICHIMNKILKEKIMEAFFSVLPITIIVLIVSVFLTSLPSGTILMFLTGAAMLIVGMGFFTLGADMAMMQMGEGIGVHLTKSSKLFIIIFITFIIGLIITIAEPDLQVLAKEVPSIPSMSLIMTVSVGVGIFLVIAVLRSLLKIRLSLLLVIFYIITFTVACFTPITFVPVAFDSGGVTTGPITVPFILAMGAGIASIRSDKDSMDDSFGLVALCSVGPILAVLLLGIFYKPEAVEIEKYILQEAQTSRDVAQYFVHELPNFFKEVSYALSAIVIFFVIFQLFTRRYHRRQLVRIAVGFVYTLIGLVIFLTGVNVGFIPVGELLGSQLAASEFKWILIPLGIIIGYYIVAAEPAVHVLKQQVEEISSGAFT

SEQ ID NO: 31863 - DNA, 996 bp, Unknown
  Obtained from environmental sample
  misc_feature (1)..(996): n is a, c, g, or t
atgatggccgagcatttttttgttttcatcttactcggaggcggcgtaattaccgggattgtaagcggttatgtgataaaaaaagttcccgaaccgccgagtgaaaaggataggcagggaatgagccttgcctcgattttcaaagacgctttctcgcaggacagcctgcgcagttttatggttattctctttttagttattcttgtatcaggcgttacgcggacattcgtggtggtttacgcccgcgaggtatttgagcataacgacggccttattttgctttactctgtcttcggcggattgggctacttgatagcgggattaagcgtaaaattccttgtagacaggctgggcgcgaagccgctctttctggtctgcgtgatactcggtcttgtaagcatgattcccgtcgtttttcttccggtgtcggcggtttttaacatgacaggcgcgattctttttttggttttcttgttttttatgttgaatttcggttttcttggctccgaaggaatcgcgcagacttattttttggctttaattcctcaggataaaatattggacctgggcattatttatttctttgtattcggcgccgcaggcgcgggcggttcctttcttgcgggtattcttcttgatttcttttctttgctggggattactccttttgtttctttcaagattctttttattatgttaattgctctgacggttatcgcccttgccatgcagaagagaatgacagctttaggttcgtttccattaagaggcgcgcttgaagttatcttctcttttagggatcttcgcgctataagccttttggataaattaaacaaagccgaggattcccaggaagaggaacttttgctcggcgcgttacacgacactccctcccggcttgccgttgacggtttgctggaaagggcgcgctcgccccggcttgcgataagactggaagctataagagcgttggaaagaatggaaaaatttaaatga

SEQ ID NO: 31864 - protein, 331 aa, Unknown
  Obtained from environmental sample
  misc_feature (1)..(331): Xaa is any amino acid
MMAEHFFVFILLGGGVITGIVSGYVIKKVPEPPSEKDRQGMSLASIFKDAFSQDSLRSFMVILFLVILVSGVTRTFVVVYAREVFEHNDGLILLYSVFGGLGYLIAGLSVKFLVDRLGAKPLFLVCVILGLVSMIPVVFLPVSAVFNMTGAILFLVFLFFMLNFGFLGSEGIAQTYFLALIPQDKILDLGIIYFFVFGAAGAGGSFLAGILLDFFSLLGITPFVSFKILFIMLIALTVIALAMQKRMTALGSFPLRGALEVIFSFRDLRAISLLDKLNKAEDSQEEELLLGALHDTPSRLAVDGLLERARSPRLAIRLEAIRALERMEKFK

SEQ ID NO: 31865 - DNA, 822 bp, Unknown
  Obtained from environmental sample
  misc_feature (1)..(822): n is a, c, g, or t
atggtacaaacacaggatgccgcaacccggcttggtacggaatctatcgccaaattactatttcgcttttcaattccggcaataacgggaatgttggttaacgccctctacaatgtagtggatagaatatttgtcgggcagggagtaaacgaaatcgccctcggcggactttcacttgtactgcctttaatgacaatcggtatggcgttcgccatgctcttcggcataggggcggcaaacatgatctccatgcggctcgggcaggggaagaagcaggaagcggagaacgctcttgaccattgtttctttctattgataggcataagccttgtgatgacggcagtaggacttatttttattgatccgattctctctttgatgggagcggcaaaagacagcgaagctattgtatacgcaagggattattttcgcataattttattcggaatggtcttttttatgacaagttttggaatgtcccattgcacaagggcgcagggttttccaaccatgactatgatcggaatgatccttggagctgttcttaatacaattctggatccgatttttatttttgtgttcaaatggggagtggaaggcgccgcatgggctacaattatttcccaatttgcctcttttgtgtttcttttttcttttatctcaagcaagaaagccgtagtaaggcttaacccgcgcgtttttaaaccaggatttttccattataaagcaaataatggcgttcgggtcagcccagttcttgcttcagttcttaatgtctacggttcaactgtaaccaatacaagcgtcgctcggccgatctga

SEQ ID NO: 31866 - protein, 273 aa, Unknown
  Obtained from environmental sample
  DOMAIN (26)...(189): MatE
  misc_feature (1)..(273): Xaa is any amino acid
MVQTQDAATRLGTESIAKLLFRFSIPAITGMLVNALYNVVDRIFVGQGVNEIALGGLSLVLPLMTIGMAFAMLFGIGAANMISMRLGQGKKQEAENALDHCFFLLIGISLVMTAVGLIFIDPILSLMGAAKDSEAIVYARDYFRIILFGMVFFMTSFGMSHCTRAQGFPTMTMIGMILGAVLNTILDPIFIFVFKWGVEGAAWATIISQFASFVFLFSFISSKKAVVRLNPRVFKPGFFHYKANNGVRVSPVLASVLNVYGSTVTNTSVARPI

SEQ ID NO: 31867 - DNA, 516 bp, Unknown
  Obtained from environmental sample
  misc_feature (1)..(516): n is a, c, g, or t
atggcaggattgatgaaaccacttgctggttcaatttttgtttttggaaaagattattcttcaataagcgggatggatttggcaaaactaatagcttttgtgccagctagattccctgccgaaaccaatataaaggtttttgattttgtagcccttggcagaattccgcacacaaatgcttttggaaagctggaaaaaaacgatttggaaaaaataaattttgcaatggagcaggcagaggttgcagactttgcaaaacgcagagtgaatatcctgagcgatggcgaaaagcaacgtgttgcactcgctagagcactcgcccaagacacaaaaattctccttatggacgaacccaccgcatttttggattaccaacaccgcataaaactctttgaatttttaaccaaaacaaaagataaaatccatctggtatcaactcacgaacttgatttggctaagcgatttacggggagcgtgttggatattgagggacaaggaacaagggacaagggataa

SEQ ID NO: 31868 - protein, 171 aa, Unknown
  Obtained from environmental sample
  DOMAIN (1)...(165): ABC transporter
  misc_feature (1)..(171): Xaa is any amino acid
MAGLMKPLAGSIFVFGKDYSSISGMDLAKLIAFVPARFPAETNIKVFDFVALGRIPHTNAFGKLEKNDLEKINFAMEQAEVADFAKRRVNILSDGEKQRVALARALAQDTKILLMDEPTAFLDYQHRIKLFEFLTKTKDKIHLVSTHELDLAKRFTGSVLDIEGQGTRDKG

SEQ ID NO: 31869 - DNA, 1155 bp, Unknown
  Obtained from environmental sample
  misc_feature (1)..(1155): n is a, c, g, or t
gtgtttttgctcggagttgcgctttttggaacatcttctgttgcttgcgcagtagcctgggattttgcctcgctaattgtgttcagggtgcttgctgggcttggtagcgcaatgatttttggcacaaatttggcaattttgtctgctacatacgaagcgcacgagcgcggcaaggcaatgggttttttaacctcagttgtttatatggctcttgcagttggaccttttttgggtggaattttaacgcattattttggctgggaaagcgtgttttacatacctggggtaattctcattgctcaagcgtttagcgtgcctttttttatcaagcgcgagtgggtagaagctagtagcaagcattttgacaaaaggggttccttaatttatggatttgccgtattttgctttatttttggattttcggaattcccggatatgtttgcctttattcttgtggcagttggaattttgttgtttgtctttttttacaattatgagaaacgcagggaagaaccagtattccatgtacgcttgtttggcggcaacaagatttttactttggcatcgcttacaacccttttcagttatatggcatccgctgcatcttattttatgttaagcctttacttgcagtttgtgcgcggctttgatgccagagatgccggattggttttggtttcgtctgcagtggtacaatcaatagcagctctttttgcaggtaggcttgcagataaatttgaaccttccaaaatagctatgcttggaatgggtttaagcgcaattggtttgcttgggcttgtttttgcaggattggagagttcaatttttttcatagtccctatgcttttgcttttagggcttgggattggtttgttcggtgctccaaatacaaaggtgattatgggttctgtggaaaaaaagcatattagccaagcctccgcgaccgttggaactatgaggctttcggggcaggcgttcagtatggctattgctatgatgtcaatttcgcttttcattggtaattctccaatagttccagaaaattttgaaaattttatgcatagctggagattcacatttattttctgcgcggttctatgcattgtaggtgcttttgcaagcagggcttgcgtaaaagtaaaaatacctaaataa

SEQ ID NO: 31870 - protein, 384 aa, Unknown
  Obtained from environmental sample
  SIGNAL (1)...(19)
  DOMAIN (1)...(336): Major Facilitator Superfamily
  misc_feature (1)..(384): Xaa is any amino acid
MFLLGVALFGTSSVACAVAWDFASLIVFRVLAGLGSAMIFGTNLAILSATYEAHERGKAMGFLTSVVYMALAVGPFLGGILTHYFGWESVFYIPGVILIAQAFSVPFFIKREWVEASSKHFDKRGSLIYGFAVFCFIFGFSEFPDMFAFILVAVGILLFVFFYNYEKRREEPVFHVRLFGGNKIFTLASLTTLFSYMASAASYFMLSLYLQFVRGFDARDAGLVLVSSAVVQSIAALFAGRLADKFEPSKIAMLGMGLSAIGLLGLVFAGLESSIFFIVPMLLLLGLGIGLFGAPNTKVIMGSVEKKHISQASATVGTMRLSGQAFSMAIAMMSISLFIGNSPIVPENFENFMHSWRFTFIFCAVLCIVGAFASRACVKVKIPK

SEQ ID NO: 31871 - DNA, 627 bp, Unknown
  Obtained from environmental sample
  misc_feature (1)..(627): n is a, c, g, or t
ttgcgtagacgaaaaaaccctgtctattgttccgttgacggtgtcatgttcgacaaaaccatgactactctgaaatcgttccctaatggaaggaagggaaggtattctgtccccgaaggaattattactgtcgaatcttacgcttttactaattgtaatttaaccgggatatcttttcctgaaagtcttttaaccattggtggttgtgaagttaacggcgatcaacttacagaaatcatagtaagcgagttaaatcctgtattttgcagtattgacggtgtattgtttaataaaaaaaaacacagactcatgacttacccgagaaacaaagatgaaacggaatataccgttcctggcggaacacttcgtattggcaaatatgcatttgccttttgcaagcacttagtcaatatagttcttctggagaaccttaaagtaattgataattacgcgttcgcgtcttgtggatcgcttaaggctatcactctcccaataagcctacagtatatcgggaaatgcgtatttgaagactgcataaatcttgagactattacactttcaagaagaacagggacatggcacaaggcttttaaggggtttaaggggaggatggtttacagggattga

SEQ ID NO: 31872 - protein, 208 aa, Unknown
  Obtained from environmental sample
  misc_feature (1)..(208): Xaa is any amino acid
MRRRKNPVYCSVDGVMFDKTMTTLKSFPNGRKGRYSVPEGIITVESYAFTNCNLTGISFPESLLTIGGCEVNGDQLTEIIVSELNPVFCSIDGVLFNKKKHRLMTYPRNKDETEYTVPGGTLRIGKYAFAFCKHLVNIVLLENLKVIDNYAFASCGSLKAITLPISLQYIGKCVFEDCINLETITLSRRTGTWHKAFKGFKGRMVYRD

SEQ ID NO: 31873 - DNA, 762 bp, Unknown
  Obtained from environmental sample
  misc_feature (1)..(762): n is a, c, g, or t
ttgatgtcaggatgtgacatgcgatacgacgcgttagctccgatatacgatcgcctgatgggtcacgtggagtacgacgagtggatcgagttgatagcgaaggtcgtgaaccgctacggcgattggaacgatccgaaaatacttgaaatcggcgccggaaccggcgtggtagggtctctcctcaaagggatggggtacggctacataggctccgatttgtcggtttccatgtgcaaagaggcgaaacgccgccgcggagtgccgatctgcgccgccgacgcgcgctggttgccgtttaggcggatattcgacgtggcgctgttcttgtacgacggcataaactacatgatgacgctcgacgagtaccgcaagctctttgcctccgtctacgacgtcctgcttccgggcggtctgttcctctttgacatcaccacgcaggaaaactcgatgagacacttcgtacactacgtggactttgaggattacggcgacatcagctacgtccgcaaaagctactacgacgaaataaggtctatacagcacaacgatttcaccatctaccgccaatcggacgaccacccgccctactacgaaaagtttatagaaacgcatatacaaaaggtgttttccgtgccggagatagaaaaggccattcccaagaagcgatttgaggtgcttgggatatgggacggatttctgttcaagaagtattcggggaagtcgctcagaatacattttttgttgcgtcgccttgatgattag

SEQ ID NO: 31874 - protein, 253 aa, Unknown
  Obtained from environmental sample
  DOMAIN (48)...(139): Methyltransferase domain
  misc_feature (1)..(253): Xaa is any amino acid
MMSGCDMRYDALAPIYDRLMGHVEYDEWIELIAKVVNRYGDWNDPKILEIGAGTGVVGSLLKGMGYGYIGSDLSVSMCKEAKRRRGVPICAADARWLPFRRIFDVALFLYDGINYMMTLDEYRKLFASVYDVLLPGGLFLFDITTQENSMRHFVHYVDFEDYGDISYVRKSYYDEIRSIQHNDFTIYRQSDDHPPYYEKFIETHIQKVFSVPEIEKAIPKKRFEVLGIWDGFLFKKYSGKSLRIHFLLRRLDD

SEQ ID NO: 31875 - DNA, 795 bp, Unknown
  Obtained from environmental sample
  misc_feature (1)..(795): n is a, c, g, or t
ttgaatgataaatttaatgtaaccttcacttgggacattcttgtaggcgatatagcccaaaaacgcggtactatgattgccggcggacagtatcccgatatcatggaattaagaggaaatgaatggatcgatgcaggcgctttaatacctcttgaagacctgattgaaaaacacggtcccaggattaaagccctatataaagatgtttgggataaaatgaaatcctcagacgggcacatttattaccttgttaattacggtgtaattcaaggtctagaccaaagtccggattataacggagcagcattttgggttcagaaagctgttctgaaagacgcgggttatcccaagatcgttactattgacgaatattttgacatgatagaagcctattacaggaaaaacccgacaattaacggtcagcccacaattccctttacagttgttacacatgactggcgtgcgtttgaactttggaatccgccgaacttccttgccggcaatcccaatgaaggcaatggcatagttgatccaaaaaacaacttcaaatatacaactttctttacaatggatatgtccaaacgctggtttaagaaatttaatgaaatgaatgccaagggattggtcgacagaacagcctttacagacaattatgaccagtattccgcaaaaatttcttcaggccgtgtgttaggacagagcgttcagggctggcagttcatgtacgctgcggacggagcgaaccgtgatcgcggagaaacatccgcacccagtctcctctccggtagtatttga

SEQ ID NO: 31876 - protein, 264 aa, Unknown
  Obtained from environmental sample
  misc_feature (1)..(264): Xaa is any amino acid
MNDKFNVTFTWDILVGDIAQKRGTMIAGGQYPDIMELRGNEWIDAGALIPLEDLIEKHGPRIKALYKDVWDKMKSSDGHIYYLVNYGVIQGLDQSPDYNGAAFWVQKAVLKDAGYPKIVTIDEYFDMIEAYYRKNPTINGQPTIPFTVVTHDWRAFELWNPPNFLAGNPNEGNGIVDPKNNFKYTTFFTMDMSKRWFKKFNEMNAKGLVDRTAFTDNYDQYSAKISSGRVLGQSVQGWQFMYAADGANRDRGETSAPSLLSGSI

SEQ ID NO: 31877 - DNA, 678 bp, Unknown
  Obtained from environmental sample
  misc_feature (1)..(678): n is a, c, g, or t
atgagttttataaatacgtcattagggtttataacagccatagcttttgctcttttgcttaatgaagtaaaaaagattttttttaaacgcgctattcaaactatatcttatcttccccacttcctctcatgggttatagttacaggtttagtatccagtatgcttaccacagacagcggagctataaacaacgcttttatggcgttgggttttataaaagagccggtgttatggcttgccgaaccaaactatttctggggaataatcggcattacttatgtatggaaagaagtaggatggaatacaattatatatcttgcagcaatagccggtattgacccgaatttgtatgaagctgcggatattgacggttgtaacaggtatcaaaaaatgtggcgtattacacttccgtgcataaaaccgacaattataattttattaataatgagcgtcggacacatacttgacgcgggttttgaattgcagtacttgctgcgaaacgggcttgtaatggatgtatcagatacaattgatatctatgtgcttattttcggccttagccgttcaaattattcacttgcgacagcggccggtatgtttaaaaatgtggtaaatatttcattaatattcatcgctaacgaaattgccaaaagagccggagaggagcgtcttatatga

SEQ ID NO: 31878 - protein, 225 aa, Unknown
  Obtained from environmental sample
  SIGNAL (1)...(17)
  DOMAIN (1)...(221): Binding-protein-dependent transport system inner membrane component
  misc_feature (1)..(225): Xaa is any amino acid
MSFINTSLGFITAIAFALLLNEVKKIFFKRAIQTISYLPHFLSWVIVTGLVSSMLTTDSGAINNAFMALGFIKEPVLWLAEPNYFWGIIGITYVWKEVGWNTIIYLAAIAGIDPNLYEAADIDGCNRYQKMWRITLPCIKPTIIILLIMSVGHILDAGFELQYLLRNGLVMDVSDTIDIYVLIFGLSRSNYSLATAAGMFKNVVNISLIFIANEIAKRAGEERLI

SEQ ID NO: 31879 - DNA, 768 bp, Unknown
  Obtained from environmental sample
  misc_feature (1)..(768): n is a, c, g, or t
gtgcgcgacaggcccgtaagcgttacggaaaaactctacaacgaattctgcgcgcagaaaaacttttacgacaaagtatcggcgattcgcgattatgtcaataataaaaacgcttccgccgattcggaaatgttcatggagatgttctcatactttacggctttcttacgcgctccttcccgcgtagaagcggaagattcacgcagatcagccgataccgtaattcaaaacgccgaatatgccgttgcctcctttttattgctgaatgaactaatcgcgaataaaaattattcacatcttaaatcgtctttttcttcggattttgctgaaatttttgcaaatattaaagacgttccttcgctgtttaagaatttaaaagacaccaaattaaaaacggaactgcttactaacgtaaaactttttatcggtaattggcctgatatctatataaaattgtttccctattcacaacttgtctccattacggaacagcttgaggaagccggttttacagacaaactttccgcattgtgcaccgactgttttgaccgttaccgtgaatgtcgtgaggcggtcgtttggctttacaaaaacgcgatggaaaaaccatggtttaaggcggctaatatcggaaaagaaaaacagcttattacccttattcacattttagacgttactttccgcgacatagaaaattcaaaggataccgtagaaaacagaaaaattaacaaacttgttcataacatacttttcaaagacggcgaataa

SEQ ID NO: 31880 - protein, 255 aa, Unknown
  Obtained from environmental sample
  misc_feature (1)..(255): Xaa is any amino acid
MRDRPVSVTEKLYNEFCAQKNFYDKVSAIRDYVNNKNASADSEMFMEMFSYFTAFLRAPSRVEAEDSRRSADTVIQNAEYAVASFLLLNELIANKNYSHLKSSFSSDFAEIFANIKDVPSLFKNLKDTKLKTELLTNVKLFIGNWPDIYIKLFPYSQLVSITEQLEEAGFTDKLSALCTDCFDRYRECREAVVWLYKNAMEKPWFKAANIGKEKQLITLIHILDVTFRDIENSKDTVENRKINKLVHNILFKDGE

SEQ ID NO: 31881 - DNA, 969 bp, Unknown
  Obtained from environmental sample
  misc_feature (1)..(969): n is a, c, g, or t
ttggcaattgagcctcaaaagagctgtatttataatcccgccgcccgaccttacgccggaattattttgcctgtaaaaggaatctttccaaaggaaattatcaacctctaccgcgacaatggcgctgagttgcttgactgggagcgcgcgcgtttaagaattcctaaagtaaaacattacacccataaatacgaaagaggatgcgtggagatccgcgcgggctccgccggaacaacaggggccgccttaattgccgcgcggggcgcacaggcggcgggggcggggctagtccgccttgtcctggatgacgacatttacccaatacttgcttcaggcgctggtggaatcatggtttccccggtatccggcaagtttcaggattttgagggaaaatttacgcccgacacgatacttcttgggcccggctggggcaggggagaggaccgcgttccggttttggaaaaagcactacagaaagaaaaaacgggaacgcctttgatactggacgcggatgccatcgagctatccaaaaacgcgaaatttaacggcaacgcgattcttactccccatccgggcgaattaagcaggttttcagaaattgaaaaagaagaattgctatgccgtccggctccggcgctcctaaaactcagccgggaatacaacgcggtgattctttttaaaagccatgtgatctacatcgcggctccggacggccgccttggaattgtagacggcatgacggcaaacctggctgccggggggagcggagacctcctggccggaatttgcgccgctatagccgcaagaatggcgagggaagggaactttgacgcttataactgcgccgccgccgccgcaagcctgcttattgctgtagctaaagccgataatttaagaaagcgttttacagacccgcttgaattggcagataaggcggcgcaactggcaggggaagcatggctgacatga

SEQ ID NO: 31882 - protein, 322 aa, Unknown
  Obtained from environmental sample
  DOMAIN (69)...(314): Carbohydrate kinase
  misc_feature (1)..(322): Xaa is any amino acid
MAIEPQKSCIYNPAARPYAGIILPVKGIFPKEIINLYRDNGAELLDWERARLRIPKVKHYTHKYERGCVEIRAGSAGTTGAALIAARGAQAAGAGLVRLVLDDDIYPILASGAGGIMVSPVSGKFQDFEGKFTPDTILLGPGWGRGEDRVPVLEKALQKEKTGTPLILDADAIELSKNAKFNGNAILTPHPGELSRFSEIEKEELLCRPAPALLKLSREYNAVILFKSHVIYIAAPDGRLGIVDGMTANLAAGGSGDLLAGICAAIAARMAREGNFDAYNCAAAAASLLIAVAKADNLRKRFTDPLELADKAAQLAGEAWLT

SEQ ID NO: 31883 - DNA, 927 bp, Unknown
  Obtained from environmental sample
  misc_feature (1)..(927): n is a, c, g, or t
gtggtcgttttggttcgcgtcgtcgatggcgcccttcgccgcggtcagcaaatcaagtttcttaaaaccggcgcgaaatatgcaatagacaaaatcggatatttcacgccgaaaatggaatacgccgatggtctttgcgccggagaaatcggattcatcattaccggaatgaaatcaatcaaggactgcaaaataggcgacaccatcgtcgacgccgcgtccgacgcgttcccgcttcccgggttcaagccgtccgtccccgtcgtgttctcgtcattctttccggtggaggctcaggattatcccgcgcttaaagacggcgcggaaaagctggcgcttaacgattcgtcgttcgtgttccagacggaaaaatcgtcggcgctgggattcgggttgcgatgcggatttttggggctgcttcacatggagattgtaagcgagcgtctgtcgcgcgaattcggattgaatcttataagcaccgtgccgtccgtgttgtatcggctgcatcttaaaaataaggaagcgaaggatttggaaagtcccgccgatatgcccgacccgaccgaaatagagtttatagaagagccgtgggttcgcgccaccataatgacgccggacaaatatatgggaaatattttggggctttgcacagagcggcgcggcgttcaggaaaatatttcgtatatcggaaaccgcgcggtggtgacatatcgccttccgcttgccgaaacggtgtttgacttttacgaccgcgtcaaaagtttgtcgcaggggtatgccagtttcaactatgaattggcggattatgaaacggccgatttggtaaaggtctctattttggtgaacgaggataatgtagagccgctgtcgtttctgtgccacgttcgtcggcggaggcacgcgggcggaaaatgtcgaaaagcttaa

SEQ ID NO: 31884 - protein, 308 aa, Unknown
  Obtained from environmental sample
  DOMAIN (2)...(70): Elongation factor Tu domain 2
  misc_feature (1)..(308): Xaa is any amino acid
MVVLVRVVDGALRRGQQIKFLKTGAKYAIDKIGYFTPKMEYADGLCAGEIGFIITGMKSIKDCKIGDTIVDAASDAFPLPGFKPSVPVVFSSFFPVEAQDYPALKDGAEKLALNDSSFVFQTEKSSALGFGLRCGFLGLLHMEIVSERLSREFGLNLISTVPSVLYRLHLKNKEAKDLESPADMPDPTEIEFIEEPWVRATIMTPDKYMGNILGLCTERRGVQENISYIGNRAVVTYRLPLAETVFDFYDRVKSLSQGYASFNYELADYETADLVKVSILVNEDNVEPLSFLCHVRRRRHAGGKCRKA

SEQ ID NO: 31885 - DNA, 396 bp, Unknown
  Obtained from environmental sample
  misc_feature (1)..(396): n is a, c, g, or t
ttggtcgtcaaaagtctctttgcggccgatattcatacagccatagagattaatggagtaattgttcagggcggtttggtatatgttgctgtatactctaatgaaaatgattataaaaacgagaccgcctttaccaaatttatcttacagccggataatactgccttaatgtattttctggatttgcccgaaggggaatatgtggtttctgtatatcaggataaaaatggcgatgaaaaactcaattccggcctttttggaattccttccgagcctgttggaaaaacaaactacaacctcaggggagcgccgggtagttttaacaaattgaaagtccctgtaaacaataattcgacaaggctaatcgtcaacatggggagagtgagacttctatag

SEQ ID NO: 31886 - protein, 131 aa, Unknown
  Obtained from environmental sample
  misc_feature (1)..(131): Xaa is any amino acid
MVVKSLFAADIHTAIEINGVIVQGGLVYVAVYSNENDYKNETAFTKFILQPDNTALMYFLDLPEGEYVVSVYQDKNGDEKLNSGLFGIPSEPVGKTNYNLRGAPGSFNKLKVPVNNNSTRLIVNMGRVRLL

SEQ ID NO: 31887 - DNA, 450 bp, Unknown
  Obtained from environmental sample
  misc_feature (1)..(450): n is a, c, g, or t
atgcgcgtttacatggaagacatacgctctccattcaatgtgggcgcgatgttccgcaccgcggaaattttcggagtggaaaaaatttttctgtctccgttctgcgccgacccgagacaccgccgcgccgaaaggacagcgatgggctgcgttgacattgtcccctgggaacggcgcggctttttcaccgatgatgaaaattccgccctgcccttccccgtattcgcccttgaaacaggcggcattccaatagacaaatttcccttcccccgcgacggcctcttgatagccggttccgaagagttgggagtaagcccgcgcgcactggccgcggcggacgcctcgctcggcagggtgtcaattcccgtttacggcgcaaaagcttcgttgaatgtgtcggtggcattcgggatcgcgctgcaggcgtggacgaaggtttttaaaacttaa

SEQ ID NO: 31888 - protein, 149 aa, Unknown
  Obtained from environmental sample
  DOMAIN (1)...(141): SpoU rRNA Methylase family
  misc_feature (1)..(149): Xaa is any amino acid
MRVYMEDIRSPFNVGAMFRTAEIFGVEKIFLSPFCADPRHRRAERTAMGCVDIVPWERRGFFTDDENSALPFPVFALETGGIPIDKFPFPRDGLLIAGSEELGVSPRALAAADASLGRVSIPVYGAKASLNVSVAFGIALQAWTKVFKT

SEQ ID NO: 31889 - DNA, 666 bp, Unknown
  Obtained from environmental sample
  misc_feature (1)..(666): n is a, c, g, or t
atgataaaaataaaaaaacgtaaaattattgacgggctgatttacggcataatggcggcggctatgactgccgttcttgcggtcttattatttgttattttctatatattcaaatcccaggcgggcttttttaatctttcatttttattcggcaaggaaaacggcattcttcccatgattgtaaccacgctttatgtagtgctcgtttctatagctgtgtcccttcccataggaattgccaccgcgatatttttaaacgagtactccggcaattcctcatggataaaaatcctgcgtcttgcgatagaaaccctagcgggaattccttctattatctacggacttttcggccttcttatgttctgcaggctgttaaatttcggtcagtccataatagcaggcgctttcactttaagcataatgatacttcctgtcattatccgcacaaccgaagaatcgcttaaatcaatacccgacactttccgcgaaggctctctcgcgttaggcgcaaccaaattccaaacgattattcatgttgtgctgccttccgctctgccgggaattgtaacctccgtgattctcgcgataggaagggtagtgggagaatcagcgcctgtgctgcttacggtcgggtcttacaaaaaatatgcctcgtaccatttntga

SEQ ID NO: 31890 - protein, 221 aa, Unknown
  Obtained from environmental sample
  SIGNAL (1)...(27)
  DOMAIN (60)...(218): Binding-protein-dependent transport system inner membrane component
  misc_feature (1)..(221): Xaa is any amino acid
MIKIKKRKIIDGLIYGIMAAAMTAVLAVLLFVIFYIFKSQAGFFNLSFLFGKENGILPMIVTTLYVVLVSIAVSLPIGIATAIFLNEYSGNSSWIKILRLAIETLAGIPSIIYGLFGLLMFCRLLNFGQSIIAGAFTLSIMILPVIIRTTEESLKSIPDTFREGSLALGATKFQTIIHVVLPSALPGIVTSVILAIGRVVGESAPVLLTVGSYKKYASYHX

SEQ ID NO: 31891 - DNA, 438 bp, Unknown
  Obtained from environmental sample
  misc_feature (1)..(438): n is a, c, g, or t
ttgatcctccccgatggttttgaggatctggaatattacggttacggtcctgtcgagaattaccctgaccgcctgcttgcgggcattctcgcggttcaccgctccaccgtttcaggcgagcactttccctttgtgcctccttctgagaccggaggccacgaaaaaacccgctggcttaagattgcccgtcccagcggcggacacataaaaataagttctgccacgcccttccattttgacgcgctgcacagtacaacagaggactatttttccaccgctcacgatcacgaacttgtccgccgtagcgagacctttgtgcacatagacgccgcccacggccccataggttctgaaatggcatggagtaccgttatgcccgccgattatgccctgggaggaggatcttactctctggaattcgaaatagatataaactaa

SEQ ID NO: 31892 - protein, 145 aa, Unknown
  Obtained from environmental sample
  DOMAIN (1)...(143): Beta galactosidase small chain
  misc_feature (1)..(145): Xaa is any amino acid
MILPDGFEDLEYYGYGPVENYPDRLLAGILAVHRSTVSGEHFPFVPPSETGGHEKTRWLKIARPSGGHIKISSATPFHFDALHSTTEDYFSTAHDHELVRRSETFVHIDAAHGPIGSEMAWSTVMPADYALGGGSYSLEFEIDIN

SEQ ID NO: 31893 - DNA, 1134 bp, Unknown
  Obtained from environmental sample
  misc_feature (1)..(1134): n is a, c, g, or t
gtgcacccgtggactgccgacgcaaagaaccctatggaagcggcggaacacaaaatggacgcggcctttgagtttttcacaaaacttggtgccgacttatattgcttccatgaccgcgacatagctcctgaaggcgcaaacccggcggagagcgaaaagaacctgtttgctttagtggcaaaggcaaaaaagcttcagaaggccaccggcgtaaaactcctttggggaacggcgaatcttttcagccacccccgttttatgaacggcgcggccacaaaccccgaattccccgtagtcgcccttgcggcgacccaggtaaaagccgcgattgacgccaccatcgagcttggaggccaaggctacactttttggggtggcagggaaggctacatgagccttataaacacggatctgaaaaaggaaaaagaccacctggccaaattcctcgcaatggcaagagactacgggcgcaaacagggctttaagggctcattctacattgagccaaaacccatggagccaaccaagcaccagtacgacttcgacaccgaaacggtaatcggctttctcaggcactacggcctggacaaggacttccgcctgaacatcgaggccaaccatgctgagctggcgggacacgattttgtccacgagcttgagacagcggcggcggcggggcttttcggctcggtagacgcaaaccgcggcgaaccccgcaacggctgggacacggatcagttccccatggattacgccgaaactgcaaaagccatgttcactattctgaaagccgggggctttaccaccggtggccttaacttcgacgcgaagatccgccgncattcggtagatcccgaagatctcttcattgcccacataggcgggatggacgcgtttgcggttggcctgatagtcgcccagaagatcatcgatgacggtaaaattccgaatttcatcaaaaagcgctatgcctcgttcaactcaggggatggcgcgaaattcgacaaaggccagataacctttgaagagcttgcgaagattggcacaacggcgggctatggaaagaccggtattacaagcggcaagcaggaatatctggaaagcgttttgaatcagtatttgctgggactttag

SEQ ID NO: 31894 - protein, 377 aa, Unknown
  Obtained from environmental sample
  DOMAIN (23)...(238): Xylose isomerase-like TIM barrel
  misc_feature (1)..(377): Xaa is any amino acid
MHPWTADAKNPMEAAEHKMDAAFEFFTKLGADLYCFHDRDIAPEGANPAESEKNLFALVAKAKKLQKATGVKLLWGTANLFSHPRFMNGAATNPEFPVVALAATQVKAAIDATIELGGQGYTFWGGREGYMSLINTDLKKEKDHLAKFLAMARDYGRKQGFKGSFYIEPKPMEPTKHQYDFDTETVIGFLRHYGLDKDFRLNIEANHAELAGHDFVHELETAAAAGLFGSVDANRGEPRNGWDTDQFPMDYAETAKAMFTILKAGGFTTGGLNFDAKIRRHSVDPEDLFIAHIGGMDAFAVGLIVAQKIIDDGKIPNFIKKRYASFNSGDGAKFDKGQITFEELAKIGTTAGYGKTGITSGKQEYLESVLNQYLLGL

SEQ ID NO: 31895 - DNA, 591 bp, Unknown
  Obtained from environmental sample
  misc_feature (1)..(591): n is a, c, g, or t
atgatacactatgttgataaagtggactcgggcaatcttttcgcggatgaaattatggatccaaaaggctggatattgttgggctttgttatggatccacgtaccggtcttggacgcttccggaattttacaataagtaattatgatttgatgacatccctcgcgaaagcgtgttctgaaaaagatattcacgaaatattggaaatgccggatgtaaaagaacgcctcgaattatattttcaacagagagacctttttattgagatggtcaagagtcatgccaccgtcattggtaatattattaaggttgatctgcgggacgtggaaaccatttatgcaggtaacaggtttatcatctatacgctttatccacagcagaatatttccgtctggattgtagacggccgtaataaatccaatgtcgcaattaccgtcggtcatagtatattaaaccgcacatctaccacggatgtaggttccatgctgcttcattacggcggcggcggccacaaacaggttggcacttgtcaggttacttacgatgacgcggataaaattattgccgaaataactgaaaaagccagacaataa

SEQ ID NO: 31896 - protein, 196 aa, Unknown
  Obtained from environmental sample
  misc_feature (1)..(196): Xaa is any amino acid
MIHYVDKVDSGNLFADEIMDPKGWILLGFVMDPRTGLGRFRNFTISNYDLMTSLAKACSEKDIHEILEMPDVKERLELYFQQRDLFIEMVKSHATVIGNIIKVDLRDVETIYAGNRFIIYTLYPQQNISVWIVDGRNKSNVAITVGHSILNRTSTTDVGSMLLHYGGGGHKQVGTCQVTYDDADKIIAEITEKARQ

SEQ ID NO: 31897 - DNA, 846 bp, Unknown
  Obtained from environmental sample
  misc_feature (1)..(846): n is a, c, g, or t
atggaacgaactagggcttcctttggaaaccagcgcctcttgggtcttgactactattccggcggacatttaacacacggttacaggcataatctttcagggcgaatgttcgatatttacggatattccgtatccgccgaaaacggaatgttggactacgatgaaattgaaaaacaaacattacaggtgcgcccgttaattttattgacaggctattccgcctacccacgaaaaataaacttcaaacgtatgagggaaatcgctgataaagtgggcgcggtcttcatggtggacatggctcactttgcgggtcttgtcgcgggcaaggtatttacgggcgaatatgatccagtcccctgggcgcatgttgttaccagcacgacgcataaaaccctgcgcggcccgcgggcgggaatagtactctccacaagcgaatttgcggaagcgttggacaaaggctgtcctttgaccatgggcggaccattaccgcacgttattgccgcaaaagccgtcgcactccgagaagcctccgctcctgaattcaagcagtatgcgcaaaaaattgtagacaactgcaaagcgcttgcggcttcctgcatgaaaaacggtcttgacgttctaacaggcggcactgacaaccaccttctgcttgtaaacgtacacaacgccggccttactggcagacaggcggaaagcgcccttcacgagtgtcgcataacgcttaaccgaaacagtctgccgcgtgatcccaacggcccgtggtacacttcgggaatcaggattggaaccgcagccgtaacgactcttggaatgacggagacgganatgacggaacttggcgaataa

SEQ ID NO: 31898 - protein, 281 aa, Unknown
  Obtained from environmental sample
  DOMAIN (1)...(281): Serine hydroxymethyltransferase
  misc_feature (1)..(281): Xaa is any amino acid
MERTRASFGNQRLLGLDYYSGGHLTHGYRHNLSGRMFDIYGYSVSAENGMLDYDEIEKQTLQVRPLILLTGYSAYPRKINFKRMREIADKVGAVFMVDMAHFAGLVAGKVFTGEYDPVPWAHVVTSTTHKTLRGPRAGIVLSTSEFAEALDKGCPLTMGGPLPHVIAAKAVALREASAPEFKQYAQKIVDNCKALAASCMKNGLDVLTGGTDNHLLLVNVHNAGLTGRQAESALHECRITLNRNSLPRDPNGPWYTSGIRIGTAAVTTLGMTETXMTELGE

SEQ ID NO: 31899 - DNA, 366 bp, Unknown
  Obtained from environmental sample
  misc_feature (1)..(366): n is a, c, g, or t
ttgtgtacgtttacaagcagaaggtggttgtcagtgccgcctgttagaacgtcaagaccgtttttcatgcaggaagccgcaagcgctttgcagttgtctacaattttttgcgcatactgcttgaattcaggagcggaggcttctcggagtgcgacggcttttgcggcaataacgtgcggtaatggtccgcccatggtcaaaggacagcctttgtccaacgcttccgcaaattcgcttgtggagagtactattcccgcccgcgggccgcgcagggttttatgcgtcgtgctggtaacaacatgcgcccaggggactggatcatattcgcccgtaaataccttgcccgcgacaagacccgcaaagtga

SEQ ID NO: 31900 - protein, 121 aa, Unknown
  Obtained from environmental sample
  misc_feature (1)..(121): Xaa is any amino acid
MCTFTSRRWLSVPPVRTSRPFFMQEAASALQLSTIFCAYCLNSGAEASRSATAFAAITCGNGPPMVKGQPLSNASANSLVESTIPARGPRRVLCVVLVTTCAQGTGSYSPVNTLPATRPAK

SEQ ID NO: 31901 - DNA, 372 bp, Unknown
  Obtained from environmental sample
  misc_feature (1)..(372): n is a, c, g, or t
atgggtcagaattcggcacgagcggcacgagaagggatattcaaccttagaagcgaaataatacccattataaacctgcataaacgcttccacctgaagaaactggaaagctcggaggaagatgagttattgtccgggtttgttatacttgatatagacggcatgaaactggggattatcattgatcgtatatccagggttataacaatcgaaaaggaagatatacagccgccgcctcaaatgttttcagggattggagcggaatatataatgggagtagtacgccaggatagcggctacctgattatcctggatatccgggatttatttaatcccaaggaactccaaaagatcgccgagttgagacgctag

SEQ ID NO: 31902 - protein, 123 aa, Unknown
  Obtained from environmental sample
  DOMAIN (1)...(114): CheW-like domain
  misc_feature (1)..(123): Xaa is any amino acid
MGQNSARAAREGIFNLRSEIIPIINLHKRFHLKKLESSEEDELLSGFVILDIDGMKLGIIIDRISRVITIEKEDIQPPPQMFSGIGAEYIMGVVRQDSGYLIILDIRDLFNPKELQKIAELRR

SEQ ID NO: 31903 - DNA, 585 bp, Unknown
  Obtained from environmental sample
  misc_feature (1)..(585): n is a, c, g, or t
gtgatcatggatgaagttggccggggaaccggcaccaatgacgggctttccattgcctgggcggtcagcgaggaactgctggaccggatcaaatgccggacgttttttgccacccactaccacgaactttcgcttttgcagcatccccgcatggtcaaccggtcaatggaagtactggaaaaggatggggggatagtttttttacgccgcctgaaagaaggccccaccgcggagtcctacggcctccatgtcgcccgcctcgccggattatccccggcggtactggagagggcgcggcagatcatgcagcgactccgtgaacgggacactggcttgggtgttaaccagcagccaaaaccagataatgttaaccataatgattatacggttaacaaaaaagtgtctgacgccattatacgagagttatcagtgcttgaaccggaaaagatgacacctcttcaggcccttggtctgtttaatgagtggaaacggcgatttaccattgaaggggaaaatgtcccgcccgtgagccccaaaccccgcggcggcaaaacggcagattcatccccttcgctgtttgattag

SEQ ID NO: 31904 - protein, 194 aa, Unknown
  Obtained from environmental sample
  DOMAIN (1)...(108): MutS domain V
  misc_feature (1)..(194): Xaa is any amino acid
MIMDEVGRGTGTNDGLSIAWAVSEELLDRIKCRTFFATHYHELSLLQHPRMVNRSMEVLEKDGGIVFLRRLKEGPTAESYGLHVARLAGLSPAVLERARQIMQRLRERDTGLGVNQQPKPDNVNHNDYTVNKKVSDAIIRELSVLEPEKMTPLQALGLFNEWKRRFTIEGENVPPVSPKPRGGKTADSSPSLFD

SEQ ID NO: 31905 - DNA, 846 bp, Unknown
  Obtained from environmental sample
  misc_feature (1)..(846): n is a, c, g, or t
gtgggcggtccggcggattgctggctgcggccttgcggcgatgtttttccgcgttttgccagcgcgctgtttgccgccgcccacgccggacatataccggtttntgcgctgggcggcggggcaaatatcctggtcgcggacacgggtgtccgggggattgtgctggacatgggcggctggacgggtgaaacaggacagcggcggcgggaaggaatcctggagttccgcgccgggacaagccttgattccgccgctgaaattgccgcggaagccggactttccgggctggaatttcttgccggaatgcccggcagtatcggtggggcggtctggatgaatgcccgctgttacgggcaggaaatcgccgatgtattaatcgaaacggaagttatcaacttttccggttcaccgcctgaacgcgagcgcctgtccgctatcaaaactgaatttagttacaaacacagcccctttcagggccgtgattcgttaatcctttccgcgtcatttcacctaaaacccggcgaaacacggcaaatccgcgcgataatggattcccaccgtaaagaccgtgaaacaaaaggacactaccgttacccctccgccggctcggtttttaagaacaatccgcgttttggcaagccaaccggacaaataattgatgaattgggtttatgcggcctgcgcaagggcggagcgcaggtggccccctggcatggcaatattatcgttaataccggcggggcctgtgccgcggatatccgcaccctggttgaagaagttaccgcccgggtcaaagcggcaacgggttttgatcttgagccggagatattgtttattggggactag

SEQ ID NO: 31906 - protein, 281 aa, Unknown
  Obtained from environmental sample
  DOMAIN (11)...(141): FAD binding domain
  misc_feature (1)..(281): Xaa is any amino acid
MGGPADCWLRPCGDVFPRFASALFAAAHAGHIPVXALGGGANILVADTGVRGIVLDMGGWTGETGQRRREGILEFRAGTSLDSAAEIAAEAGLSGLEFLAGMPGSIGGAVWMNARCYGQEIADVLIETEVINFSGSPPERERLSAIKTEFSYKHSPFQGRDSLILSASFHLKPGETRQIRAIMDSHRKDRETKGHYRYPSAGSVFKNNPRFGKPTGQIIDELGLCGLRKGGAQVAPWHGNIIVNTGGACAADIRTLVEEVTARVKAATGFDLEPEILFIGD

SEQ ID NO: 31907 - DNA, 873 bp, Unknown
  Obtained from environmental sample
  misc_feature (1)..(873): n is a, c, g, or t
atgctcacggagcaccnggttgatcaaatccattttcatgaggtcgggaatctggacgcgatagccgacataacaggcgtctgcatgcttatggaagaactcgctccgcaaaaaatcattgtctcgcctgttcatgtcggcagcggttttgtgcactgcgctcacggcgtactgccagttcccgctccggcaaccgcccatattttaacaggcgttcccgtttacggcgggagaatcaaaggtgaactatgtacgcccacaggcgccgctatcctgaaatttttcgccgatgacttcgcaccgatgccgcagatgcggataatgaaaaccgggtacggaatggggaaaaaagattttgaagcggctaactgtgtacgcgtttttatgggagacgtcaacagtattaatgatattaatagtattaatgatgacggcggtatcaacaatatacgcccaaacgatcaaatcgccgagttagtctgcaccctcgacgacatgaccccggaagcaatcgccttcgcccaagagacgctgcttgccgccggcgcgcttgatgtttacgccacgccgaccgtcatgaaaaaagggcgatccgggatcgtgttcacttgtctatgccgtattaatgacagagacgctatcatcccgctgatatttaagcatacatccacattgggtctccgtgagtacatcgttaaccgctatacactgcaacgtacacaatcaacaatccaaacaaaatacggtgatgtgcgtatcaaatcggcaagcggattcggcgtgaaaaaatcaaagccggaatacggcgacatcgcggctatcgcccgcgaacacggggctgctttaggcgatgtgttaaaggagataaaatga

SEQ ID NO: 31908 - protein, 290 aa, Unknown
  Obtained from environmental sample
  DOMAIN (1)...(290): Protein of unknown function DUF111
  misc_feature (1)..(290): Xaa is any amino acid
MLTEHXVDQIHFHEVGNLDAIADITGVCMLMEELAPQKIIVSPVHVGSGFVHCAHGVLPVPAPATAHILTGVPVYGGRIKGELCTPTGAAILKFFADDFAPMPQMRIMKTGYGMGKKDFEAANCVRVFMGDVNSINDINSINDDGGINNIRPNDQIAELVCTLDDMTPEAIAFAQETLLAAGALDVYATPTVMKKGRSGIVFTCLCRINDRDAIIPLIFKHTSTLGLREYIVNRYTLQRTQSTIQTKYGDVRIKSASGFGVKKSKPEYGDIAAIAREHGAALGDVLKEIK

SEQ ID NO: 31909 - DNA, 1362 bp, Unknown
  Obtained from environmental sample
  misc_feature (1)..(1362): n is a, c, g, or t
gtgaacaacaatgtattgacggcggcggcgttaaaacctaaagttgacggctgggtcagtgtatcggtgaccgaaattgtaaaagcgtgggtacgcgcggatattcaaaacttcgggttcgcgctgttccctcttgcgggcgagacacagagcgttttcgccgatatgtacaacaacgacgaaaacgcgccatatcttaaagtgagcggccgcgttggcagacgcccgggcgggtacggtaaattcagcttcacccgggtgcccgaaaaaggcaggctggatgatactgtcaacggaaactgtctttcctacgctgtcagagacaacgtcccggtttatcttgaagacctcggcagcagttatcccgaagtaaaccgcgttttatctgaatcgggcgaagacggggttgccgagtatatcggcggattgtttgaaaaatatgtcgaagaacacaaggcggggcttcgcgtgtcaaaattacgcagaatagacgatttcaactcttccataaaccccgcgaaggaataccgtatcgtgatgcgcctgggctgttacgcgagagaagatgatccgttaagcgaaagcgcgcgcaattttgactttcatttttggtcgcagcttgacgacggcagatggtcgcaaaaatacgggtggagttactcggaaataattcctgccacatgtcccggcgtttccccgggaaaatactattgggaaatggccaagtacggttatttatacagaagcaaattaatttactactcagtaacaaaagatatcggtgaaattacagttcacaggccaagtccgttcgccgatgtggagctttatgactatgtgaatagcggtgtggaatacgtttacaaaaacggttttatgaccggcatgagtgacgcgcccatgctgtttagtccggatacggcaatgacgcgcggcatggcggcagatgcgttttaccgcattgcgggcagaccggacgcgggcaagttttccaacccgtttaacgacgtggacgcgggttatctgtatctcgacgcggtaagatgggcggcggcaaacggtatcatagccgattacagcggcagcggcaaatttgcgcctgaccgcaaaattacgcgcgaggaagcggcagccgcgttttataattatcaacatttgtcgggaaatattcccccggacattctcctgaatatagatcccgaagacgcggacgagataagcaaatgggcgaaggaagcggcgaaaaagcttatgcggcaaatgatattccgaggtccgggcggcttgtttgttccgaaaggcgaaataacccgtattgaatttgcgaggttgttacgcgattactgcgaatattccaagtaa

SEQ ID NO: 31910 - protein, 453 aa, Unknown
  Obtained from environmental sample
  DOMAIN (334)...(377): S-layer homology domain
  misc_feature (1)..(453): Xaa is any amino acid
MNNNVLTAAALKPKVDGWVSVSVTEIVKAWVRADIQNFGFALFPLAGETQSVFADMYNNDENAPYLKVSGRVGRRPGGYGKFSFTRVPEKGRLDDTVNGNCLSYAVRDNVPVYLEDLGSSYPEVNRVLSESGEDGVAEYIGGLFEKYVEEHKAGLRVSKLRRIDDFNSSINPAKEYRIVMRLGCYAREDDPLSESARNFDFHFWSQLDDGRWSQKYGWSYSEIIPATCPGVSPGKYYWEMAKYGYLYRSKLIYYSVTKDIGEITVHRPSPFADVELYDYVNSGVEYVYKNGFMTGMSDAPMLFSPDTAMTRGMAADAFYRIAGRPDAGKFSNPFNDVDAGYLYLDAVRWAAANGIIADYSGSGKFAPDRKITREEAAAAFYNYQHLSGNIPPDILLNIDPEDADEISKWAKEAAKKLMRQMIFRGPGGLFVPKGEITRIEFARLLRDYCEYSK

SEQ ID NO: 31911 - DNA, 909 bp, Unknown
  Obtained from environmental sample
  misc_feature (1)..(909): n is a, c, g, or t
ttgccgatacttatacgcgatcttggctataatgcgacagcagtgggaatacttcttgccatttccgagggagccggtattgttggaccttttctatttatccgccatgctgacaggcgcggcaaatataaggcttgtattacccttgcgtattttataaccgcagcttcggccatacccctcgcgatttttatcagcccggtggcaagcgccgcttttgttgccctgctcgccataggctatcgatccgcaatgccgcttaccgacgcaatcattacaataaagctgggagaaagcggcaattacggaaaagttcgcgtttttggttccatttcctttgcctgcatagtgcttttttttcagtttgtgccagtactacagccaaatacagccatgaatatagcccgctggataagcatgacatccttgcttgccataattgtaacggtttttctgccattgggttattcaagccaaaaacctcaatctgaaaattctacggaaagatcgaatggaaaatcaatctggacgcccctcttcgtgataggattaatcagcattgcgttcaaccgcctggcaatgacgccggtatactcctttttctctttgtacctggttgagtatatgcgctgggacgtggttgggcttatgtgggcgctggcaaccactgcggaaatgcctttcttatacctttctaaccgtgttatccgccgctttggtgcaatgcccgtgcttgctttttcaagcggaattgtgggcttgcgcctggcattatatgcgattttcccgttcaaagcaggaattacaatcgcgcagctgctccattcatgctgcttcgggctttttcatcccgcggcagtggcctttattcagacagcgtgcctcccacacagcgctctctgggcatga

SEQ ID NO: 31912 - protein, 302 aa, Unknown
  Obtained from environmental sample
  misc_feature (1)..(302): Xaa is any amino acid
MPILIRDLGYNATAVGILLAISEGAGIVGPFLFIRHADRRGKYKACITLAYFITAASAIPLAIFISPVASAAFVALLAIGYRSAMPLTDAIITIKLGESGNYGKVRVFGSISFACIVLFFQFVPVLQPNTAMNIARWISMTSLLAIIVTVFLPLGYSSQKPQSENSTERSNGKSIWTPLFVIGLISIAFNRLAMTPVYSFFSLYLVEYMRWDVVGLMWALATTAEMPFLYLSNRVIRRFGAMPVLAFSSGIVGLRLALYAIFPFKAGITIAQLLHSCCFGLFHPAAVAFIQTACLPHSALWA

SEQ ID NO: 31913 - DNA, 1113 bp, Unknown
  Obtained from environmental sample
  misc_feature (1)..(1113): n is a, c, g, or t
atgaacgaagccgaccttgctgattcgcttggaaccattgcccgctccgggacaaaggcgtttcttgaaaaaatgtccgccgacgcaaagaaggattcaaaccttattggtcaattcggggtaggtttttattcggcctttatggtggcagataaaatcgaggttataagccgcaaggcagcggaagaggccgcctggaaatggacaagcgacgggaaggatggctacgacatagagccctacggccgcgacagccagggtacaaccgtgatcctccacctgaccgaggaggggcttgaattcgccaatcgctggtccatcgaagacatcataaagcgttattccaaccacgtggcttttcccatataccttacctacgacgaaaaggaatacgacgacaaagggaaggagaagggtagcaaaaccaaatgcgacaggatcaactcgggcactgccctttggcggcgtgctaaatctgaacttaaagatgaggattacaaggagttttacaagaaccttggtcacgattccgacgacccgcttttttacgttcacacaaaggccgaggggacacttgagtattccacccttttttacgtgccaaaaaaggccccgtttgatttgtaccacgtggattaccaccccggtgtaaagctctacgtaaagcgggtgtttatcaccgacgacgacnaagagctaatgcctacctggcttcgttttatacgcggggtcatcgattcagaagacctcccgcttaacgttagccgcgagattcttcagcaaaacaaaatactgctcaacataaaaagcgcttcggttaagaaactactttcggaatttaagtctgtggcggacaaagtttccgcgggggatgaagaagcaaagacaaactgggaaacttttgtcagccagttcaacaggcctttgaaggaagggctgtgccaggattatgttagccgcgaggctattccggatctggtcaggttcaaaagctcctccgttgaaggctggaccagctttgccgattatgtctcccggatgaaaagagatcagaagaacatctgttacatgaccggcggtggcgaaaaaaccctcaaagcctctccgctttag

SEQ ID NO: 31914 - protein, 370 aa, Unknown
  Obtained from environmental sample
  DOMAIN (100)...(370): Hsp90 protein
  misc_feature (1)..(370): Xaa is any amino acid
MNEADLADSLGTIARSGTKAFLEKMSADAKKDSNLIGQFGVGFYSAFMVADKIEVISRKAAEEAAWKWTSDGKDGYDIEPYGRDSQGTTVILHLTEEGLEFANRWSIEDIIKRYSNHVAFPIYLTYDEKEYDDKGKEKGSKTKCDRINSGTALWRRAKSELKDEDYKEFYKNLGHDSDDPLFYVHTKAEGTLEYSTLFYVPKKAPFDLYHVDYHPGVKLYVKRVFITDDDXELMPTWLRFIRGVIDSEDLPLNVSREILQQNKILLNIKSASVKKLLSEFKSVADKVSAGDEEAKTNWETFVSQFNRPLKEGLCQDYVSREAIPDLVRFKSSSVEGWTSFADYVSRMKRDQKNICYMTGGGEKTLKASPL

SEQ ID NO: 31915 - DNA, 1587 bp, Unknown
  Obtained from environmental sample
  misc_feature (1)..(1587): n is a, c, g, or t
gtgtccagcatgctaaatgatattataacccttgttatttcccgtcttggggaaaaacccgtgacattccgcctggatattcccgatgatctgccgaacaaactgtacggcgacgatctgcgggtaaagcaaatacttaccaatctgctcaccaatgccgtcaaatacacccgcaagggaagcatcgaactcagcgtgcgctgtacgcgggaagcgggttcggtatggatggacgccgccgttaccgacaccggcatgggcatacccaaagacgagatcggcaatctgttccttgagtattacaaagtcgccgttaatgccacccgcaacattgaaggcacgggattgggcctgcccattaccaaaagactggtagaaatgatggacgggggaatcagcgtggaaagcgagcacggcaaaggctcgacgttccgtttccgcataaagcagggctttgtcaacgatgtgccactcggagcgaaggtttcggaaaaactccgtaccttctgttactccagcgacaaacgcattgtctccaaaaaactggtaagggtcaatttaagctacgccagggtgctggttgtagacgatatgcagaccaatctggacgtggcgtccggcatcatgcgcaaataccaaatgcaggttgacgttttaaacaacggtccggccgcgattgaccgtatacgcgaagggaagccggtttacaacgcgatattcatggaccacatgatgcccggaatggacggcatacaaacagcggacaagattcgcgcgataggcacggaatacgcanaaaatgtcacgataatcgccctgacagccaacgccatacaggggaccgacaaactgttctatgatcatgattttcaggcgttcataaccaagcccatcgacttaatggagatggatactgccttaaggaaatgggtgcgcgatgccgcccgcgacgaagttgtaatcgacgacaaacttaccgagatcgaacttctgattgaaaagctggttatagaaattccaggagtggacacgaaaaaaggtctttccctgtacgccggagcgaagaagatttatttgccgatgcttcgctcttacgcccacaacacgccgaaggttttggaaaaactgcgctccgtctcggcggagaatttgcacgactacgttatcaccgtacacgggctgaaaggcacaagcgccgccatcggcgctgagcaaattcgcaccgccgctttggaacttgaaaacctttcaaggggcggcgacttgcagggcgttctcgcgaaaaacgacaaactcattgccgacacggaaattgttgtcgcaaacgtacaacaatggttggataaaaatgacattcacgagaaaaagcctcgcctgaaagcccccgacaaggagctttttgtcaagcttcgtgaaagctgtgaaagttacgacatggacgctgtggaagatgtcatgaaagaactggaaaagaacgagtatgatgaagagggcgaactggttacatggattagggaaaagattgatatgtccaaattgggcgatgtagcgaagaaactcgcggatgtattgaacggaaataaataa

SEQ ID NO: 31916 - protein, 528 aa, Unknown
  Obtained from environmental sample
  DOMAIN (360)...(435): Hpt domain
  misc_feature (1)..(528): Xaa is any amino acid
MSSMLNDIITLVISRLGEKPVTFRLDIPDDLPNKLYGDDLRVKQILTNLLTNAVKYTRKGSIELSVRCTREAGSVWMDAAVTDTGMGIPKDEIGNLFLEYYKVAVNATRNIEGTGLGLPITKRLVEMMDGGISVESEHGKGSTFRFRIKQGFVNDVPLGAKVSEKLRTFCYSSDKRIVSKKLVRVNLSYARVLVVDDMQTNLDVASGIMRKYQMQVDVLNNGPAAIDRIREGKPVYNAIFMDHMMPGMDGIQTADKIRAIGTEYAXNVTIIALTANAIQGTDKLFYDHDFQAFITKPIDLMEMDTALRKWVRDAARDEVVIDDKLTEIELLIEKLVIEIPGVDTKKGLSLYAGAKKIYLPMLRSYAHNTPKVLEKLRSVSAENLHDYVITVHGLKGTSAAIGAEQIRTAALELENLSRGGDLQGVLAKNDKLIADTEIVVANVQQWLDKNDIHEKKPRLKAPDKELFVKLRESCESYDMDAVEDVMKELEKNEYDEEGELVTWIREKIDMSKLGDVAKKLADVLNGNK

SEQ ID NO: 31917 - DNA, 699 bp, Unknown
  Obtained from environmental sample
  misc_feature (1)..(699): n is a, c, g, or t
atggttgacgcgcattgccatccttttgatctcgcggattgtttagacgatgccgaagaagaacggcggcgactcggggtgatctgcgccacaagcgcgacaacccttgaagaatttgaatactgcgagcggctttccagtcaggcaaaacaggataaggccgcgccgttactgccgtgttttgccgtacacccgcaaatggcatcaataattaaaactacccccaatgttacgcgatattcattgcaggacaacctgtctgttctggatacgcttgccgcgcaggggcgcctttacgcggtgggggaaaccggctttgatttatacaatgacgatttcagggaaactgaaaagacccaggatgagctgttttcgatccatcttgaaattgccctgcaatacgatctgccgctggtgatacattcgcgccgggcaatgcacaaaatatttgccaacgccgcggcgttaaaaaaatgcagggcggttgtgtttcattcatggtcaggcacacagggggagggcgaggcgctgttaaggcggggcattaacgcctttttttcatttggcgcggcgataatgcttaaccacagggaagcgcaacgctgctgcgcggcttttcggcggaacgcctgctcaccgagacggacgccccattccagcctccncgcggcagggaattctcccgttatgcggatataa

SEQ ID NO: 31918 - protein, 232 aa, Unknown
  Obtained from environmental sample
  DOMAIN (1)...(226): TatD related DNase
  misc_feature (1)..(232): Xaa is any amino acid
MVDAHCHPFDLADCLDDAEEERRRLGVICATSATTLEEFEYCERLSSQAKQDKAAPLLPCFAVHPQMASIIKTTPNVTRYSLQDNLSVLDTLAAQGRLYAVGETGFDLYNDDFRETEKTQDELFSIHLEIALQYDLPLVIHSRRAMHKIFANAAALKKCRAVVFHSWSGTQGEGEALLRRGINAFFSFGAAIMLNHREAQRCCAAFRRNACSPRRTPHSSLXAAGNSPVMRI

SEQ ID NO: 31919 - DNA, 585 bp, Unknown
  Obtained from environmental sample
  misc_feature (1)..(585): n is a, c, g, or t
gtgtcggaacatcccattgtaataatgatctccgccgccgaatggagcgcaattgccgataaagcgaaatcggcgggcgttgacaaattcctttccaaacccctgttcccctcttccattgcggaagtgatcaatgaatgtctgggcgtgagcaaaaagcaggcggaaaaatcgaagtctgtggatattgccggcattttttcggggcggcgcatcctgctggttgaagacgtagaaattaaccgcgaaattgtactggccctgcttgaaccgacaaagctggagatagactgcgccgagaacggggcgcaggcggtccgcatgttcggcgaggctccgcgcaagtacgaaatgattttcatggatatacaaatgcctgaaatggacggttatgaggcgacgcggcaaatcagatcgctggatgcacaggaggcaaaaaacataccgattgtggcaatgacggcaaacgtgttcaaagaggatattgaaagatgcctcgacgccggcatgaacagccatgtgggcaaaccggttgattttgatgaagtcctgaaccgtcttcgcgcgtatttgcctgttaattga

SEQ ID NO: 31920 - protein, 194 aa, Unknown
  Obtained from environmental sample
  DOMAIN (70)...(188): Response regulator receiver domain
  misc_feature (1)..(194): Xaa is any amino acid
MSEHPIVIMISAAEWSAIADKAKSAGVDKFLSKPLFPSSIAEVINECLGVSKKQAEKSKSVDIAGIFSGRRILLVEDVEINREIVLALLEPTKLEIDCAENGAQAVRMFGEAPRKYEMIFMDIQMPEMDGYEATRQIRSLDAQEAKNIPIVAMTANVFKEDIERCLDAGMNSHVGKPVDFDEVLNRLRAYLPVN

SEQ ID NO: 31921 - DNA, 1017 bp, Unknown
  Obtained from environmental sample
  misc_feature (1)..(1017): n is a, c, g, or t
gtgaagccggaagtagtagtgataccgaataaaccgccgacggcgaatgcgggaagcaatcagaccgttaagcttgaggaaaatttaaccgttaccctcaacggcagcggtgcggacgaggacggtactgtcgaaggttattcctgggctttgtctgccgacacaaatccgggtctggccgacggttatagtatccagaacggcaaaactgccactccgacgatcagctttacgaaagccggagaatatattttcgaactcactgtcacggataacgagggtgcggtaagcgcgccggacaaagtgaaagtgacggtaactccggctgacgcaccgacagtgagcgtcacaaatccgcagtcgccggctcagttgcaggaaggcggcgtggaagttagtttgactgctacggtaactccgggcggttttcctgtcgattccaaggcgtggactctgaaaacattcaacggctccgctccggcttctcagccgacattcgtcgtcgacggcaacaatgccaaagtgacgctgaaaaaagcgggcgcgtatgtgtttgaattcacggcgacggacactaaccatgcgagcgaagccaagactgtgtcggtggtggtggagccgtatacggcaacgaaggatgtgacggcgagttttgcggcgtttgttatcggtccgactttaaattttgcgcctcaagcatacactcccgctatcgctggtggtgggtttacgaacgacgatgttacatacattgttgaggacgacaaagggaataagtgggacagtacaaccgggtatgaagtaagtcatacgctttattctaaaccttctgatgttgttttcactcaaacctataaaattggcaacactgtgcttgccagtcaggttgtgaaagcaactgctgcgcctagtggtggtggaaggttttcgataatgtacgattctaataataatcagatatcaaaaatcccttctatgaatttgcatcttgtaaaggaaataacggaagtggagtaa

SEQ ID NO: 31922 - protein, 338 aa, Unknown
  Obtained from environmental sample
  DOMAIN (20)...(106): PKD domain
  misc_feature (1)..(338): Xaa is any amino acid
MKPEVVVIPNKPPTANAGSNQTVKLEENLTVTLNGSGADEDGTVEGYSWALSADTNPGLADGYSIQNGKTATPTISFTKAGEYIFELTVTDNEGAVSAPDKVKVTVTPADAPTVSVTNPQSPAQLQEGGVEVSLTATVTPGGFPVDSKAWTLKTFNGSAPASQPTFVVDGNNAKVTLKKAGAYVFEFTATDTNHASEAKTVSVVVEPYTATKDVTASFAAFVIGPTLNFAPQAYTPAIAGGGFTNDDVTYIVEDDKGNKWDSTTGYEVSHTLYSKPSDVVFTQTYKIGNTVLASQVVKATAAPSGGGRFSIMYDSNNNQISKIPSMNLHLVKEITEVE

SEQ ID NO: 31923 - DNA, 1062 bp, Unknown
  Obtained from environmental sample
  misc_feature (1)..(1062): n is a, c, g, or t
ttgcgccgctgcttacatcgacagcctaagaggcgaaacctattgaaaacaaggtttttgggatttttgtttttgctttcgcttcctgtattttcactttcgttcgattctattgatgattccggtgacataaatgaactcgcgttgcgccctaacaacgaaatgagcgacgagcaggcactggctcagacctttatgctgggctgggtaggggccgagccatctccccttattctggactggatacgaaaccgtaacattggcggcgttaaaattttcggctggaacaccgaggacacccggaagcttgcggagacagtgggcaacctacagaaaaacgccctggcttccggattaggtatcccccttttcgtagcaacggatcaggagggggggcttgtgcgccatgtaaagggcgataccagcgaaactccggggaacatggctataggcgcgtcgggaaggccgatggacgcttactggtcggggtactacatagggcgggaactttccctcctgggtatcaacatgaattttgcccccagcgtggatctttatacaaaccgggattcaactttaatcggaccgagatctttcggctccgatcctgtgcaggcgggcatactgggagctgcctttgcgaaaggccacaaggaaacgggggtaattgccacggcaaaacactaccccggccacggagacactgacctggattcccacggggtactgccaaaaatctacgcttcgtttgatttgctttgggacagggagctcctcccttacaggcttcttgcaaaggaagatctccccgcgataatgagcgggcatttggcatttcccaacaccgaggccggcgcgactcccgcctccctttcttcctggtttttaaaagatattctgcgggaaaaaattgcctaccagggccttatcatcacagacgatctgatgatgaacggggccaccgaatttgcggggagcctttcacgggccgcaaagcaggcgcttcttgccggcaatgatatcatcatgctttcaaaaaccccaagccgaacgacaacgtag

SEQ ID NO: 31924 - protein, 353 aa, Unknown
  Obtained from environmental sample
  DOMAIN (113)...(344): Glycosyl hydrolase family 3 N terminal domain
  misc_feature (1)..(353): Xaa is any amino acid
MRRCLHRQPKRRNLLKTRFLGFLFLLSLPVFSLSFDSIDDSGDINELALRPNNEMSDEQALAQTFMLGWVGAEPSPLILDWIRNRNIGGVKIFGWNTEDTRKLAETVGNLQKNALASGLGIPLFVATDQEGGLVRHVKGDTSETPGNMAIGASGRPMDAYWSGYYIGRELSLLGINMNFAPSVDLYTNRDSTLIGPRSFGSDPVQAGILGAAFAKGHKETGVIATAKHYPGHGDTDLDSHGVLPKIYASFDLLWDRELLPYRLLAKEDLPAIMSGHLAFPNTEAGATPASLSSWFLKDILREKIAYQGLIITDDLMMNGATEFAGSLSRAAKQALLAGNDIIMLSKTPSRTTT

SEQ ID NO: 31925 - DNA, 807 bp, Unknown
  Obtained from environmental sample
  misc_feature (1)..(807): n is a, c, g, or t
ttgaacgctgttgaagaggtaaagtacccatccaagaccgagggggacatccacatgaagaagccctttgccaccgcgaaggattcatggatcaaagatgtccttgggaccatgtcgatacaggaaggagactccctggctgtcagcaaaatcccggaagacggaaccttccccacggcgactacccaatacgagaaacgctcggtggcggaacaggttcctgtctggaatcccgacgtgtgtatacagtgcggcaactgtactgtcgtatgcccccatgcctgtatgcgctttaaaaaccttaccgacgatcaggtcgccaaagcgccgaaaggcttcaaaaccgcggcgataaaacccaagccggtagacggacagaaggcggcgctggttatagcctgcgaagactgctacagctgcggcgtctgcttcaatatatgtcccatgtccaataaaggccaggaaaaacccgcgctgtcatggaaacattattccgatgatcacgaattccacgcggaacaggtcgcggtctgggactacttcctttcattgcccgaaacacccgccggcgaattgaaaagcgcgaaagcgctcgcctacaaacggcccctgtttgaattctccggcgcctgcggcggctgcggcgagactccttacgttaaacttatgtcacagcttgtaggcgaccgcgcgctcatcggcaacgccacgggttgtacctcgatatacgggggaaacctccccaccaccccctactgcaaacgggcggaacggccgcggaccggtgtggtcaaacagcctctttga

SEQ ID NO: 31926 - protein, 268 aa, Unknown
  Obtained from environmental sample
  DOMAIN (74)...(97): 4Fe-4S binding domain
  misc_feature (1)..(268): Xaa is any amino acid
MNAVEEVKYPSKTEGDIHMKKPFATAKDSWIKDVLGTMSIQEGDSLAVSKIPEDGTFPTATTQYEKRSVAEQVPVWNPDVCIQCGNCTVVCPHACMRFKNLTDDQVAKAPKGFKTAAIKPKPVDGQKAALVIACEDCYSCGVCFNICPMSNKGQEKPALSWKHYSDDHEFHAEQVAVWDYFLSLPETPAGELKSAKALAYKRPLFEFSGACGGCGETPYVKLMSQLVGDRALIGNATGCTSIYGGNLPTTPYCKRAERPRTGVVKQPL

SEQ ID NO: 31927 - DNA, 579 bp, Unknown
  Obtained from environmental sample
  misc_feature (1)..(579): n is a, c, g, or t
gtggagcgcaccgcaaccgggagcggatggctgaaaacggtgtttatgtcgccgttggtcattccgaccgcttgcgcggcgtttttcttccaaagcctgtttatgccgaacggcttgttaagcagcattttgggcgtaaataccgactggctgcaaacggaatattcttttgctatcgcggtgggcttgtatgtgtggaaaaacatgggttataaccttgtactcgcgcttgccgggcttgcgaacataccaaaggattattacgagtgggcggctgttgagggtatggggaaaatgcgtatgtttttcaaaattacgttggtctacctcgttccctcgctgttcattatgttcgttatgtcatttattggttcgttcaaggtttacagggagctatatatgctggcggggaattacccaaacgagaaaatatacatgctccagcattatatgaacaaccaattcgcaaggctgaattatcagaacctgacgacggcggcttttgtaataacagcggtaatctcggtttttatggctgtattcttcatagtagataaaaaatcggaatttggggagtga

SEQ ID NO: 31928 - protein, 192 aa, Unknown
  Obtained from environmental sample
  misc_feature (1)..(192): Xaa is any amino acid
MERTATGSGWLKTVFMSPLVIPTACAAFFFQSLFMPNGLLSSILGVNTDWLQTEYSFAIAVGLYVWKNMGYNLVLALAGLANIPKDYYEWAAVEGMGKMRMFFKITLVYLVPSLFIMFVMSFIGSFKVYRELYMLAGNYPNEKIYMLQHYMNNQFARLNYQNLTTAAFVITAVISVFMAVFFIVDKKSEFGE

SEQ ID NO: 31929 - DNA, 414 bp, Unknown
  Obtained from environmental sample
  misc_feature (1)..(414): n is a, c, g, or t
ttggggagtgatggatggatggtcaaaaagctgagaaatattcccgccgcagcgtttttaatcgttatcgcgtttgtttatatcatccccattatgattatgctgacaaattcctttatgtcgcagggggaagtcgcccgcaattacagcgcgaaatacgatttgtttgagcatggcttaaacgggcagacccactatgcccaatataacctgattccagaaaatatcacgttggaacagtataacaccttgctgttcaagacgcctatgtatctgaacttgttcttgaactcgctgaaactgacgcttccgatagtcttaatgcaagtgattataggttcggcggcggcttatggttttacagtgtggaggtcgcggtttaaggaaattttatctgcgcttacattatcgtga

SEQ ID NO: 31930 - protein, 137 aa, Unknown
  Obtained from environmental sample
  misc_feature (1)..(137): Xaa is any amino acid
MGSDGWMVKKLRNIPAAAFLIVIAFVYIIPIMIMLTNSFMSQGEVARNYSAKYDLFEHGLNGQTHYAQYNLIPENITLEQYNTLLFKTPMYLNLFLNSLKLTLPIVLMQVIIGSAAAYGFTVWRSRFKEILSALTLS

SEQ ID NO: 31931 - DNA, 411 bp, Unknown
  Obtained from environmental sample
  misc_feature (1)..(411): n is a, c, g, or t
atgcggtggtacgcttccgtcgttgccgtcgccatcatcgcgtttccgttcgtctatcggacggtgcgcggggcgttcgagagttttgaccgcaacttgcttgacgcggggcgtacgctggggctgtccgagtggtacatattttttcgtgtgctgcttcccaactgcaagccggtgataatcgccggggcggcgctcgcgtttgcgcgcgggataggggagtacggcgcgacaagcatggtttccgggtacatcgtgggcaagaccgcaaccgtgtccacagccgtggcctattactggcaaataaatcaggacgatatggcgatgtattgggtgataataaaccttgcggtatcgttcgtgtttatgatgacgatcaacgcctttacccaacggcgagcaaaagggtag

SEQ ID NO: 31932 - protein, 136 aa, Unknown
  Obtained from environmental sample
  misc_feature (1)..(136): Xaa is any amino acid
MRWYASVVAVAIIAFPFVYRTVRGAFESFDRNLLDAGRTLGLSEWYIFFRVLLPNCKPVIIAGAALAFARGIGEYGATSMVSGYIVGKTATVSTAVAYYWQINQDDMAMYWVIINLAVSFVFMMTINAFTQRRAKG

SEQ ID NO: 31933 - DNA, 1050 bp, Unknown
  Obtained from environmental sample
  misc_feature (1)..(1050): n is a, c, g, or t
atgcttacgtgcgatatcaaaaagaaactaagcgggttttaccttgacgtgaaccttacggcgaaaccgggcgtaacggcgctgatgggggcgtccggcagcggcaagagtatgacgctgcggtgtatcgcgggagtatcgaaacccgacagcgggcgcatagagttgaacggcgttacgctcttcgattccgagaagaaaatcaacctgccgccgcaggcgcggaacactggctttatgtttcaggactccgcgctgttccctaacatgacggtacggcaaaacatcatggccggagcgaaaaagaagccgcgccccgagcgtatggccgccgccgtagcgttggctgaaacttttcatatatcgcggcacttagacaagtatccgcacgaactctccggcggggaaaaacagcgttgcgcgttggcgcggatcatggccggatctcctgatattctgatgctagacgaacccttcgccgcgctcgacagccacctgcgctgggagttggagttggaactcgcggcggcgtttcaacgcttccaaaagcccgtcctctacgtatctcacaaccgcgacgaagtgtacagactgtgcggcgacatcgcgatcatcgaccacggcaaaaacgaagcggcgcacgacaaatgggagctcttcgagaatccagcgaccgttcaggcggcgcgattgacaggttgcaagaacatagtagcggcggaagtcaaaggtacgcggatcttcgtgaacgactggggtattgattttgattgcggcgaaacacgcggcgacgtacgtcacgtgggtatacgcgcaaacaacattgtaccgatgtctacagtagaaacggcttccgacgtcgccgcgtcgttcccgtttgagatagtgaacgagattgaagataccttcacctgtatactgatggtgcgcaagcgcggcacggagttgccgcccatccgttgggaaatgcgcaagaaagaccgcatagccctgcgggatatgccgcangaattggcttttttgcgcaagcgcattttgcttctatcgtaa

SEQ ID NO: 31934 - protein, 349 aa, Unknown
  Obtained from environmental sample
  DOMAIN (23)...(208): ABC transporter
  misc_feature (1)..(349): Xaa is any amino acid
MLTCDIKKKLSGFYLDVNLTAKPGVTALMGASGSGKSMTLRCIAGVSKPDSGRIELNGVTLFDSEKKINLPPQARNTGFMFQDSALFPNMTVRQNIMAGAKKKPRPERMAAAVALAETFHISRHLDKYPHELSGGEKQRCALARIMAGSPDILMLDEPFAALDSHLRWELELELAAAFQRFQKPVLYVSHNRDEVYRLCGDIAIIDHGKNEAAHDKWELFENPATVQAARLTGCKNIVAAEVKGTRIFVNDWGIDFDCGETRGDVRHVGIRANNIVPMSTVETASDVAASFPFEIVNEIEDTFTCILMVRKRGTELPPIRWEMRKKDRIALRDMPXELAFLRKRILLLS

SEQ ID NO: 31935 - DNA, 564 bp, Unknown
  Obtained from environmental sample
  misc_feature (1)..(564): n is a, c, g, or t
atgaatattttaccggcggatcgttatggttatgattttattaccgccgaatatataccgaaggatttaccgaaaagtttaccgggcgttagcatctttggtattaccgcgctaagctataacgaatactggcagcgcaacgcccagcaagcggaattgttttccaaaaagccggattcctggcgcaatcttaaactcgaagaacttgaaatacttaaaaaaaacagaaactactgttcaaactggaacaattttttagtaacagatccttttgatcctacgctgatacgcgactcgtctttttacggtcttgtgcgtatcggcgttctcacaaatgttctcttaaaacacaacgatttttgcgtccccgcgggaatccgaaacagcgtaataatttcgtgcgacataggcgacgatacagccattcagtactgcgcgtatatttctcattatatcatcggggacaactgcatactatccaaaattgatgaaatgcagacaaccaaccacgcgaaattcgggaacggcattatcaaggacggcgaaagcgctcggccgatctga

SEQ ID NO: 31936 - protein, 187 aa, Unknown
  Obtained from environmental sample
  misc_feature (1)..(187): Xaa is any amino acid
MNILPADRYGYDFITAEYIPKDLPKSLPGVSIFGITALSYNEYWQRNAQQAELFSKKPDSWRNLKLEELEILKKNRNYCSNWNNFLVTDPFDPTLIRDSSFYGLVRIGVLTNVLLKHNDFCVPAGIRNSVIISCDIGDDTAIQYCAYISHYIIGDNCILSKIDEMQTTNHAKFGNGIIKDGESARPI

SEQ ID NO: 31937 - DNA, 354 bp, Unknown
  Obtained from environmental sample
  misc_feature (1)..(354): n is a, c, g, or t
gtgctgggcgagaatgtcaaccttcgcaccctcttgggtatgctggaaatgtttgcccgcgaagttgccggagcgaaagaagtaaaatatgttcccggctatttcccgtntacggagccttcggtggaagtgcatatcaagcaccctgtactcggctggtttgagcttggcggctccggcattttccgcccggaagtgaccgaaagcctcggcgtgaacgtgcctgtcgcggcgtggggaataggaatcgacagaatggcgttaatggctttggggctgaacgacctgcgcgaattattcagccacgacattgaaaatgtacggttaagacgcgccaaaacttcaggagcgtaa

SEQ ID NO: 31938 - protein, 117 aa, Unknown
  Obtained from environmental sample
  DOMAIN (1)...(110): tRNA synthetases class II core domain (F)
  misc_feature (1)..(117): Xaa is any amino acid
MLGENVNLRTLLGMLEMFAREVAGAKEVKYVPGYFPXTEPSVEVHIKHPVLGWFELGGSGIFRPEVTESLGVNVPVAAWGIGIDRMALMALGLNDLRELFSHDIENVRLRRAKTSGA

SEQ ID NO: 31939 - DNA, 582 bp, Unknown
  Obtained from environmental sample
  misc_feature (1)..(582): n is a, c, g, or t
gtggttttggacattggcccccttgcccgcggcgaaggctacaagttcgaaaataaaattttcggcggggcggttccaaagaactacatccccggcgtggaaaagggtattgcggaaggtatggcgcacggcaccatggcccagtacccggttgtcgatgttgaagtagccattgtggacggcaaataccatccggtggattcttccgagctttcctttaagcttgcctccagaaacgcgttccgcgaagccatgcgccaggctaacccgaccctgcttgaacccatcatgagccttaccgtctttgtggaagacaagtacctgggcgacgtgatgagcgacctttcaagcaagcggggcaaaatcctggggcaggattcatcaggcggcatagcagaaattcgcgccgaagtaccgcaggcggaactgctgcgttactccatcgacctgcgctctattacttcgggcacaggctccttcggcgtgtccctcgatcattacgcaccgattgcgggccgcattgccgaagacgttatcaaagcggcggaagccttcaagatccaggaggaagaggacgcctga

SEQ ID NO: 31940 - protein, 193 aa, Unknown
  Obtained from environmental sample
  DOMAIN (1)...(89): Elongation factor G, domain IV
  misc_feature (1)..(193): Xaa is any amino acid
MVLDIGPLARGEGYKFENKIFGGAVPKNYIPGVEKGIAEGMAHGTMAQYPVVDVEVAIVDGKYHPVDSSELSFKLASRNAFREAMRQANPTLLEPIMSLTVFVEDKYLGDVMSDLSSKRGKILGQDSSGGIAEIRAEVPQAELLRYSIDLRSITSGTGSFGVSLDHYAPIAGRIAEDVIKAAEAFKIQEEEDA

SEQ ID NO: 31941 - DNA, 369 bp, Unknown
  Obtained from environmental sample
  misc_feature (1)..(369): n is a, c, g, or t
atgacgcgctttccgccccgaaccgaatggctacctgcacatcggccacgccaaaagcatctgcatcaactttggcctagcccaaaaatatggaggaaagaccaacctgcgcttcgacgacaccaaccccgtcaaggaggacgtggaatacgtggactccatccgcgaggatgtcaggtggctgggcttttcgtgggaaggcgagtttttcgccagcgactacttccagcaattgtacgactacgccgaatatttgatacagcagggcaaggcatttgtctgcgatctcagcgaaaacgagatacgggaataccgcggaaatttctacacgcctggccggcccagcccattcagggaacgccagcctaa

SEQ ID NO: 31942 - protein, 122 aa, Unknown
  Obtained from environmental sample
  misc_feature (1)..(122): Xaa is any amino acid
MTRFPPRTEWLPAHRPRQKHLHQLWPSPKIWRKDQPALRRHQPRQGGRGIRGLHPRGCQVAGLFVGRRVFRQRLLPAIVRLRRIFDTAGQGICLRSQRKRDTGIPRKFLHAWPAQPIQGTPA

SEQ ID NO: 31943 - DNA, 936 bp, Unknown
  Obtained from environmental sample
  misc_feature (1)..(936): n is a, c, g, or t
ttgttcacaagagccggcgcattctccgttgatgcaggcggccttatggtaaatccggcaaacggaatgaaggtgcagggctggatgtcaagagacattgacggcacaagcgtaatggacgtttcaagccccatcagtgatattacaataccggtcggcggtaaagacccggcaaaggcgacgacggcggttcaatttgcctgtaaccttgacaaacgaattcctgaattgccggaaaatcccacaggggcgcagatacgcgattcaacatggtcaacaaccattgatatttttgattcattcggcgacaaacacattttacaggttcaatttacaagagtgccgggaacagccaatagctggaatgcggcggtaactgtcgatccgcagaatgagactcctaccaatacgacaatcgggtttggagcggaagcccccgcagtgggcggccccacaaattttgtcgtcaacttttcaaacaacggcacgttgctttccgccgaagacggagcgggcaatgtttcgggtgggacggggcgtgttcagatgaacgccgcctttgatgtgcagaatgccgcccccaacgcggacggcactcccgtcaggcaggaatttgtccttaacctgggcatggttggcggatttgtcaattcacttactcaatacgccgaatcaagttcttccaaagcggtagagcaagatggcagaactatgggctatcttgataactttaaaatagatcaatcgggagttattaccggtatttattccaatggtaccacaagaaccataggacaggtggcaatggcaagcttccccaaccagggcggtcttgaaaaatcaggggataacacatttagggtttccaataactcggggttagcgaatatcggtccttcgggaatcgctggcaagggcaaactcggccgaatctga

SEQ ID NO: 31944 - protein, 311 aa, Unknown
  Obtained from environmental sample
  DOMAIN (82)...(236): Flagellar basal body protein FlaE
  misc_feature (1)..(311): Xaa is any amino acid
MFTRAGAFSVDAGGLMVNPANGMKVQGWMSRDIDGTSVMDVSSPISDITIPVGGKDPAKATTAVQFACNLDKRIPELPENPTGAQIRDSTWSTTIDIFDSFGDKHILQVQFTRVPGTANSWNAAVTVDPQNETPTNTTIGFGAEAPAVGGPTNFVVNFSNNGTLLSAEDGAGNVSGGTGRVQMNAAFDVQNAAPNADGTPVRQEFVLNLGMVGGFVNSLTQYAESSSSKAVEQDGRTMGYLDNFKIDQSGVITGIYSNGTTRTIGQVAMASFPNQGGLEKSGDNTFRVSNNSGLANIGPSGIAGKGKLGRI

SEQ ID NO: 31945 - DNA, 381 bp, Unknown
  Obtained from environmental sample
  misc_feature (1)..(381): n is a, c, g, or t
atgatgcgatcattgttttccggcgtttccggacttcagaaccaccagaccagaatggacgttattggtaacaacatcgccaatatcaatacaacgggcttcaaacgcaacagggtcggttttcaagacattttgtaccaacagcaacagggcgcggcccgtcctactgaggatctcggcggcgtaaaccccaaagaaatcggtcttggaatgtctattgcggcaattgacacacttcacattcaaggcagtttgcaggcgacaaacaatcctactgaccttgcaattgtagaaaaggttttttcattcttgacgactccggcacgcagttgttcacaagagccggcgcattctccgttgatgcaggcggccttatggtaa

SEQ ID NO: 31946 - protein, 126 aa, Unknown
  Obtained from environmental sample
  DOMAIN (5)...(35): Flagella basal body rod protein
  misc_feature (1)..(126): Xaa is any amino acid
MMRSLFSGVSGLQNHQTRMDVIGNNIANINTTGFKRNRVGFQDILYQQQQGAARPTEDLGGVNPKEIGLGMSIAAIDTLHIQGSLQATNNPTDLAIVEKVFSFLTTPARSCSQEPAHSPLMQAALW

SEQ ID NO: 31947 - DNA, 465 bp, Unknown
  Obtained from environmental sample
  misc_feature (1)..(465): n is a, c, g, or t
atggaactaggaatgaaaccaatgttcagttcggatgaaaaactccagattgacaaattcgttaatgactacaacaaagttttaaatccaacgcgccagccgcaacagaatttgggtaaagatgatttcttaaaaattctcatcacccaactttcgtatcaggaccccacatcaccgatggaagacaaggaattcatcgcccagatggcgcaattttcaacattggaacaaatgaccagtatggcaaaagatttttccaaacttacttccatgctcatggggaacgaagcggcaagctcgttggggaagggcgttgaaataatcgagggagagcgcagtgtatacggcgttgttcaggcggttaccaggggagaaacacctgaggtgttggtaaacggtaatttttatgattggaatcatgtaatcaaagtttttgcggatgaaaaggagagagtagacttatga

SEQ ID NO: 31948 - protein, 154 aa, Unknown
  Obtained from environmental sample
  DOMAIN (16)...(148): Flagellar hook capping protein
  misc_feature (1)..(154): Xaa is any amino acid
MELGMKPMFSSDEKLQIDKFVNDYNKVLNPTRQPQQNLGKDDFLKILITQLSYQDPTSPMEDKEFIAQMAQFSTLEQMTSMAKDFSKLTSMLMGNEAASSLGKGVEIIEGERSVYGVVQAVTRGETPEVLVNGNFYDWNHVIKVFADEKERVDL

SEQ ID NO: 31949 - DNA, 561 bp, Unknown
  Obtained from environmental sample
  misc_feature (1)..(561): n is a, c, g, or t
atgaaaaaacagccgttatttacgataatttttgaaaatgggaacatcatagcggtcaataaagccgccggaatttcggtgggcggagatcgctgggatgaatccaaagaacggctggacaaactggtcgcggaaataattaagcccccggcgaaaatttttaccgtccaccgtatagactgcgatacttccgggctggtggtattcgcgaaaaacgaggaagcccaccgtcgtctttcaaccgcctttgaagggcgggatgtcaccaaacggtacgttgccgttgtccacggccgcccttcctggaaggaaacagcctgcgatctccccctgattcccaacggcaacaaactccaccagactattatagacaaattccagggcaaaaagtcttttacccgctttgtactgcagggcagcgcggggaattacagcgtaattgaagccctgccggaaccggcagaacccaccagatacgcgttcacgccgcggccctggggcatcccgttgtctgcgacacaatgtacggaaaggccaggccggttatgctttcggaaataa

SEQ ID NO: 31950 - protein, 186 aa, Unknown
  Obtained from environmental sample
  DOMAIN (15)...(152): RNA pseudouridylate synthase
  misc_feature (1)..(186): Xaa is any amino acid
MKKQPLFTIIFENGNIIAVNKAAGISVGGDRWDESKERLDKLVAEIIKPPAKIFTVHRIDCDTSGLVVFAKNEEAHRRLSTAFEGRDVTKRYVAVVHGRPSWKETACDLPLIPNGNKLHQTIIDKFQGKKSFTRFVLQGSAGNYSVIEALPEPAEPTRYAFTPRPWGIPLSATQCTERPGRLCFRK

SEQ ID NO: 31951 - DNA, 312 bp, Unknown
  Obtained from environmental sample
  misc_feature (1)..(312): n is a, c, g, or t
ttgatcgcgggcggtttttacgctttcttagatccaccaggatattgcccccctgcaaaccgtgatttggcgctggttcttcattttatcagggaagtaggccctttggcaggcatttccaaagtcacgtttgatgaaaattcccgaatcgcggttatatcagggccgctttcgggccttgaagggaggattgtgaaagttgataaaagaaaaaaaagggcaaagatcaaacttgacctttacggcgattctttttgtgtggacctcgcgttcgaggtattggtaaaatctaaaagcgatgacaacatttaa

SEQ ID NO: 31952 - protein, 103 aa, Unknown
  Obtained from environmental sample
  DOMAIN (44)...(77): KOW motif
  misc_feature (1)..(103): Xaa is any amino acid
MIAGGFYAFLDPPGYCPPANRDLALVLHFIREVGPLAGISKVTFDENSRIAVISGPLSGLEGRIVKVDKRKKRAKIKLDLYGDSFCVDLAFEVLVKSKSDDNI

SEQ ID NO: 31953 - DNA, 639 bp, Unknown
  Obtained from environmental sample
  misc_feature (1)..(639): n is a, c, g, or t
atgacaacatttaaatcaggccgcttatatattttcggggcggggttcgcggggcaaacacttgccaatgaaataaaatccaagggcatcttcggggaagtagtcgcttttctggacgacgacaatgaaaaaatcggccgccgcattgatgatattcccgttttgggccctattcgcgatgtggcccggcttttaaggctgcaaaacggcgacgaagcgataatcgcgatacccggcgccggaagggaatacttaaaagagctttacgttattttaaaaaactcaggctttgaaaggatccggattctgccgggcatttcacagatcattgagggcgaggctcacctgatacagacccgctcaatcgatcctcaagacctgcttggccgcaccccgatagcggtgaacctgcgtgaaagcctgaattacttgaggggcaagcgggtcatggttacgggagccggcggctcaataggaagcgaactatcaaggcagcttctttcagccggagcggcaaggctttaccttttcggccacggcgaaaactccatctaccaaatagacagggaactaagaattctacaagaggaaggggtcggcggaaaagccgttctggtacaaatcattgggggaccttaa

SEQ ID NO: 31954 - protein, 212 aa, Unknown
  Obtained from environmental sample
  SIGNAL (1)...(22)
  misc_feature (1)..(212): Xaa is any amino acid
MTTFKSGRLYIFGAGFAGQTLANEIKSKGIFGEVVAFLDDDNEKIGRRIDDIPVLGPIRDVARLLRLQNGDEAIIAIPGAGREYLKELYVILKNSGFERIRILPGISQIIEGEAHLIQTRSIDPQDLLGRTPIAVNLRESLNYLRGKRVMVTGAGGSIGSELSRQLLSAGAARLYLFGHGENSIYQIDRELRILQEEGVGGKAVLVQIIGGP

SEQ ID NO: 31955 - DNA, 588 bp, Unknown
  Obtained from environmental sample
  misc_feature (1)..(588): n is a, c, g, or t
ttgtttgcctacccgctgtcaaagccttatttgacgggcagaaagataatttttggaatgattattttttcaatgttttttaacggaggtttagtacctaacttcctgcttatttcaactctcaggcttaaaaacactatatgggccatccttatacctttcgcgataagccagtttaacctcataataatgattaactttttgcgcgccctgccggcggaaattgaggaagcggccatgatcgacggcatggggtattttggtatattaacgcgtatagtcgtgccgcttgccaagcccgcgatagccacgattggtctttacaccgctgttttcttctggaacgactggtttaacgcattactatacttaagctcaaaacagtaccctgtaatgatgatattgcgtaatatagttgtcagcgctgccaacgcgggcgacgctacgggttatggagacaggaacgtcgccgaaatgtcgtcaaaagcggcggtcattctggtttcggtattaccgattattgccctgtatccttttatgcaacggttctttgttaagggcctgactgtcggctcgattaaggggtaa

SEQ ID NO: 31956 - protein, 195 aa, Unknown
  Obtained from environmental sample
  misc_feature (1)..(195): Xaa is any amino acid
MFAYPLSKPYLTGRKIIFGMIIFSMFFNGGLVPNFLLISTLRLKNTIWAILIPFAISQFNLIIMINFLRALPAEIEEAAMIDGMGYFGILTRIVVPLAKPAIATIGLYTAVFFWNDWFNALLYLSSKQYPVMMILRNIVVSAANAGDATGYGDRNVAEMSSKAAVILVSVLPIIALYPFMQRFFVKGLTVGSIKG

SEQ ID NO: 31957 - DNA, 678 bp, Unknown
  Obtained from environmental sample
  misc_feature (1)..(678): n is a, c, g, or t
atgatcagatcggccgaggccaggggccgccaggggtattttgtgtatcccctaatcgaaaacggagacgagtccgatcttaaagacgcggtaagcatggcccggcggctgtcccgggaagtttttccggcttttcccctcgcgctgatacattcaaaacttgatgaagaagaaaagcggcggaccatggaaaatttccgcaagggggaaataataatcctcgccgcaaccagcgtggtggaagtaggggttgatgtccccaacgccacctgtatggttatagaacacgccgaacgcttcggcctttccgcgctgcaccagctccggggcagggttgggcgggggccggaccagtcctactgtttccttgtgtattcggatgaactgggtgatgacggaaaggcaaggctgaaggtaatgctggaaaattcggacggatttgtaattgccgaggaagatttaatactgcgggggcccggccagatcgccggcatcgagcagtccgggtatctttccctcggccttgccgatcccgtccgtgatgcgaaagaactcatccgttgccgcgccgatgcctttggcattctggaaaccgatcccggcctcttgttgccggatcaccggatcatcgcccgtgtgctggatgaagcgccgccgtttggtgaagtggcgctgtag

SEQ ID NO: 31958 - protein, 225 aa, Unknown
  Obtained from environmental sample
  DOMAIN (39)...(116): Helicase conserved C-terminal domain
  misc_feature (1)..(225): Xaa is any amino acid
MIRSAEARGRQGYFVYPLIENGDESDLKDAVSMARRLSREVFPAFPLALIHSKLDEEEKRRTMENFRKGEIIILAATSVVEVGVDVPNATCMVIEHAERFGLSALHQLRGRVGRGPDQSYCFLVYSDELGDDGKARLKVMLENSDGFVIAEEDLILRGPGQIAGIEQSGYLSLGLADPVRDAKELIRCRADAFGILETDPGLLLPDHRIIARVLDEAPPFGEVAL

SEQ ID NO: 31959 - DNA, 1131 bp, Unknown
  Obtained from environmental sample
  misc_feature (1)..(1131): n is a, c, g, or t
atgagccttgtaaaaatcagggatatgagcctgttggctaccgctcccggcggcagacacccgatagagacttttgtggaagaatacgacgaccgtttgatagcgcaggctgtccgcagagaggttgaaaggggagggcaggtcttttttctgcacaaccgcattgaatcgctaaaagagattcgcattaagctggaacgtttaatgcctgagatactgattgaaaccgcccacggacagatggactcgcaggaacttgaagatgtaatgcgccgttttattcacggcggtttccatgttctagtatcgactacgattatcgagaatgggattgatattccaaatgtaaacacaataatcatagaccgcgccgatatgtacggcgtatcgcagttataccagcttaggggcagggtagggaggtcagatcgcgtagcgtacgcgtatcttttctatcccgaacaaaaagctctttccgaaatagcgatgaaacgtttacagacaatttccgattttacggaacttggttcaggctttaagatagccatgaaggatatggaaataaggggagcgggaaatcttttgggcagggaacagtccggaatcatttactccgtaggttttgatctttatgtaaaactattggaagaagctgtcaggcggcttgaggattcaaattatgaagaagaaaccgaatcctttttggaactggagtattccggatttattcccgactcatacattgatacgcctcaggaaaaaatggaaatctacaaaatgatagccgccatcaacgacaaagacgggcttgagagagtttactcggaacttttagacaggttcggtccgctgccggacgaagcggcttcgcttttggctctcgccgagatcaggataatctgccgccagcttgcaattgcctctcttaaagaaaggggcggtgtagttaaaattgaattcgccaaagtttcccgtataaaagtagaaggacttgtaagacttatacaggaatcctccggcaaagtaaaatttgatcaaaaaaagccgaacgttctgctgcttacaaccggtaacatcggtcttaaagaaaagagcgaattcttaagagaaaaactttccgtattggtttaa

SEQ ID NO: 31960 - protein, 376 aa, Unknown
  Obtained from environmental sample
  DOMAIN (66)...(143): Helicase conserved C-terminal domain
  misc_feature (1)..(376): Xaa is any amino acid
MSLVKIRDMSLLATAPGGRHPIETFVEEYDDRLIAQAVRREVERGGQVFFLHNRIESLKEIRIKLERLMPEILIETAHGQMDSQELEDVMRRFIHGGFHVLVSTTIIENGIDIPNVNTIIIDRADMYGVSQLYQLRGRVGRSDRVAYAYLFYPEQKALSEIAMKRLQTISDFTELGSGFKIAMKDMEIRGAGNLLGREQSGIIYSVGFDLYVKLLEEAVRRLEDSNYEEETESFLELEYSGFIPDSYIDTPQEKMEIYKMIAAINDKDGLERVYSELLDRFGPLPDEAASLLALAEIRIICRQLAIASLKERGGVVKIEFAKVSRIKVEGLVRLIQESSGKVKFDQKKPNVLLLTTGNIGLKEKSEFLREKLSVLV

SEQ ID NO: 31961 - DNA, 492 bp, Unknown
  Obtained from environmental sample
  misc_feature (1)..(492): n is a, c, g, or t
atgaatataaacaataaagatttggtctacagaaaattatgcaataatgacacggacttgtttataaaattacggcttgattttattaatgaatttcataaagatgttgatgaaacagaaaaagataaattaaaaaattcactcagaaattattttgaaagacatattaaaaacaatgattttatcggaataatttgtgaatataacaaggaagttatctccgcagcctatttgataataggcgaatggccggcaaacaggaattttataaacgggaaaatagcgacgttattaaatgtatatacttacccggaatacagaaaaaacgggattggaacaaatataataaaaaaaataattgaggcggcaaaagaacaaaatgtgtcaataatcaatcttttagcgaccgaagatggagaaagcgtatataagaaagcaggtttcacagaaaccgaagataaaagcatgcggttgaaattacagaatatgtaa

SEQ ID NO: 31962 - protein, 163 aa, Unknown
  Obtained from environmental sample
  DOMAIN (64)...(149): Acetyltransferase (GNAT) family
  misc_feature (1)..(163): Xaa is any amino acid
MNINNKDLVYRKLCNNDTDLFIKLRLDFINEFHKDVDETEKDKLKNSLRNYFERHIKNNDFIGIICEYNKEVISAAYLIIGEWPANRNFINGKIATLLNVYTYPEYRKNGIGTNIIKKIIEAAKEQNVSIINLLATEDGESVYKKAGFTETEDKSMRLKLQNM

SEQ ID NO: 31963 - DNA, 834 bp, Unknown
  Obtained from environmental sample
  misc_feature (1)..(834): n is a, c, g, or t
atgatcgcgctggaaaagcgggttcgatccccagttgtggacggattgttttacccggaagacatgacaggcgtactggcttatatgcagagcatcgggctaaagcggggaaagggcggccttgcacgggcgattatcgcgccgcatggagcttgggaaatttccggcagcttggcgggggcggcttttgcttcggcgggaggcagaactggcgggaaaagcccgtccagagtggtgcttataggcccaatccacgataagcgggaaaaaggcattttcctcaccaactcccattcatttcagacccctctgggggacataccggtagatgaggaagcctccggctggctcgaatcatacagccctctatttaaaatagacgacattccccatctacacgaacattccattgaagtattactgccctttgtcaaatactattttccccatgcttccattgttcctatcttaatgggacagccgcagtcgcagtacatatccgttcttgcccatgccttgcgcgcggtttttgaaccggtcatggaaaatactttgttggtaatttcccttaatttgacttcacattccagcgaggcggaggccctgaacatggccgatgaatttgtgcggctttttcgggaaggaaaacacgatgagttatgcgcggcccttcaggatggccgtatcgcaaactgcggcggcgcgctggttgccgctctgctgcaaagcggtttgatggatacagcgcgtccccgtgtcgcgtgcgattcgctgttaagcgccagaaccgaaaaagacaaaaccgtgtattatggcgctttttcatttgactaa

SEQ ID NO: 31964 - protein, 277 aa, Unknown
  Obtained from environmental sample
  DOMAIN (10)...(275): Protein of unknown function DUF52
  misc_feature (1)..(277): Xaa is any amino acid
MIALEKRVRSPVVDGLFYPEDMTGVLAYMQSIGLKRGKGGLARAIIAPHGAWEISGSLAGAAFASAGGRTGGKSPSRVVLIGPIHDKREKGIFLTNSHSFQTPLGDIPVDEEASGWLESYSPLFKIDDIPHLHEHSIEVLLPFVKYYFPHASIVPILMGQPQSQYISVLAHALRAVFEPVMENTLLVISLNLTSHSSEAEALNMADEFVRLFREGKHDELCAALQDGRIANCGGALVAALLQSGLMDTARPRVACDSLLSARTEKDKTVYYGAFSFD

SEQ ID NO: 31965 - DNA, 1095 bp, Unknown
  Obtained from environmental sample
  misc_feature (1)..(1095): n is a, c, g, or t
atggccgagcgcttcatgtgcggaaaccatgggatacatatataccagaacagccagcagaaataccgctgtgacgacacttgccctaaactgtatagtagttcaacttttcgggttgaactgctatgccaagatttgcttgcaaatcatggccgcgtattgctcataggcgggctttgcccgccgtcaagcgagcaatacaagcgcgaattgctacaaatttggagtgccgaagtgaactttgagccaacagaactgcgaagccgcgcaatgggtgcccttggcgcactcacgagggtagttgtgggcaaggaggaccatgtcaggagggccctagccgtgctgttgagcgggggacacctgctgctggaagacctgcccggcgtcggcaagaccacgctggcgcgtgggctctccaaagtgctggggggcagcttccagcgcgtgcagggcaccaacgacctgctgccctccgacctgcttggtgtacatctgtgggacgcgcagactcaggctttccgctttcagcctggacctgttttcgcaaacgtacttctgctggacgagctgaacaggataggaccaaagacacagagtgccctgctggaggtgatggtggagggtcaagtcacgctcgaccgcacaacgcatcccctgcccgacccttttttcgttgtggccacgcagaaccccaacgaccgcgccggcactttcccgctgcccgaaagccagatagaccgcttcgcggccgtgctgcatttgggctacgcgccgccagaggccgagcgcagcatattgaagggcgaagccgggacttcgaccttggacagcctcgcggccacaatgccgccagagggatgggcggccgcaaagaagaacgtgcgcaacatacgcgcctccgacaccctgntgggactaccttgggcgcgtcgcggagcggatcaggggcgtggcgggtntttgctccacaagggcaatcgctcagtggctgtcgctggcaaaggcggaggcctggatggacagccttgggtacgtgactcccgaccacntacagtccacgcttggggacgcgatggcgcacaggggcagaattga

SEQ ID NO: 31966 - protein, 364 aa, Unknown
  Obtained from environmental sample
  DOMAIN (120)...(304): ATPase family associated with various cellular activities (AAA)
  misc_feature (1)..(364): Xaa is any amino acid
MAERFMCGNHGIHIYQNSQQKYRCDDTCPKLYSSSTFRVELLCQDLLANHGRVLLIGGLCPPSSEQYKRELLQIWSAEVNFEPTELRSRAMGALGALTRVVVGKEDHVRRALAVLLSGGHLLLEDLPGVGKTTLARGLSKVLGGSFQRVQGTNDLLPSDLLGVHLWDAQTQAFRFQPGPVFANVLLLDELNRIGPKTQSALLEVMVEGQVTLDRTTHPLPDPFFVVATQNPNDRAGTFPLPESQIDRFAAVLHLGYAPPEAERSILKGEAGTSTLDSLAATMPPEGWAAAKKNVRNIRASDTLXGLPWARRGADQGRGGXLLHKGNRSVAVAGKGGGLDGQPWVRDSRPXTVHAWGRDGAQGQN

SEQ ID NO: 31967 - DNA, 426 bp, Unknown
  Obtained from environmental sample
  misc_feature (1)..(426): n is a, c, g, or t
atgcagcacggccgcgaagcggtctatctggctttcgggcagcgggaaagtgccggcgcggtcgttggggttctgcgtggccacaacgaaaaaagggtcgggcaggggatgcgttgtgcggtcgagcgtgacttgaccctccaccatcacctccagcagggcactctgtgtctttggtcctatcctgttcagctcgtccagcagaagtacgtttgcgaaaacaggtccaggctgaaagcggaaagcctgagtctgcgcgtcccacagatgtacaccaagcaggtcggagggcagcaggtcgttggtgccctgcacgcgctggaagctgccccccagcactttggagagcccacgcgccagcgtggtcttgccgacgccgggcaggtcttccagcagcaggtgtcccccgctcaacagcacggctag

SEQ ID NO: 31968 - protein, 141 aa, Unknown
  Obtained from environmental sample
  misc_feature (1)..(141): Xaa is any amino acid
MQHGREAVYLAFGQRESAGAVVGVLRGHNEKRVGQGMRCAVERDLTLHHHLQQGTLCLWSYPVQLVQQKYVCENRSRLKAESLSLRVPQMYTKQVGGQQVVGALHALEAAPQHFGEPTRQRGLADAGQVFQQQVSPAQQHG

SEQ ID NO: 31969 - DNA, 921 bp, Unknown
  Obtained from environmental sample
  misc_feature (1)..(921): n is a, c, g, or t
gtgccgttatgtgctgcccttcctgcttgtccagcttgcggtattgctgctggtgacctatatccccattctgtcaacctttctgccgggacttttctgatggaaccgtatatcccccaacttgatgtggtctacccttcaaaactggatcagcacatgatagagatgaagtacgtccatgatctcacgcttgatgagaactatccttttttggataaatctttcggctttcgattcatgcgcggattaatttacctgggaatctttaccctggtatttcctttggccgtcctgcgtttcgggctgaaaattgaaggcagagacatccttcgtaaataccgcgcgctcctgaaaaacggagccatgaccgtttcaaatcacatacacaaatgggatctgctttttgtcctcaaggcaatccgttaccgcgcggtatattttccggtatggaaggaaaatctgaaaactcccgacaggggttccgtccgctatacaggcggcatccctatccctgagagtatcagcttaatgaaatgttttaaccgggcatttgatgaagttctcgcaaagaagaaatggattcacgcgtaccctgaaacagcaatgttttatttttttcagcccataaggccgtttaagaaaggcgtttttaccatggcttaccgctataatctgccggttattcccatagctttttcctatcgtaaacctcattttccatttacgctggtgaatcttttccggtcaattatcgggaatcaaaaactccctatggtaactttgcgtatcggcgagcctttgctgttcgaccccggactgaaccgaaaagaagcggtgctaaaaatgcggaaggactgccacgaagccatagtacgcctggccggtatcagcaataacccgtatccccctgatggggactaa

SEQ ID NO: 31970 - protein, 306 aa, Unknown
  Obtained from environmental sample
  SIGNAL (1)...(18)
  DOMAIN (101)...(233): Acyltransferase
  misc_feature (1)..(306): Xaa is any amino acid
MPLCAALPACPACGIAAGDLYPHSVNLSAGTFLMEPYIPQLDVVYPSKLDQHMIEMKYVHDLTLDENYPFLDKSFGFRFMRGLIYLGIFTLVFPLAVLRFGLKIEGRDILRKYRALLKNGAMTVSNHIHKWDLLFVLKAIRYRAVYFPVWKENLKTPDRGSVRYTGGIPIPESISLMKCFNRAFDEVLAKKKWIHAYPETAMFYFFQPIRPFKKGVFTMAYRYNLPVIPIAFSYRKPHFPFTLVNLFRSIIGNQKLPMVTLRIGEPLLFDPGLNRKEAVLKMRKDCHEAIVRLAGISNNPYPPDGD

SEQ ID NO: 31971 - DNA, 507 bp, Unknown
  Obtained from environmental sample
  misc_feature (1)..(507): n is a, c, g, or t
gtgatattaaattttccgaagtcccgagnggttttttacaaagccctgcccattatcggcggcgttctgtgcattatagccgcggcaaaggctctgtcctacgccattgtggatacccaggcgcctgaaaatttcgcccactggatgcggggggcggtcgaatcgaaatacctgttccttctgctcctcaacctggctttactggtggtgggctgccttatggatattttttcggctattctggtaattcttcccctcgttacccccctgggcgaggcctacggcatcgatccggtacatttgggaataatttttatcatgaatctggaagtgggattcctgacgcctcccgtgggacttaacctttttctgtcaagctaccgtttcaaaaagccttttacggaagtgtgccgttatgtgctgcccttcctgcttgtccagcttgcggtattgctgctggtgacctatatccccattctgtcaacctttctgccgggacttttctga

SEQ ID NO: 31972 - protein, 168 aa, Unknown
  Obtained from environmental sample
  misc_feature (1)..(168): Xaa is any amino acid
MILNFPKSRXVFYKALPIIGGVLCIIAAAKALSYAIVDTQAPENFAHWMRGAVESKYLFLLLLNLALLVVGCLMDIFSAILVILPLVTPLGEAYGIDPVHLGIIFIMNLEVGFLTPPVGLNLFLSSYRFKKPFTEVCRYVLPFLLVQLAVLLLVTYIPILSTFLPGLF

SEQ ID NO: 31973 - DNA, 810 bp, Unknown
  Obtained from environmental sample
  misc_feature (1)..(810): n is a, c, g, or t
atgccccagacctgcgctgcgaatatcggggttattttcggcttgacaggaaggataattacatcaaacacagcctgcacatcaggcagccaggccattggtttcgcatacgagaccattaagtatgatctacaagatgtcatgcttgcaggtggcgcggaggaaatgtgtcccgcaaacgctgccgtctttgatacgctttttgccgcaagctccagaaatgacagtcctcataaaacgcccgctgcttatgacataaaccgcgatggtcttgtcgtcggcgaaggggcgggctgtatggttttggaagaatacgaacacgccaaaaagcgtggagcagaaataatcgctgaagttactggcttcggaaccaacaccgacggaacccatatcacccagccgaaccgcgctactatgggtaccgccatgaagctggcgctggaagattcacagctcgaccaatcttcgattggctatgttaacacgcacggaactgccactgaagcgggggacattgccgaaagctgggccaccgccgatgttttccaaaggccaattcccgtaagtaccctgaaaagctacattggccatactctgggcgcgtgcggggctatagaggcatggatagcaattcaaatgatgagggaaaaatggttctgccccaacctaaaccttgacgaaccggatccccgttgcgcgcctttggattacataaccggaagcggccgggaaattgaagctccatttattatgtctaacaattttgcctttggcggaataaatacttcgctgatattcagtttagtataa

SEQ ID NO: 31974 - protein, 269 aa, Unknown
  Obtained from environmental sample
  DOMAIN (116)...(269): Beta-ketoacyl synthase, C-terminal domain
  misc_feature (1)..(269): Xaa is any amino acid
MPQTCAANIGVIFGLTGRIITSNTACTSGSQAIGFAYETIKYDLQDVMLAGGAEEMCPANAAVFDTLFAASSRNDSPHKTPAAYDINRDGLVVGEGAGCMVLEEYEHAKKRGAEIIAEVTGFGTNTDGTHITQPNRATMGTAMKLALEDSQLDQSSIGYVNTHGTATEAGDIAESWATADVFQRPIPVSTLKSYIGHTLGACGAIEAWIAIQMMREKWFCPNLNLDEPDPRCAPLDYITGSGREIEAPFIMSNNFAFGGINTSLIFSLV

SEQ ID NO: 31975 - DNA, 417 bp, Unknown
  Obtained from environmental sample
  misc_feature (1)..(417): n is a, c, g, or t
atgcccaactgcgatgaaaggcttttgcgctcgctgcccagggtacttcgcgcccgggattttcacctctacaccgaggggggaaaaaggctcgtcgatctttggcttgatggagggaaggccgttctgggccacaagccccccagggttttactggaattaaaaaacgctgcagaacgggggctttttactccccttcccccaccattggaaaggcgccttacaaaagcccttgcggtctttttccccgaccactcattccgcttttacaatgatactctctcaatgcttcaagctattaataattatcttccgaacgaagctgcgtttcttaaagcagagaccattcacgatccggcttttcccggcagcaatgacagaaaaggtgactgtcaccctttggcggcctttcgttga

SEQ ID NO: 31976 - protein, 138 aa, Unknown
  Obtained from environmental sample
  misc_feature (1)..(138): Xaa is any amino acid
MPNCDERLLRSLPRVLRARDFHLYTEGGKRLVDLWLDGGKAVLGHKPPRVLLELKNAAERGLFTPLPPPLERRLTKALAVFFPDHSFRFYNDTLSMLQAINNYLPNEAAFLKAETIHDPAFPGSNDRKGDCHPLAAFR

SEQ ID NO: 31977 - DNA, 1125 bp, Unknown
  Obtained from environmental sample
  misc_feature (1)..(1125): n is a, c, g, or t
gtggggccgtttgtgacggactatcttacaggaagaatcgcggtagcccacaacggcaacgtaacaaacgcccttgtaatacgcgaaaacttaaaacgccagggtttgcgcttcggcgcgaccagcgacagcgaggttgtttcatcgtttatagcgtactacatgatgaacgatgaaaatccgctatcaggcctgataaaagccgcggatatgctgaggggcgcgttttcgcttgcgatagtctgcaatgacgataaacttattgccatacgcgacccaaacggtttccgccccctttgcatcgggcaaaacgatcttggattcgccgtagtttccgaaagctgcgcccttgacgcctgcgattttaagtttgtcagggatgtactgcccggcgaggtagttgtaatacaaaacggagaaataaagagcgagggaataaggctcaccaacaaagagaaagacaagggactctgcatttttgaatatgtttattttgcaaggccggattcggtaattgacgggctttctgtttataaaacgcggcacaacatgggactgatacttgcggaagaacatcctgtggaagcagatttggtctgcggagtgcccgattccggcctggacgccgccggcggatacagcgaaaaaagcgggatacctttagccgccggctttgttaaaaacaggtacattggccgcagttttatctatcccacgcagacccagcgggacaacgccgtcaagctcaagctcaatcccctggcggcaggcattcgcgggaaaaagatcgttcttgtggatgactccatcgtacgcggcacaacaagcgaaaagatcgtcaagagccttaaaaactcaggggccaaagaggtacacatgagggtctcttcgccgccgtttcgccacacctgccattacggaaccgacattgacagcgaggaaaaccttatagctaacaagattagtcttgatgacatcagggtaaaaatcggcgcagacagcctgggctatatcagcatagagggcctaaagcgggcttgcggcggatgcgccctggccttttgtacggcttgctttacgggcaacggcgaatccgagcgggcaaagaaagatgtgtttgaatag

SEQ ID NO: 31978 - protein, 374 aa, Unknown
  Obtained from environmental sample
  DOMAIN (1)...(114): Glutamine amidotransferases class-II
  misc_feature (1)..(374): Xaa is any amino acid
MGPFVTDYLTGRIAVAHNGNVTNALVIRENLKRQGLRFGATSDSEVVSSFIAYYMMNDENPLSGLIKAADMLRGAFSLAIVCNDDKLIAIRDPNGFRPLCIGQNDLGFAVVSESCALDACDFKFVRDVLPGEVVVIQNGEIKSEGIRLTNKEKDKGLCIFEYVYFARPDSVIDGLSVYKTRHNMGLILAEEHPVEADLVCGVPDSGLDAAGGYSEKSGIPLAAGFVKNRYIGRSFIYPTQTQRDNAVKLKLNPLAAGIRGKKIVLVDDSIVRGTTSEKIVKSLKNSGAKEVHMRVSSPPFRHTCHYGTDIDSEENLIANKISLDDIRVKIGADSLGYISIEGLKRACGGCALAFCTACFTGNGESERAKKDVFE

SEQ ID NO: 31979 - DNA, 531 bp, Unknown
  Obtained from environmental sample
  misc_feature (1)..(531): n is a, c, g, or t
atgggctttccttataaagatgcgaatggaaccatttttttaaaaagtggttctgacaaaagaaaagttacatccaatgatgaaattgcccgtttattgggaagcaggaatttatctgccgatgagacagagatttacgattcaggcgtgaacgatctggatgttcggcttttttccgaatatttcaaaaaagaattcgaaatgagttttgaagaaaaagggttaactcaggaagaagcgttaattgccaagaaagttatgcgtaataatcatctgacactggcaggacttttgttttttggaaaggagcctcagtcttttcgtccggcttttaccataaaagccgttatgtatgcggggaatgacattggaggcgataattaccgcagtaagccggaagacttaaccggaactattcctgagctttttaagcagggaatgttgtatgtaaaaagctgcataaaatacctgcaagacgggcaggggtttaattcacacggaaaacctgaaatatcacttgtcgccctttag

SEQ ID NO: 31980 - protein, 176 aa, Unknown
  Obtained from environmental sample
  misc_feature (1)..(176): Xaa is any amino acid
MGFPYKDANGTIFLKSGSDKRKVTSNDEIARLLGSRNLSADETEIYDSGVNDLDVRLFSEYFKKEFEMSFEEKGLTQEEALIAKKVMRNNHLTLAGLLFFGKEPQSFRPAFTIKAVMYAGNDIGGDNYRSKPEDLTGTIPELFKQGMLYVKSCIKYLQDGQGFNSHGKPEISLVAL

SEQ ID NO: 31981 - DNA, 1077 bp, Unknown
  Obtained from environmental sample
  misc_feature (1)..(1077): n is a, c, g, or t
atgcttcttactattccctttccttcatggctgaaaccggaagttattcctggcttacccttccgctggtacgggcttatgtacgcttttgcttttgccacggcttttttgctttaccgcaggcaggtaaaggagcggaacttccccatgaccgaagatgagctttcggggcttttcacctggggaatccttgccttaattttgggcgcccgtgttttttccaccctggtttacgaaaccggcggtatctacagccgcgagccctggcttattttctggccgttcagaaacggcaagtttaccggttttcagggcatgagttaccacggcggggtaatcgggggacttatagcgataattgtttactcaaaagtaaagaagttcgattaccgcgaaataggagatatgttttcggccagtattcccctgggctatactttcggcaggctggggaactttatcaacggcgagttatacggacgcattaccgcaagccccctcggaatggttttccctgacggtggtatatatccgtcggacaggaatttcgtcgttatccgcgaaggcgcggaaaaaatgggcctcctccccattaccggaataggcggcgttttgaattatccacggcatccttcccagctttatgaaatgttttttgagggcatagtgctttgggcccttatctggtttttcagaaacagaaagcctttcaagggatttctggttaccctgtacctttccggttacggccttgtccgcttttttatagagtatttcagggagcccgacgccgatcttggctatcgcatcaaattttcagaaacaagcctgcccccagctttgagtcatcccgcttttaatttttcaaccggccaaatcctctgctttgtaatgatccttctggggcttgcctgggcgctcgtcgcctcccgcttaaaggatcgggaacctgtgcgtgtctatagcgccggagggcaaagccaagctgctttgccgaaggcaaagcagcaggcctcgcccgatgaaaaagccgcggaaaggaacaagcggcggaagttgcggaacaagttgcgttaa

SEQ ID NO: 31982 - protein, 358 aa, Unknown
  Obtained from environmental sample
  DOMAIN (11)...(312): Prolipoprotein diacylglyceryl transferase
  misc_feature (1)..(358): Xaa is any amino acid
MLLTIPFPSWLKPEVIPGLPFRWYGLMYAFAFATAFLLYRRQVKERNFPMTEDELSGLFTWGILALILGARVFSTLVYETGGIYSREPWLIFWPFRNGKFTGFQGMSYHGGVIGGLIAIIVYSKVKKFDYREIGDMFSASIPLGYTFGRLGNFINGELYGRITASPLGMVFPDGGIYPSDRNFVVIREGAEKMGLLPITGIGGVLNYPRHPSQLYEMFFEGIVLWALIWFFRNRKPFKGFLVTLYLSGYGLVRFFIEYFREPDADLGYRIKFSETSLPPALSHPAFNFSTGQILCFVMILLGLAWALVASRLKDREPVRVYSAGGQSQAALPKAKQQASPDEKAAERNKRRKLRNKLR

SEQ ID NO: 31983 - DNA, 633 bp, Unknown
  Obtained from environmental sample
  misc_feature (1)..(633): n is a, c, g, or t
gtggtcttcacgccggtatttgaccctgtgggaacaggggctgttgaaaacttggcaaaaccaggcggcaaagtcaccggagtttcgggaatggtcagcgcggacaaaaaggtggattttatcaaggcgctgctgccaaatgctaagaatatcggcgttttatatcaagcgaatgatcctaattcttgcttggaaacagccaacttttccgaggcgggaaaagaatttttcactatcgcccaattgcctgtagagaaaaacgaagatctgtccaatttgccggatatgttggacattaaactggacgcggtatttttgcctatcgggcggattatcgaagaaaatttccctacggttttttattatacggacgaagcgtctttgccggtaatagcttcgcacgcgccaaacgtagcggcgggagctttgggcgcgcttgttgccaatcattattttttgggtgaaaaatgcgccgagcaggcagcggaaattttgcaaaaaaaatcacccgcccagattccggttgggtttcctgaaaatccagaaataattttaaacgcgtttactgccgcaagtttaaacataaaaatagcggaggagctattttcagcggctaaagaaatatttgagtga

SEQ ID NO: 31984 - protein, 210 aa, Unknown
  Obtained from environmental sample
  DOMAIN (2)...(209): ABC transporter substrate binding protein
  misc_feature (1)..(210): Xaa is any amino acid
MVFTPVFDPVGTGAVENLAKPGGKVTGVSGMVSADKKVDFIKALLPNAKNIGVLYQANDPNSCLETANFSEAGKEFFTIAQLPVEKNEDLSNLPDMLDIKLDAVFLPIGRIIEENFPTVFYYTDEASLPVIASHAPNVAAGALGALVANHYFLGEKCAEQAAEILQKKSPAQIPVGFPENPEIILNAFTAASLNIKIAEELFSAAKEIFE

SEQ ID NO: 31985 - DNA, 489 bp, Unknown
  Obtained from environmental sample
  misc_feature (1)..(489): n is a, c, g, or t
atgggagaggcgtttgcaagccgcgccctcattgccgggggctgtgatgttattgcgcatcacacagatacgcccatacccatgatagaagccgaaaaagccggaatatggggaatagggtacagtaatgatatgagcgccgacgcccccgccgcggtcatcacttcggtaatatggcgctggagcgcgtattatacctttcttgtacaaagcgtaatagacggcacgtttaccacagtcccttggtacggctcactgaaagacaaagtaattgaccttgctcccttcaataaaaatatccctttgaacccggatactttccgaataattgacgaagaacggcttcgaattgaatcaggcgcgtttaacgtgttcagcggagtaatggataccaataacggcaaatctatcggcagggaaggcgaaaacctgaccgacgatgaaatccgtaatggaatgaactggtattaccgaacggtgataagatga

SEQ ID NO: 31986 - protein, 162 aa, Unknown
  Obtained from environmental sample
  misc_feature (1)..(162): Xaa is any amino acid
MGEAFASRALIAGGCDVIAHHTDTPIPMIEAEKAGIWGIGYSNDMSADAPAAVITSVIWRWSAYYTFLVQSVIDGTFTTVPWYGSLKDKVIDLAPFNKNIPLNPDTFRIIDEERLRIESGAFNVFSGVMDTNNGKSIGREGENLTDDEIRNGMNWYYRTVIR

SEQ ID NO: 31987 - DNA, 1056 bp, Unknown
  Obtained from environmental sample
  misc_feature (1)..(1056): n is a, c, g, or t
atgaaactatttacactgccgcgtttggtaccgcgtaacaattaccttcagttgttatttgtattcgccgcgtttgcgctcatggcaatcgcgtcatttttctttgtcggccgcatattgaataaccgcctgtcaagcgaggcaaacgagattttattttccgcagaatcgaacgtaagagcaagcctttcggaagccgaaacaacactccttaattcctattacgtcatacaggatatgatagaaaagaacgccaaacgcgatgagatatttgattaccttacccatgacaacgagtggatacgcaaacacgatcaggggcttatgacttttgacggtattttcggatatatcaacggggaattttatgacaccatcggcattaacccaggccccgattatattccgcaaactcggccctggtatcaagcaggtatacgaagcggaaaatccgtggcctatactgcgccctacagaacctcggccgcagaaaataccattgtgtccgccgttcggaacatcgacctaaaaagcggcgacatggccgggatactcgtcgtagacattgacatcgactggctggtggaatacgcgggttctctggcgctgacctcaggcggttatggcatgctcctcagtcaaaacatgaccctcatggcttatcctgacaacgcttttataggccgccagctccaggatttgggcggcgcttactcggagatagcgcgaaccttgcgctcgggaggagaaatttccgccgcaagaataaatgattctgacggcaagcccgtaatcgttttttttaaacatatcttttacaactggtatgtaggaatcgtaacccccttttcccaattttaccgcgattttttacatccgcccggaattcttgccccatgggggttggcccttgcccgggcccctttggcttcaaaattttggggttttatacacccccccaaaacccccccccccccccaaaaaaaaaaaaaacccaaatttttttttcttttttccccgcgtgggcccccccaagaaaaccccccccccccctag

SEQ ID NO: 31988 - protein, 351 aa, Unknown
  Obtained from environmental sample
  SIGNAL (1)...(28)
  DOMAIN (154)...(234): Cache domain
  misc_feature (1)..(351): Xaa is any amino acid
MKLFTLPRLVPRNNYLQLLFVFAAFALMAIASFFFVGRILNNRLSSEANEILFSAESNVRASLSEAETTLLNSYYVIQDMIEKNAKRDEIFDYLTHDNEWIRKHDQGLMTFDGIFGYINGEFYDTIGINPGPDYIPQTRPWYQAGIRSGKSVAYTAPYRTSAAENTIVSAVRNIDLKSGDMAGILVVDIDIDWLVEYAGSLALTSGGYGMLLSQNMTLMAYPDNAFIGRQLQDLGGAYSEIARTLRSGGEISAARINDSDGKPVIVFFKHIFYNWYVGIVTPFSQFYRDFLHPPGILAPWGLALARAPLASKFWGFIHPPKTPPPPQKKKKPKFFFLFSPRGPPQENPPPP

SEQ ID NO: 31989 - DNA, 459 bp, Unknown
  Obtained from environmental sample
  misc_feature (1)..(459): n is a, c, g, or t
atgaaaatgggtgaggtgctgatagacgttaaaaatataaaaaagtatttcccaacaagcgaacggggcaagagcgtcaaggccatagatggcgtaaccttccaagtgataaagggcgagacactgggggttgtgggagagagtggctgcggcaagactactgtggggaggttggtactaaagctcctcaacatgaccgagggccagataaccttcaaggggatagatctctcgtcagtaaaagggaaagagctgcggcggctccgcagagagatgcagatcatctttcaggatccctacgcctctcttgatccaaggaagaccgttatgcagaccttggctgaacctttccatatccactacccgtccatgaacagggaggagatactcgaaaaaatccaaagtctcataaaccatgtaggcctaggcctgagcatatacaaatacccctcgcgataa

SEQ ID NO: 31990 - protein, 152 aa, Unknown
  Obtained from environmental sample
  DOMAIN (39)...(152): ABC transporter
  misc_feature (1)..(152): Xaa is any amino acid
MKMGEVLIDVKNIKKYFPTSERGKSVKAIDGVTFQVIKGETLGVVGESGCGKTTVGRLVLKLLNMTEGQITFKGIDLSSVKGKELRRLRREMQIIFQDPYASLDPRKTVMQTLAEPFHIHYPSMNREEILEKIQSLINHVGLGLSIYKYPSR

SEQ ID NO: 31991 - DNA, 993 bp, Unknown
  Obtained from environmental sample
  misc_feature (1)..(993): n is a, c, g, or t
atgtctgacgaaatgaacgagaaagaagtaatactcagcgtaaaggatctggtggtcaagttcagtctgcggggacgcatactgaaagccatacgcgaggtgtcgctggatctgtacaagggcgaaagccttgcaatcgtgggcgaatccggctcgggcaaatccgtctttgtgaagaccttcaacggaatgctggacgcgaacggatttgtcgatagcggctcaattatctataacggcatggatttggcgaagttcaaaaaagaaaaggactggctgaaaatccgaggcagcgaaatcgccatggtttttcaggatcccatgactgccttaaaccctcttaaaactatcagggagcagattgtcgaggcgatcacccttcacaacaaggagataagcgtcgatcaagcaagggcgcgcgcaatagagtatatccgcgatgtcggcatagaaaatcccgaaaagcggggcggccagtttccgcacgagttttctggcggaatgcgccagcggattgttattgccatagcaatggcgtgtaaccccaaaatactgatttgcgacgagccgaccaccgccctggatgtcacaattcaggcacagatactccaacttctgaacgaactcaaggacaggctcggaatggctatcatcttcgttactcatgacctgggtgtgatatccgaaatagcagacgacgtaatcgtcatgtatgctggtgaggtagtggagcgggcaactacggaccagctgttcggaaagccgttacatccctacactgaaggactcatgggctccataccgaatattgatgtcaaaaccgacaggcttaccacacttgagggactggttcccagtctttacgacatgccctccggttgtcggttcgccccgcgttgtaagtaccgccaggagtcctgcaatcgtaagatagagttgatagtcactcaggaagagcgacaggtccgctgtaagaggtatgaaaatgggtga

SEQ ID NO: 31992 - protein, 330 aa, Unknown
  Obtained from environmental sample
  DOMAIN (243)...(307): Oligopeptide/dipeptide transporter, C-terminal region
  misc_feature (1)..(330): Xaa is any amino acid
MSDEMNEKEVILSVKDLVVKFSLRGRILKAIREVSLDLYKGESLAIVGESGSGKSVFVKTFNGMLDANGFVDSGSIIYNGMDLAKFKKEKDWLKIRGSEIAMVFQDPMTALNPLKTIREQIVEAITLHNKEISVDQARARAIEYIRDVGIENPEKRGGQFPHEFSGGMRQRIVIAIAMACNPKILICDEPTTALDVTIQAQILQLLNELKDRLGMAIIFVTHDLGVISEIADDVIVMYAGEVVERATTDQLFGKPLHPYTEGLMGSIPNIDVKTDRLTTLEGLVPSLYDMPSGCRFAPRCKYRQESCNRKIELIVTQEERQVRCKRYENG

SEQ ID NO: 31993 - DNA, 825 bp, Unknown
  Obtained from environmental sample
  misc_feature (1)..(825): n is a, c, g, or t
ttggaagaccacataaacgctttttttcacggcgcttacggcgagaaaaagatatttgcggttaccaccaaaaatatccgcacccttagaattgtaatctctcgtgaaaacacgcccgccgccattgatgaaaaactgcgcttgaaggcggagaaactgataagcgatatttcgggtcttaaaataaaccgcactctgcccgataccgagttttggtttctctaccgcagtgaggaaaaccggagagaaaattttaccgtctttatgaaacgcctcaccctgcgtccctcatgggaaaaaacgcttcacaagggagaactgccgccgccgcttgcgtggacgttatgccgtcttgcccgtctatcccacggcgaaattgttcttgacccattttgcggttacggctcaatccccgaagcggcgctgaaacatttccatataaccaaatttatcgcctgcgacaacgacaaacgctccgcgcttttttccgcagaaaggttcaaaaaacgcaaaaaagatgagtttataattcaccaagccgatttttccgcgctccccacgctaattgcggaaaaaagcatagacgcaattgttaccgacccgccgtggggtcagtacaaaaaaattaaagacgactctttccatgtaaaaatgtttgaagtttttgccaaattactgaaagacggcggcagagcggttgtgttatacgctaacgatgatgaatttttacgggcggttcccgattgtttcaagccggagaacagtttgccgatactgctttcggggaggaaggcggcggtttatgtgtttgttaagaaagaatag

SEQ ID NO: 31994 - protein, 274 aa, Unknown
  Obtained from environmental sample
  DOMAIN (96)...(266): Putative RNA methylase family UPF0020
  misc_feature (1)..(274): Xaa is any amino acid
MEDHINAFFHGAYGEKKIFAVTTKNIRTLRIVISRENTPAAIDEKLRLKAEKLISDISGLKINRTLPDTEFWFLYRSEENRRENFTVFMKRLTLRPSWEKTLHKGELPPPLAWTLCRLARLSHGEIVLDPFCGYGSIPEAALKHFHITKFIACDNDKRSALFSAERFKKRKKDEFIIHQADFSALPTLIAEKSIDAIVTDPPWGQYKKIKDDSFHVKMFEVFAKLLKDGGRAVVLYANDDEFLRAVPDCFKPENSLPILLSGRKAAVYVFVKKE

SEQ ID NO: 31995 - DNA, 447 bp, Unknown
  Obtained from environmental sample
  misc_feature (1)..(447): n is a, c, g, or t
atgggcggtggcggggtggacggggccatacatcaggccgccgggccgcagctgcttgaggaatgtataaaggtagcaaaggaaaggcgcggcatccccaacggtccctgcccggcaggcgacgcggttattaccggagcgggtcgcctcccctgcaaaaaggtgattcatacggtgggcccggtttggcgcggcggaaacgccggggaagcggaactgcttgcttcctgctaccaaaaaagtctcctgctcgccgaagaagccgggctaaaaagcatagcctttccaaatatcagtaccgatgtctacggttaccccaaggaaaaggcggcgggtgtcgcggtggaagcggcgcgtaaaacattggagcaaacgccgggtattgaaaggattgtctttgtctgttttgatgatgaaaattacaggctctacagtgaaaggctgtga

SEQ ID NO: 31996 - protein, 148 aa, Unknown
  Obtained from environmental sample
  DOMAIN (1)...(114): Appr-1-p processing enzyme family
  misc_feature (1)..(148): Xaa is any amino acid
MGGGGVDGAIHQAAGPQLLEECIKVAKERRGIPNGPCPAGDAVITGAGRLPCKKVIHTVGPVWRGGNAGEAELLASCYQKSLLLAEEAGLKSIAFPNISTDVYGYPKEKAAGVAVEAARKTLEQTPGIERIVFVCFDDENYRLYSERL

SEQ ID NO: 31997 - DNA, 414 bp, Unknown
  Obtained from environmental sample
  misc_feature (1)..(414): n is a, c, g, or t
gtgatctatgtatttgacgcgtcttttgtgggcgctcttattattcctgatgaaaagaacccatctgtggatagaatatacgccaaaattaaaaatgaggatgaaaaacacgctccttttttattgtggtatgagacagccaatctcttcaaaaacctgctccggcgtaaacgctatacctttgacgaactattaaggttatttccttttctgactgctctttgtataatctgtgattttgaagcaggaaccggttatgccgagaaacttttacgtctgtgcggtgattacgacatcagctcctatgacgcggcctatctggaactggcagggcggaaaaaagccgctctctgcacactggatgaaaatttgcagaaagccgcaaaaaaacacggcataacagtattgaaatag

SEQ ID NO: 31998 - protein, 137 aa, Unknown
  Obtained from environmental sample
  DOMAIN (3)...(135): PIN domain
  misc_feature (1)..(137): Xaa is any amino acid
MIYVFDASFVGALIIPDEKNPSVDRIYAKIKNEDEKHAPFLLWYETANLFKNLLRRKRYTFDELLRLFPFLTALCIICDFEAGTGYAEKLLRLCGDYDISSYDAAYLELAGRKKAALCTLDENLQKAAKKHGITVLK

SEQ ID NO: 31999 - DNA, 312 bp, Unknown
  Obtained from environmental sample
  misc_feature (1)..(312): n is a, c, g, or t
ttgcacgaacatggtcgagcgagtgaggaaccgaggggtttaccccttatggaggcgggtatgttaagtcagcaaatcggggcttttgaggccaagacccatttttcgcaaatacttaatgaagtcgagcgcggcgtggattatatcgttacaaagcgggggaaacctgtggcaaaaattatccctatagaacagaaaccggagatgacttttcaagaagcggtggagaagctaaaagaaatgcggaagcatttccgcggcaagcccggttcatttaatatttgtgaagcgattgaggaggggcgtaaatag

SEQ ID NO: 32000 - protein, 103 aa, Unknown
  Obtained from environmental sample
  DOMAIN (23)...(95): Phd_YefM
  misc_feature (1)..(103): Xaa is any amino acid
MHEHGRASEEPRGLPLMEAGMLSQQIGAFEAKTHFSQILNEVERGVDYIVTKRGKPVAKIIPIEQKPEMTFQEAVEKLKEMRKHFRGKPGSFNICEAIEEGRK

SEQ ID NO: 32001 - DNA, 1371 bp, Unknown
  Obtained from environmental sample
  misc_feature (1)..(1371): n is a, c, g, or t
atgattaccacgttaaaaaacgccggctttaacgccatcagaattcccgtgtcatggacaaaggccgccggcggagcgccgaattacaccatacgcgcagactggatggcgagggttgtggaagttgtcaattacgccgttgacaacgatatgtatatcattttgaacacccaccatgacgaggatgtgttcacatttatgaattcaaacgcgacggcgggaaaagcggcgttccaaaaaatatgggaacagattgccgctaccttcaagaattacaacgaaaaattgatctttgagggattgaacgaaccaagaacccccggcagttccagtgaatggagcggcggcactgccgaagaacgtaataacctgaattcctattaccccatttttgttaatacggtaagaaactcaggcggtaataacaataagcgcatattgatgataaacccctatgccgcttccattgaaacagttgcaatggaagcattagagctcccgacagacagcgcggcaaataaacttattgtttctttacattcttatcagccttatgattttgccctgaataaagactccccaaaaaattcgtggaacagcagcagttccgcggatacttcgccaattaccggtcctattgaccgctattatactaaatttgtaagtaagggcattcccgtaataatcggcgaattcggcgctatgaataaaaacaatgaagctgtcagagcgcaatgggctgactattatattagttacgcgcagagtaaaggcattaaatgtttttggtgggataacggcgttacaagcggcagcggtgaattatttggcctgcttaacaggcagaacaattcttttacatatcccactctacttaacggtatgatgagcgggacaagcggcgttattccaacccctccaactccgccggatacgccaacaccgccaaccattaccggaaatttgggcaattaccaatttggtacacaggaagacggtgtttctcctaactacacacaggctgtatgggtactgtcatcagctgacgtagcaacagcaacaacagcgggagcaaaactggtactggtattatcatcagctccaagcgctgtaatgcagtttgtatggcaaggaccgtcaagtgggctctggtggaatgaaaaagatattcttggtaataccggcaatccaagcgcaacgggagttacatggaattcaggcacgaaaacccttacaattcctctgaacgctaactctgttaaggattacgacaaatttaccgcccagccatcattgaggatcatcattgcctattacaacggtggaaatgttaacgatcttggcatagtcagcgcgaaccttctgcagtaa

SEQ ID NO: 32002 - protein, 456 aa, Unknown
  Obtained from environmental sample
  DOMAIN (1)...(274): Cellulase (glycosyl hydrolase family 5)
  misc_feature (1)..(456): Xaa is any amino acid
MITTLKNAGFNAIRIPVSWTKAAGGAPNYTIRADWMARVVEVVNYAVDNDMYIILNTHHDEDVFTFMNSNATAGKAAFQKIWEQIAATFKNYNEKLIFEGLNEPRTPGSSSEWSGGTAEERNNLNSYYPIFVNTVRNSGGNNNKRILMINPYAASIETVAMEALELPTDSAANKLIVSLHSYQPYDFALNKDSPKNSWNSSSSADTSPITGPIDRYYTKFVSKGIPVIIGEFGAMNKNNEAVRAQWADYYISYAQSKGIKCFWWDNGVTSGSGELFGLLNRQNNSFTYPTLLNGMMSGTSGVIPTPPTPPDTPTPPTITGNLGNYQFGTQEDGVSPNYTQAVWVLSSADVATATTAGAKLVLVLSSAPSAVMQFVWQGPSSGLWWNEKDILGNTGNPSATGVTWNSGTKTLTIPLNANSVKDYDKFTAQPSLRIIIAYYNGGNVNDLGIVSANLLQ

SEQ ID NO: 32003 - DNA, 897 bp, Unknown
  Obtained from environmental sample
  misc_feature (1)..(897): n is a, c, g, or t
atggaccaaaaattaaactttattctgtgcgctcagagccaccttccctccggaacctcggaagcggattttgaggccctttacgaaacagaaataaaacctctaatctcagctttggacaaattccccagaatcaatatgctgtttcattattcaggtgtaattttgtactggattgaaaggcatcatcctgaattctttatgcttatagaagatcttctttccagaaagcaggcggaatttcttggaggcggtttttacgatccgccgctgacccttctgccgccgtctgacaaaattggccagatcgatatgcttacgacttacctccggaaacattttggaaaaaaaccccagggctgctggctgccgtcaatggcctgggaacaaaacctggtaggcccgcttacggcttgcggaatgaattatacttttctggaagaccttcaatttttggatgccgagataacgctaaacggcgaaggcgtattttatccctgcataacggaagaccagggcaaacttatcacggtttttccggtattttccgcaatcggcaaaaggctgctgaaagaaaagccgcttgacattctggaagagctgcttgaaaaaattcctcggaacaatgaaagtccggctatggtattcccggtaggaaaaacggaatatgacaacctctttgccgagctttcaaaagcggattcagcaatcaggtttacatgcccgtcccaaatattcaaaagcctgcactcgcttaaaaaaatttatttccccggcgcctgggcatcggcaagttttctgggccacgaaaaccaacccgcggcagatccttgcggatcacccggagacaggcgatatatatgccaaaatgatatatgtgcataccctgatcaataa

SEQ ID NO: 32004 - protein, 298 aa, Unknown
  Obtained from environmental sample
  DOMAIN (6)...(263): Glycosyl hydrolases family 38 N-terminal domain
  misc_feature (1)..(298): Xaa is any amino acid
MDQKLNFILCAQSHLPSGTSEADFEALYETEIKPLISALDKFPRINMLFHYSGVILYWIERHHPEFFMLIEDLLSRKQAEFLGGGFYDPPLTLLPPSDKIGQIDMLTTYLRKHFGKKPQGCWLPSMAWEQNLVGPLTACGMNYTFLEDLQFLDAEITLNGEGVFYPCITEDQGKLITVFPVFSAIGKRLLKEKPLDILEELLEKIPRNNESPAMVFPVGKTEYDNLFAELSKADSAIRFTCPSQIFKSLHSLKKIYFPGAWASASFLGHENQPAADPCGSPGDRRYICQNDICAYPDQ

SEQ ID NO: 32005 - DNA, 696 bp, Unknown
  Obtained from environmental sample
  misc_feature (1)..(696): n is a, c, g, or t
atgacaacctctttgccgagctttcaaaagcggattcagcaatcaggtttacatgcccgtcccaaatattcaaaagcctgcactcgcttaaaaaaatttatttccccggcgcctgggcatcggcaagttttctgggccacgaaaaccaacccgcggcagatccttgcggatcacccggagacaggcgatatatatgccaaaatgatatatgtgcataccctgatcaataaccagcttcgtggggataaaacaaggaaacggactgctctggaagagctttggaaagcacaggattcaggcatatacagtttgaaatcgccggggctttgccatgccccgctccggaacgccgcttaccattctcttttgacagcggaaaaaatcatcagagaaaaggaaaaatttaccccatcgctttcggtttttgattttgacctggacggggcaggggagtacatttttcaggatgacaagctaaattgctttattaaatccagaggggccggaattttcgagcttgattatcttccgtgcgcctggaattaccttgataccatggctcccaaaacggaatcaataaaaagcggaaggcgctgctcttttgttgactggattcccccttccggaacgcttccggaagatttaaaagaggaaggcattaagggagggcgtttttgcgggcctcgaggaatatga

SEQ ID NO: 32006 - protein, 231 aa, Unknown
  Obtained from environmental sample
  misc_feature (1)..(231): Xaa is any amino acid
MTTSLPSFQKRIQQSGLHARPKYSKACTRLKKFISPAPGHRQVFWATKTNPRQILADHPETGDIYAKMIYVHTLINNQLRGDKTRKRTALEELWKAQDSGIYSLKSPGLCHAPLRNAAYHSLLTAEKIIREKEKFTPSLSVFDFDLDGAGEYIFQDDKLNCFIKSRGAGIFELDYLPCAWNYLDTMAPKTESIKSGRRCSFVDWIPPSGTLPEDLKEEGIKGGRFCGPRGI

SEQ ID NO: 32007 - DNA, 900 bp, Unknown
  Obtained from environmental sample
  misc_feature (1)..(900): n is a, c, g, or t
gtgacccccgtggggaaacgcaactacggcccgacctattcctttccgatggcggcctggttcacagttttttttcttgcgcctattttcattattgttatttatagtttcctgaaaaaagggctttacggcggggttgaatggaaattttcccttgaagcctacagaaatctcacgaatcccagcttcctgaccataaccggacgcaccctcattacttcgataatttcaacggtaattacaattttgatcgcccttccctgcggtttcttcatggcgcggagcaaaaaccagaccttgctgctcttaataatcatcatcccgttctggaccaacttccttatccgcgtttttgcctggatgaacatacttggaaataacggctttgtaaatgaatttctcatgcgctttaagctcatatccgagtacgttccctttatgtacaaccagaaggcggttaccctcgtactgatttatatgtatctgccttacgctatacttccgctgttttctacgatcgataaatttgatttctcgcttttggaagccgcaagggatctgggggccggcaagctcacttcaataattctggttcttttgcccaacataaaaagcggcctttttacggcggtgctgttcacttttatcccgatttttggcgcgtatgcggtgccacagctggttggcggaaaagattcgtatatgctgggaaatgtcattgcggatcaaatacttaaatccagaaactggcctttggcctcggcgatttccatggttcttacggttgttaccacggtgggcgtgcttgtgatgatgaacatacagcgcagagaggcgttgcgtgccgtagattcgggagccactgccgaagatcgcgccgccacaggggcaaagctatga

SEQ ID NO: 32008 - protein, 299 aa, Unknown
  Obtained from environmental sample
  DOMAIN (67)...(284): Binding-protein-dependent transport system inner membrane component
  misc_feature (1)..(299): Xaa is any amino acid
MTPVGKRNYGPTYSFPMAAWFTVFFLAPIFIIVIYSFLKKGLYGGVEWKFSLEAYRNLTNPSFLTITGRTLITSIISTVITILIALPCGFFMARSKNQTLLLLIIIIPFWTNFLIRVFAWMNILGNNGFVNEFLMRFKLISEYVPFMYNQKAVTLVLIYMYLPYAILPLFSTIDKFDFSLLEAARDLGAGKLTSIILVLLPNIKSGLFTAVLFTFIPIFGAYAVPQLVGGKDSYMLGNVIADQILKSRNWPLASAISMVLTVVTTVGVLVMMNIQRREALRAVDSGATAEDRAATGAKL

SEQ ID NO: 32009 - DNA, 360 bp, Unknown
  Obtained from environmental sample
  misc_feature (1)..(360): n is a, c, g, or t
ttgcagggaaatcgtactgagcgtcttggcggtctgattcaggaacttatcagtagccttattcttgaaagcagaatcaaagacccgagaattacacagtttgtctcaataaccaaggtaaatctcacgcgcgatctttcatacgccgatgtgtatgtctccaacatccgggaaacggcgaaccttgaacgcaacgcgcaggggctccaacacgccgccggttttatccaggcccagcttggctctgccttaaaaatacggaaaatcccccatctgcgcttccacgcggataccagcatcagggacggttttgacatggtgcagaagattgagcagttggcaaattcagataataaataa

SEQ ID NO: 32010 - protein, 119 aa, Unknown
  Obtained from environmental sample
  DOMAIN (5)...(110): Ribosome-binding factor A
  misc_feature (1)..(119): Xaa is any amino acid
MQGNRTERLGGLIQELISSLILESRIKDPRITQFVSITKVNLTRDLSYADVYVSNIRETANLERNAQGLQHAAGFIQAQLGSALKIRKIPHLRFHADTSIRDGFDMVQKIEQLANSDNK

SEQ ID NO: 32011 - DNA, 462 bp, Unknown
  Obtained from environmental sample
  misc_feature (1)..(462): n is a, c, g, or t
gtgcgaccccttcccaaggcaaaggttctggcagagcaggaaaaagtcgatatacgcaaatacaacatcatctataaggcggttgaggagatccatcaggcaatggagggtatgcttaagcccgataccaaagaggaagttatcgcctcggtggaggtgcgtaataccttcaaggtgccaaaggtcgggaccatcgccggatgtttcgtgcaaagcggcatggtcaagcgcagcgccaacgttaatgttatccgcgagggcattgtgatccactcgggcaaaatcgcctcgctcaggcgcttcaaggacgacgcccgtgaagtggcggccggttacgagtgcggtatagggctggaaggttttgacaatatacagatcggcgatcaatttgaagtaatcgagataatagaggtcgcaaggaagttaagccctaatagggagcagggagcagttagcagttag

SEQ ID NO: 32012 - protein, 153 aa, Unknown
  Obtained from environmental sample
  DOMAIN (63)...(131): Elongation factor Tu domain 2
  misc_feature (1)..(153): Xaa is any amino acid
MRPLPKAKVLAEQEKVDIRKYNIIYKAVEEIHQAMEGMLKPDTKEEVIASVEVRNTFKVPKVGTIAGCFVQSGMVKRSANVNVIREGIVIHSGKIASLRRFKDDAREVAAGYECGIGLEGFDNIQIGDQFEVIEIIEVARKLSPNREQGAVSS

SEQ ID NO: 32013 - DNA, 516 bp, Unknown
  Obtained from environmental sample
  misc_feature (1)..(516): n is a, c, g, or t
ttgatcgccgatctgtatattgtcaaaaccttccagccctataccgcactcgtaaccggccgccacttcacgggcgtcgtccttgaagcgcctgagcgaggcgattttgcccgagtggatcacaatgccctcgcggataacattaacgttggcgctgcgcttgaccatgccgctttgcacgaaacatccggcgatggtcccgacctttggcaccttgaaggtattacgcacctccaccgaggcgataacttcctctttggtatcgggcttaagcataccctccattgcctgatggatctcctcaaccgccttatagatgatgttgtatttgcgtatatcgactttttcctgctctgccagaacctttgccttgggaaggggtcgcacgttaaagccgatgataattgccttggacgcgatcgcgagatctacatcgccttcgttaatcggtccgggcagggcctgtatgacatgcagccggatttccctggtggaaagttttcaagactgctctga

SEQ ID NO: 32014 - protein, 171 aa, Unknown
  Obtained from environmental sample
  misc_feature (1)..(171): Xaa is any amino acid
MIADLYIVKTFQPYTALVTGRHFTGVVLEAPERGDFARVDHNALADNINVGAALDHAALHETSGDGPDLWHLEGITHLHRGDNFLFGIGLKHTLHCLMDLLNRLIDDVVFAYIDFFLLCQNLCLGKGSHVKADDNCLGRDREIYIAFVNRSGQGLYDMQPDFPGGKFSRLL

SEQ ID NO: 32015 - DNA, 444 bp, Unknown
  Obtained from environmental sample
  misc_feature (1)..(444): n is a, c, g, or t
atggaatgggttcttaaatttaattcactattggatcttgcccgtcctattttggacgtgctgatcctcaccattctgctttataaaacatacgaccttctgcagaaaacccaggccgcacagatcctgaaaggcgcaagctttcttgcccttatttatgttttagccgctctgttaaagctttctaccctggagtggctgttaaggtccctggcaccggggcttttaataatgctggctattgtcttccagccggaattacgcaggatcattatccgcctggggcagggggaactcttcaggcccgacagcaagggccggctcgggcagcttgaagccgtcataaccgctgccgagattctttcaagcagaaggcggggaatgttggttgttttttcccgcagggtaaacataaaaaatacaatcgacaccggaaccaggtga

SEQ ID NO: 32016 - protein, 147 aa, Unknown
  Obtained from environmental sample
  misc_feature (1)..(147): Xaa is any amino acid
MEWVLKFNSLLDLARPILDVLILTILLYKTYDLLQKTQAAQILKGASFLALIYVLAALLKLSTLEWLLRSLAPGLLIMLAIVFQPELRRIIIRLGQGELFRPDSKGRLGQLEAVITAAEILSSRRRGMLVVFSRRVNIKNTIDTGTR

SEQ ID NO: 32017 - DNA, 384 bp, Unknown
  Obtained from environmental sample
  misc_feature (1)..(384): n is a, c, g, or t
atgcaggaaaatccatcatattccaaccttaccgaagaaattattgctttttttaaagagtccataaagagggcgcttgaggccgggattccacatgaaaagattatccttgatccgggccttggtttcggaaaaggtcttaatgacaaccttcaaataatccgccttcttgcggaaatctgcgggaaagattatcctattcttgtcgggctttcgcgtaaaagttttatccgcgaaataactggctgtgacatggaagatagtctcgcgggaaccctggctgcaaatgccgtggctattttggcaggagcaaacataatccgggttcacgacgtaaaagaacacgttgacctcgcaagagttttattttccatcaataattaa

SEQ ID NO: 32018 - protein, 127 aa, Unknown
  Obtained from environmental sample
  misc_feature (1)..(127): Xaa is any amino acid
MQENPSYSNLTEEIIAFFKESIKRALEAGIPHEKIILDPGLGFGKGLNDNLQIIRLLAEICGKDYPILVGLSRKSFIREITGCDMEDSLAGTLAANAVAILAGANIIRVHDVKEHVDLARVLFSINN

SEQ ID NO: 32019 - DNA, 642 bp, Unknown
  Obtained from environmental sample
  misc_feature (1)..(642): n is a, c, g, or t
atggcctatatgcatggcgtgtatattcgtgaaagccctaccccgcttcaagttccggttcccgttgattcggcgctgccggtcgcggtaggcgttgctccggttcacaggctggagaatccggcagcggcggtaaataatccgtcgttgatcaatagttacggcgaaggcgttgcggatatgggatattccgatgactggaaaaaattcccattgtccgaggttcttcattcacaattccgtattcacgctatttcaccgttggtattgatcaacgtatggaatccaattccaacggctcagaatgtggcggtagcagatctgccggtcattaacggcattgcgaccattgatgacggcatggccatgatcagcgcggtttccgtacataaagaaaatggtaaagattatgtccggaataaagattattcgctcagatatgacggcgataatctccttatcacgatcatggaaggcggtgatattccggcgaatgcaaatgcgttaaatgttacctacaagcaggcgacagttgccggaatcacaaagaaagatattgccggaggtattgatccggatacaaacaagcgcaccggaatggagcttattaccgaagtgtttcctggcgttcccggaagataa

SEQ ID NO: 32020 - protein, 213 aa, Unknown
  Obtained from environmental sample
  misc_feature (1)..(213): Xaa is any amino acid
MAYMHGVYIRESPTPLQVPVPVDSALPVAVGVAPVHRLENPAAAVNNPSLINSYGEGVADMGYSDDWKKFPLSEVLHSQFRIHAISPLVLINVWNPIPTAQNVAVADLPVINGIATIDDGMAMISAVSVHKENGKDYVRNKDYSLRYDGDNLLITIMEGGDIPANANALNVTYKQATVAGITKKDIAGGIDPDTNKRTGMELITEVFPGVPGR

SEQ ID NO: 32021 - DNA, 381 bp, Unknown
  Obtained from environmental sample
  misc_feature (1)..(381): n is a, c, g, or t
gtgagcgcgaaagacattcttggaacccttgaaagagatgacccagagcttgccacagaaattaaagctcttatgttcgtatttgaagatatgctccttttggacgacaaatccatgcagctagtactaaagcaggtggattccaaagacctttcgcttgcgcttaaaggtgccaatgagcaggtttcaaacaaattcttcacaaatatgtctagccgtgccgcagaaatgattagagaagaaattcaattcatgggtccaaaacgccttcgcgaggtggaagaagcccagcagaaaatcgttgatgtggttcgccgtctggaagcagataatgaaatagtaatcagtggtcgcggtagcgaagatgatattatcgtatga

SEQ ID NO: 32022 - protein, 126 aa, Unknown
  Obtained from environmental sample
  DOMAIN (7)...(116): FliG C-terminal domain
  misc_feature (1)..(126): Xaa is any amino acid
MSAKDILGTLERDDPELATEIKALMFVFEDMLLLDDKSMQLVLKQVDSKDLSLALKGANEQVSNKFFTNMSSRAAEMIREEIQFMGPKRLREVEEAQQKIVDVVRRLEADNEIVISGRGSEDDIIV

SEQ ID NO: 32023 - DNA, 756 bp, Unknown
  Obtained from environmental sample
  misc_feature (1)..(756): n is a, c, g, or t
atgatttttattctcttttttgtttccattgccttcgcacaaattcacgatttgcatcaaggtgatttttattatgcgcttcgctcacaagattcaaaagataatatggtgagcgacaaaaacataaaggaagcaataaattattacagtctggcactcgaagattccagcacaaggcaagaggcggcttggaagttgctcagggcttattattttttgggctgttttgccacgccagaggtaagaaagcgagttcatgtttttgaaaaagctaaaaaagagggcaaaccctttcttgatgcttatccaaaaaataccgaaatagcttattggtattcagttaatttagccttatgggcaaaagatgttaatccagcagttgctttaaaagctggcagcataaaagaaacaagagatatagctaaaatattaatagcaaaggaagcaaccgacaaagaaacagcggctcgtggctatcaaattttaggcaaagcgcatcaaaagctgcctagcatagtttttgtttcaggttggataaaaagagattcagcagaatatcattttaaaaaatcaatggacttaaaccaaaatgatttagcaactcgcctttttttagcagaatattacaaagaaaatttcagagaaaaagagatggaagaattgttaaagccagcactagagaaacgcccaagtcccgagaattatctggaagacgaaagaaatttaattaagatgaagaaattactaactccatag

SEQ ID NO: 32024 - protein, 251 aa, Unknown
  Obtained from environmental sample
  misc_feature (1)..(251): Xaa is any amino acid
MIFILFFVSIAFAQIHDLHQGDFYYALRSQDSKDNMVSDKNIKEAINYYSLALEDSSTRQEAAWKLLRAYYFLGCFATPEVRKRVHVFEKAKKEGKPFLDAYPKNTEIAYWYSVNLALWAKDVNPAVALKAGSIKETRDIAKILIAKEATDKETAARGYQILGKAHQKLPSIVFVSGWIKRDSAEYHFKKSMDLNQNDLATRLFLAEYYKENFREKEMEELLKPALEKRPSPENYLEDERNLIKMKKLLTP

SEQ ID NO: 32025 - DNA, 336 bp, Unknown
  Obtained from environmental sample
  misc_feature (1)..(336): n is a, c, g, or t
atgccagaactcctagaatgtaccgtatcttccgtagttttcacaaacgagagaagcggattttctgttgtacgtataaaaaacggcaaattaacggaaacagcggcgggtaattttttgcctgttcatgcgggagagagggttcgcttaacgggggaatggagcgagcatcctaagtttggaaagcagttttctgtggcaagttgcgaagttttgcagccagagggggagaatggcttgatagcttacctcgcaagcggaattttcacgggcataggcgaaaaaacagcggaaaaactggttggcgtttttggggaaaatttgcccaagatntag

SEQ ID NO: 32026 - protein, 111 aa, Unknown
  Obtained from environmental sample
  misc_feature (1)..(111): Xaa is any amino acid
MPELLECTVSSVVFTNERSGFSVVRIKNGKLTETAAGNFLPVHAGERVRLTGEWSEHPKFGKQFSVASCEVLQPEGENGLIAYLASGIFTGIGEKTAEKLVGVFGENLPKX

SEQ ID NO: 32027 - DNA, 717 bp, Unknown
  Obtained from environmental sample
  misc_feature (1)..(717): n is a, c, g, or t
atgtcgatctggatgggaacgacaatcggcggcatgtgcattgtgcctgtcgactttctggcgacagaagaagaatgccttaacattataaaaataacaagggccaaagcgtttttttattccggcagaaaaaaagattttgccgcttcccttaaatcaaaaggcatttcaatgcatgtttcggtatgcataagccccgaatcagaaaacgccgcttccggtcacgaaaccgaatacaacaggtttggaaaagacgccgcaaatcaggcgctgcccccaattgatagtatttcacctaacgatccggcttcaattgtttttacctcaggaactacgggctttgccaaaggcgttactctttcgcataaaaatataatcgcgaataccagtgcggcaatccgaattcttcagccgacaaaaaaagatgtatttatagacgttttaccgcttcatcacacatatcctacaacctgctcatttatggcgccaatctcctttggtattccgacggtaatttcagaaaaaattgtcggcaaggttgttgtggacgacataaacgacggaagggtaacattcttaatcggcgtaccgcttctttatgacaaagtaatgaacgcgatagaagtaaaatataataaaattccgtttgttgtacgcggaccgttaaatgttctaaggagaatcgcccttgcgaaaggcaggaaagggaaatcctga

SEQ ID NO: 32028 - protein, 238 aa, Unknown
  Obtained from environmental sample
  misc_feature (1)..(238): Xaa is any amino acid
MSIWMGTTIGGMCIVPVDFLATEEECLNIIKITRAKAFFYSGRKKDFAASLKSKGISMHVSVCISPESENAASGHETEYNRFGKDAANQALPPIDSISPNDPASIVFTSGTTGFAKGVTLSHKNIIANTSAAIRILQPTKKDVFIDVLPLHHTYPTTCSFMAPISFGIPTVISEKIVGKVVVDDINDGRVTFLIGVPLLYDKVMNAIEVKYNKIPFVVRGPLNVLRRIALAKGRKGKS

SEQ ID NO: 32029 - DNA, 753 bp, Unknown
  Obtained from environmental sample
  misc_feature (1)..(753): n is a, c, g, or t
ttgcaggaacaaaccgcggctattattgtgcctatacactgcgaagggtttaagacaaaagtcatggcgacagcctacgacgcggtatatcacggcattttaaagaattatgtgcgccctccaaaccgcgaaaagcatatagtggagcgcgattttgaagaaatgcaaaggcagtacaggataagcaaaaatgtaaatatcctgaacgtaggctcaatgagcagggcggacgagttggaactacaaagaatattgacttgcataggattgaacgtccgttttattccctgctacgccgagcctgaggattttccctattccctcgaaacttctctcaatgtaagcatttgcggcactcacgatgattattttgttgagcatataaaggagaaatacaatataccgttcattattgatacaatcccgattggcagaaaaaatacagaccgctgggttttgcgcatagccaaacatttcaatcttgaaaaagaagcgcagaggtttatcgataacgaaaacaaaattcttgacgcaagccttgataaataccggagcatattgaaagggaaaaaagcctttatagcgggcggagaggtgcgtatattcgcgacagcggagataattcaagaccttggaatgaaaataacgggattaaaactgcatcattttgatcaatttgtcgaaccgataattgacgctcttgaagacatagacgatgtggttgtaggcgtggcgactaaccangccttttga

SEQ ID NO: 32030 - protein, 250 aa, Unknown
  Obtained from environmental sample
  misc_feature (1)..(250): Xaa is any amino acid
MQEQTAAIIVPIHCEGFKTKVMATAYDAVYHGILKNYVRPPNREKHIVERDFEEMQRQYRISKNVNILNVGSMSRADELELQRILTCIGLNVRFIPCYAEPEDFPYSLETSLNVSICGTHDDYFVEHIKEKYNIPFIIDTIPIGRKNTDRWVLRIAKHFNLEKEAQRFIDNENKILDASLDKYRSILKGKKAFIAGGEVRIFATAEIIQDLGMKITGLKLHHFDQFVEPIIDALEDIDDVVVGVATNXAF

SEQ ID NO: 32031 - DNA, 567 bp, Unknown
  Obtained from environmental sample
  misc_feature (1)..(567): n is a, c, g, or t
atgtcaaaaaatttgaaaaaaattgacgaatttgacgaacctccgttcaactggcgaacgcttgttccattagccgcgctaggactggtactggccctccacctgttgattcctacccatcatgagtaccggcccagagtgcttccctggttttcacgttttctaatattatgtattgctgttttcgccattctttcgataatagggttttttagcgcccggctgcgcgggcggttggccttcaaatccccatttttgggcgttggtttccttgttttagggctgtacaacctcatcactattaaatggaatctgattcccagcctctacttcccggcaccggaacggatcatcggcgtttttataagcgattggttgtttttactgcaatgccttgtctattcactcaggcttttgctgggcggcttttttctgggggccattttaggggtattcaccggaaccctcatcggctggagccagcgctttaattattggatcatgcccctttatccgcattgtggggcccgattcccgcgacggcctggatacccatcgccctggtga

SEQ ID NO: 32032 - protein, 188 aa, Unknown
  Obtained from environmental sample
  misc_feature (1)..(188): Xaa is any amino acid
MSKNLKKIDEFDEPPFNWRTLVPLAALGLVLALHLLIPTHHEYRPRVLPWFSRFLILCIAVFAILSIIGFFSARLRGRLAFKSPFLGVGFLVLGLYNLITIKWNLIPSLYFPAPERIIGVFISDWLFLLQCLVYSLRLLLGGFFLGAILGVFTGTLIGWSQRFNYWIMPLYPHCGARFPRRPGYPSPW

SEQ ID NO: 32033 - DNA, 444 bp, Unknown
  Obtained from environmental sample
  misc_feature (1)..(444): n is a, c, g, or t
gtggtaagcattttagccgaagaaattgaagcgctccatgccgaaggggctatcgccggtattcattgttgcggcaataccgaatggagcatacttgtcgatgctggcgtggacatcgtaaactttgacgcgtttgaatacggagatacaatcgccatttatgccgacagcgtgaaaaaacatcttgaaaagggtggtgtgcttgcgtggggtgtggtgccgacttccgagaaaatcagggagcagaccgtagagtcccttgaaaaacaacttgaaaaagttatggataaccttgcttccaaaggcattgataaaaaacttataacagagcaggcgatgattactccttcatgcgggacaggctctcttgctacgggggacgcggaaaaagttttctcgcttttgtgcgatttaaccaagcggatgaaagagaaatacgcttaa

SEQ ID NO: 32034 - protein, 147 aa, Unknown
  Obtained from environmental sample
  misc_feature (1)..(147): Xaa is any amino acid
MVSILAEEIEALHAEGAIAGIHCCGNTEWSILVDAGVDIVNFDAFEYGDTIAIYADSVKKHLEKGGVLAWGVVPTSEKIREQTVESLEKQLEKVMDNLASKGIDKKLITEQAMITPSCGTGSLATGDAEKVFSLLCDLTKRMKEKYA

SEQ ID NO: 32035 - DNA, 381 bp, Unknown
  Obtained from environmental sample
  misc_feature (1)..(381): n is a, c, g, or t
atgaaaatagcagtttcaggaaaaggcggagtaggcaagtccactgtcgccgcttccattgctttaatcctggcgcaaaggggtggcagggtgcttgcccttgacgccgatcctgacgctaaccttgccgcgtctttgggtattcctaaaactgttaaaattacccccatctccaaggaaatcgcgctcattgaggagagaacgggagcgaagattgaccagtacgggcaaatttttaaacttaacccgaatgtcagcgacgtggcggaaaagtttgcggtttcacataacggggtggaacttttggttctgggggcgataaaaagaggcggcggaggctgcgcgtgtcctgaaaatgtttttataaaaagcgttggttaa

SEQ ID NO: 32036 - protein, 126 aa, Unknown
  Obtained from environmental sample
  DOMAIN (2)...(124): CobQ/CobB/MinD/ParA nucleotide binding domain
  misc_feature (1)..(126): Xaa is any amino acid
MKIAVSGKGGVGKSTVAASIALILAQRGGRVLALDADPDANLAASLGIPKTVKITPISKEIALIEERTGAKIDQYGQIFKLNPNVSDVAEKFAVSHNGVELLVLGAIKRGGGGCACPENVFIKSVG

SEQ ID NO: 32037 - DNA, 531 bp, Unknown
  Obtained from environmental sample
  misc_feature (1)..(531): n is a, c, g, or t
gtgaccccccatcacttcgcgctgcttgacgccgaaatggcccgattcgacgccgacttcaagatgaacccaccattgaggacccagagcgacatagacgcgattctgggggccattgcggacggcacggtcgacgccatagccacggaccacgcgccgcacgcctacgacgacaaagaggtcgaactcgccagcgcaccattcggcatcatcggtctcgaaaccgcgctgccgcttgcgatagagctactggttaaccggggcgtggtcagcctcgcccgcgccatagagcttttcaccgcaggccccgccaggaccttccaactggacaaaaaaggcctcggaaccctagccatcggcagccccgccgacttcaccctaattgacacatccgccaccatcaccgttgacagggcattcataaagagcaagtcattcaacacaccattcaagggcagggaactgcacggccaggtgctgggcacctgggtggccggcagaagggtgtacgaagccggggtaggcgggtag

SEQ ID NO: 32038 - protein, 176 aa, Unknown
  Obtained from environmental sample
  misc_feature (1)..(176): Xaa is any amino acid
MTPHHFALLDAEMARFDADFKMNPPLRTQSDIDAILGAIADGTVDAIATDHAPHAYDDKEVELASAPFGIIGLETALPLAIELLVNRGVVSLARAIELFTAGPARTFQLDKKGLGTLAIGSPADFTLIDTSATITVDRAFIKSKSFNTPFKGRELHGQVLGTWVAGRRVYEAGVGG

SEQ ID NO: 32039 - DNA, 564 bp, Unknown
  Obtained from environmental sample
  misc_feature (1)..(564): n is a, c, g, or t
ttggaagcccatccgcaacaccattcacctttgcccaacggacacatgccatcccttgcccactttttccttaacgcgcagtccttttgggacgcgttcccgcagatgcgcccggaggcaaggggcgccaacggcaaaaagctgtgcttcacaaacggctgctttgacctcatacacccgggccacgtgcagtatctggaagacgctagggcccttggcgattttctggtgctgggtctaaacagcgaccaaagcgtgatgaggctgaagggggagtcccgccccctacagagcgaaacagccagggccttggtgttgctgggcctcaaaagcattgacgcggtcatccgcttcgacgaagacaccccgcaggagcttatagggcagttgcaacccgatgtgctggcaaaaggcggcgactacgcgcccgacactgtggtgggccgtgagattgtcaccggcaggggcgggcgcgtggcgataatcccgttcctggatggccacagttcctcggtgatagttgacaggattcgcaggaaccaaggggttttgggcagtggatag

SEQ ID NO: 32040 - protein, 187 aa, Unknown
  Obtained from environmental sample
  DOMAIN (50)...(176): Cytidylyltransferase
  misc_feature (1)..(187): Xaa is any amino acid
MEAHPQHHSPLPNGHMPSLAHFFLNAQSFWDAFPQMRPEARGANGKKLCFTNGCFDLIHPGHVQYLEDARALGDFLVLGLNSDQSVMRLKGESRPLQSETARALVLLGLKSIDAVIRFDEDTPQELIGQLQPDVLAKGGDYAPDTVVGREIVTGRGGRVAIIPFLDGHSSSVIVDRIRRNQGVLGSG

SEQ ID NO: 32041 - DNA, 330 bp, Unknown
  Obtained from environmental sample
  misc_feature (1)..(330): n is a, c, g, or t
gtgtcgcatatggtaatattggaagaagatgagggcaggcctataaattataaaaccacgggcacctgttccaccgaaattaattttgaactgcgggatggcaaggttcattcggtctcttttgagaatggatgcgatggcaacctgaaggctctgggaatacttgccgagggcatggacgccaatgaacttgtcaagaaactgaaagggctgcgctgtggcaggaagaaaacatcctgcggcgatcaactggcaaccgccgttgcccaggcccttgtacctcaaccgagcccgcagggcgaaggttcccctcttgacaaagccaaatga

SEQ ID NO: 32042 - protein, 109 aa, Unknown
  Obtained from environmental sample
  misc_feature (1)..(109): Xaa is any amino acid
MSHMVILEEDEGRPINYKTTGTCSTEINFELRDGKVHSVSFENGCDGNLKALGILAEGMDANELVKKLKGLRCGRKKTSCGDQLATAVAQALVPQPSPQGEGSPLDKAK

SEQ ID NO: 32043 - DNA, 849 bp, Unknown
  Obtained from environmental sample
  misc_feature (1)..(849): n is a, c, g, or t
atggacattatctattcattgattattgccgacaagcaatggggaagcgacggacgctacaattacctggaaattgcccgtgcaatgctggctgatttatggcaatattgcgttcattcaacctataaaaccatgctcctgggcgactgggccagcaaagggggcgataagggaaatcctgcccttgcacaaatacaaatgaacgctacccgcccttcggactttatcatcagccatcttaaggcgtataaagcggttgacagcgcccacaactggcaggaagtcatcgacgctacttacggcgttattaaagatgtctacgcggacgttaaagcaaaacatggcgccggcaggggcttactgcctgatttcgttataagaaataatgccaatactgcctgggtagttccggaagggcatgtgcttgaagaagataccgacggatcatactcatacaattcgtgccgtattccctggcgccttggcgttgacttcttgctgtacggcggtaacaccacaatagcgggctatgacatgtttgccgaaactattcaaccgcttgataagttagcgacagagatatatgaaaaatccgatctggacactttcggtcctcttaccattacgggagacggcatctggaataccgataattgggatgagttctgggatgatgccccatcatttaccgccccattcctggtaaccgcggcagccaccggcaacaaagacctggtcaacgaaatgtggaaatgggacggcttgaaagatttctggaatgatacctggggcgattacatcaaaatgctcgtgatgctgacagcgtccggcaactattggaaaccataa

SEQ ID NO: 32044 - protein, 282 aa, Unknown
  Obtained from environmental sample
  misc_feature (1)..(282): Xaa is any amino acid
MDIIYSLIIADKQWGSDGRYNYLEIARAMLADLWQYCVHSTYKTMLLGDWASKGGDKGNPALAQIQMNATRPSDFIISHLKAYKAVDSAHNWQEVIDATYGVIKDVYADVKAKHGAGRGLLPDFVIRNNANTAWVVPEGHVLEEDTDGSYSYNSCRIPWRLGVDFLLYGGNTTIAGYDMFAETIQPLDKLATEIYEKSDLDTFGPLTITGDGIWNTDNWDEFWDDAPSFTAPFLVTAAATGNKDLVNEMWKWDGLKDFWNDTWGDYIKMLVMLTASGNYWKP

SEQ ID NO: 32045 - DNA, 606 bp, Unknown
  Obtained from environmental sample
  misc_feature (1)..(606): n is a, c, g, or t
atgttatgcggtcttttgacccctacgtccggaacctgcgccatcgcgggactcgatttaaggaaagcgccgggcgaggcccgctctcgcctcggatacatggcgcagaaattttcgctttacggagagctgagcgtgcgccggaacctcgattttttttccggcgcctatggccttaggggaacgaaaagaaaggataccgtcgaacgggtggtcgaggccttcgacttgacccgttacctgaaggctccggcgggatccctgccattgggatacaagcaacgcctggcaatgggctgcgcgataatgcacggcccagacgtgttgttcctcgatgagcctaccagcggcaccgatccggtaacgcggcgcgaattctggacttatatcaacgaagcggcgatgcgcggagtcacagtcatggtaaccacgcacttcatggacgaggccgagtactgcgaccgcgtagcgctggtctacaagggcagggtgacggcagccggcacgccagacgaactcaaggcagaagccgccgatgccgcacactccgaccccacgctcgaagacgctttcatccgcttgatcgagcaagcggacgcaaagtga

SEQ ID NO: 32046 - protein, 201 aa, Unknown
  Obtained from environmental sample
  DOMAIN (1)...(162): ABC transporter
  misc_feature (1)..(201): Xaa is any amino acid
MLCGLLTPTSGTCAIAGLDLRKAPGEARSRLGYMAQKFSLYGELSVRRNLDFFSGAYGLRGTKRKDTVERVVEAFDLTRYLKAPAGSLPLGYKQRLAMGCAIMHGPDVLFLDEPTSGTDPVTRREFWTYINEAAMRGVTVMVTTHFMDEAEYCDRVALVYKGRVTAAGTPDELKAEAADAAHSDPTLEDAFIRLIEQADAK

SEQ ID NO: 32047 - DNA, 795 bp, Unknown
  Obtained from environmental sample
  misc_feature (1)..(795): n is a, c, g, or t
ttgagaagacaggcggtagtatccggcgaccttttaggcgtgcttgaccccctgccctacgaaatcaagttagccggcgtcagagcaggcctgcatcaggcccgcgccgccctcgctaaaatggaaagcggctatcgcagcggggaaattaggcagtccgtcgctcagcgcgaccagatacgtgcgtcgttgaaacttgccgaaaaggactggcagcggctatcaaacctcttcgcgcggggagcgatagccaaaaaagacctggacgacgtctccaccacacgcgacaggctcctggcggaactgtcctcggcggagtccgccctgtccctcatgcgtgagggcttccgcacagaggacgtaaaagccgcggaggcggctgtggagctcgccgaggctcagctccgggaagcggaaaactccctggccgacacccggctttacaatccatccgagggtacggtgctgacccgcgtagcggagcgcggcaccgtcgtggcggcaggccaggccgtctacgccgtactattgaaaagacctgttcaagtacgcacttatgtaatggaaccccagcttggaaaaattcaccttggcatgaaggggaaaattttcacggactcgcacccaacccccgtagagggaatcgtcaacttcatcgcgtccgaggctgagttcactcctaaacaagttcagactgagaaccaacgcgtcgatctcgtgtaccgcgttcgccttctggtcgaggacggcgaacacctgaagaacggcatgcccgtgacagtgtttctagaatga

SEQ ID NO: 32048 - protein, 264 aa, Unknown
  Obtained from environmental sample
  misc_feature (1)..(264): Xaa is any amino acid
MRRQAVVSGDLLGVLDPLPYEIKLAGVRAGLHQARAALAKMESGYRSGEIRQSVAQRDQIRASLKLAEKDWQRLSNLFARGAIAKKDLDDVSTTRDRLLAELSSAESALSLMREGFRTEDVKAAEAAVELAEAQLREAENSLADTRLYNPSEGTVLTRVAERGTVVAAGQAVYAVLLKRPVQVRTYVMEPQLGKIHLGMKGKIFTDSHPTPVEGIVNFIASEAEFTPKQVQTENQRVDLVYRVRLLVEDGEHLKNGMPVTVFLE

SEQ ID NO: 32049 - DNA, 567 bp, Unknown
  Obtained from environmental sample
  misc_feature (1)..(567): n is a, c, g, or t
atgctccttgacacattgaccagtgttttgcttgaagatttctccaattgggtcggtgataccacctttctgggaaatcttgtttttttctcagttgaaaaaagcaaaattccacattcagatacaactagagtatcttatttagcgaaagatggaagttattattcatttactatctttgaaagagaatttaaacaatggttgctcaatgatttacttgcaaacgtaactcttgaaaaactgatggatgtctcaaatgataccattagctggtcgtctcaccctcggaacatctatagaggaataagcagcaagcagcaatttataactgacaattttgaactcttgaaaaaagaattatcattgatattaaattcagacaccgaatatcattttactgctaaatatccatttagctattgcggtaatatttctcccaacatagaactacggatttctcatagagatagcggagaacagaattactttaaattttcacgaatcaataacagatacaaattaactgatgtaggaatcagaactgctccttatctgaagttagaatga

SEQ ID NO: 32050 - protein, 188 aa, Unknown
  Obtained from environmental sample
  misc_feature (1)..(188): Xaa is any amino acid
MLLDTLTSVLLEDFSNWVGDTTFLGNLVFFSVEKSKIPHSDTTRVSYLAKDGSYYSFTIFEREFKQWLLNDLLANVTLEKLMDVSNDTISWSSHPRNIYRGISSKQQFITDNFELLKKELSLILNSDTEYHFTAKYPFSYCGNISPNIELRISHRDSGEQNYFKFSRINNRYKLTDVGIRTAPYLKLE

SEQ ID NO: 32051 - DNA, 537 bp, Unknown
  Obtained from environmental sample
  misc_feature (1)..(537): n is a, c, g, or t
atggatctgtacaaagtcgacttcgggactcccaaggcgattaccgtcagcaagaagtggaatgacaccaacaccaaagcgggcgacgtcgtcgcgtccatcgggcagattatcgaaagcctgcaggagacctcggacggaaccgacatcgtccacctgatcaaacacgacgtgtacgccgcgctggtatcgttagccgcggcccttcacaacagcgacctgatcaaggtattcccggactacgtccaaattggcaccgcgaagtttatcatctgttccgcccggtactacagctacaaaacaaaagcttttgtagacgcgataccggacaagacggttgtaagcgtagcgcgcgatgacgctttcgggctgttctactgcgccctggattcgcttgacgcgaatttcgcctccctgccgttctacgtgaatgcggtaaagctggaggatccggaaggggcaaagcttatcggccagtccaggcccatgccggttcccaacgtggacgctatcagaaaaacgcaggtattggcgtag

SEQ ID NO: 32052 - protein, 178 aa, Unknown
  Obtained from environmental sample
  misc_feature (1)..(178): Xaa is any amino acid
MDLYKVDFGTPKAITVSKKWNDTNTKAGDVVASIGQIIESLQETSDGTDIVHLIKHDVYAALVSLAAALHNSDLIKVFPDYVQIGTAKFIICSARYYSYKTKAFVDAIPDKTVVSVARDDAFGLFYCALDSLDANFASLPFYVNAVKLEDPEGAKLIGQSRPMPVPNVDAIRKTQVLA

SEQ ID NO: 32053 - DNA, 516 bp, Unknown
  Obtained from environmental sample
  misc_feature (1)..(516): n is a, c, g, or t
ttgtatctgcgaaaaccaatagaggtcctgtactcgggcgggggccaggaaagaaatattcggcccggcaccgagaatgtaagcggcgcccttgccctggcgcattgcctggaaacccatgcccttccggaaattgtcgccacggaacacgccaaagcaaaggcccgctgcaaacggctgatctccgggttaggggaaatcggtcgctgccgccttatcccggcggaacgggcaggcggggagcatgacgcggtcttttctccgtatatagtacaggcggcctttaaggacatccccggcgaagtgatggtcagggcattggacgatcttggctttgccgtttccaccggttcggcctgtacatcagccaggcatgagcgcccggtcctggccgcgatgggcgttgacgacaagctggcttttgagggaattcgaatttcccaaggctggtcaaccaccgaggaggaaatagacctgctgttgggggccatcaaggaggtgctgaaattcctttga

SEQ ID NO: 32054 - protein, 171 aa, Unknown
  Obtained from environmental sample
  misc_feature (1)..(171): Xaa is any amino acid
MYLRKPIEVLYSGGGQERNIRPGTENVSGALALAHCLETHALPEIVATEHAKAKARCKRLISGLGEIGRCRLIPAERAGGEHDAVFSPYIVQAAFKDIPGEVMVRALDDLGFAVSTGSACTSARHERPVLAAMGVDDKLAFEGIRISQGWSTTEEEIDLLLGAIKEVLKFL

SEQ ID NO: 32055 - DNA, 819 bp, Unknown
  Obtained from environmental sample
  misc_feature (1)..(819): n is a, c, g, or t
atggaacttctcgacagggaagcagaaaagaaacggcgcataaagacgattctaaagaggaaatggaggttcttgttgaatagggccaggctcttcgcaaaaataacggaaaaatggcctgtcaaggttctctccttggcggcggcggtaattatttctattttttacagaatgaccaacctggaaacccgttttttcacagttccgttgttaattgaatcaaatgacaccttaataccgacaaattctttcgcgacctcggtaagggtatccattcgtggggaagccgaaggaattcagccgatacttgcggaagatatagaagcctatatcgatcttgaaagatacgccaacgaaggatattacagggtgccggttcaaattcgcaaaaaaggcggcgctcttggggttgaacctttggaaatatccgttttaccgatagaaatcccgatctttcttgaacaaaaagtgacacgtaacgtcagtgtatttgcggtattaagcggaacggtcgctgaagggtacgagcttaccaaccagtcgttaattccttcaagcgtaattgtcgaaggcccgcgttcaatacttgacggccaccatgttgaatttagtacggaaacaattaaccttgacgggcggtataatgactttaccgtcatggttaacataaaaaatgataaccctatactgtctatttacggaagcaacctgctggaattccgtggggcaataagccgtatcgtacgcggaagaataactgaaactccggcggaaaatccggtggaaacgggccgcatttctgaaggcggtgaagaatga

SEQ ID NO: 32056 - protein, 272 aa, Unknown
  Obtained from environmental sample
  misc_feature (1)..(272): Xaa is any amino acid
MELLDREAEKKRRIKTILKRKWRFLLNRARLFAKITEKWPVKVLSLAAAVIISIFYRMTNLETRFFTVPLLIESNDTLIPTNSFATSVRVSIRGEAEGIQPILAEDIEAYIDLERYANEGYYRVPVQIRKKGGALGVEPLEISVLPIEIPIFLEQKVTRNVSVFAVLSGTVAEGYELTNQSLIPSSVIVEGPRSILDGHHVEFSTETINLDGRYNDFTVMVNIKNDNPILSIYGSNLLEFRGAISRIVRGRITETPAENPVETGRISEGGEE

SEQ ID NO: 32057 - DNA, 375 bp, Unknown
  Obtained from environmental sample
  misc_feature (1)..(375): n is a, c, g, or t
atgattacgggaatcggcgttgatatagttgatgtcaggcgcatggaacgctggattggcaatttggcgctccttaacaggtattttcatcaggaggaactttccctggcgctttccagaaaaaacagcgcggctcaaacattagccgcaagattcgccgcaaaagaagcgtttggcaaggctcttggaagcgggcttgcggaaatagaattaaaagatattattgtaattaacgacgataaaggaaaacctgatattaagttgacgggtaccgcgcaaaaagcgtttgaaaaatcaggcgcggacagggctcatatttcccttacccatgaaagggagaacgcaattgccatgatcgttttggagggggcgtaa

SEQ ID NO: 32058 - protein, 124 aa, Unknown
  Obtained from environmental sample
  DOMAIN (5)...(71): 4'-phosphopantetheinyl transferase superfamily
  misc_feature (1)..(124): Xaa is any amino acid
MITGIGVDIVDVRRMERWIGNLALLNRYFHQEELSLALSRKNSAAQTLAARFAAKEAFGKALGSGLAEIELKDIIVINDDKGKPDIKLTGTAQKAFEKSGADRAHISLTHERENAIAMIVLEGA

SEQ ID NO: 32059 - DNA, 858 bp, Unknown
  Obtained from environmental sample
  misc_feature (1)..(858): n is a, c, g, or t
atggctgatcaaacaagccgcgaaggggcaatgtcctttctctgcgcctgcctgctccacgatctgggtcattttccctacacccattccctcaaagaactgtctctgcgttcccacgagtcccttaccggggaaataatcctttccgagccggtaaaaagcctggttggtaaatgcggggcggatccggcattgaccgccgcgattattgaccgggaactttccggcaattccggcaattccgagctgtttttttaccggaaactcctttccggctgttttgatcccgataaacttgattatttaaaccgcgatgcccggtattgcggggttccctacggagtacaggacgttgattttattctttcgcggctcatcccctgtcctgaacggggaatcgacattgattcccgtcttatccccaatgtagaagcgatacttttcgcaaaatatctcatgtaccggacagtttactggcaccggcaggttcgcgccgccacatccatgattaaaaaagccctgttggaggggctggaatcaaaagtaatagcaagagaagaattgtacgaccttgatgatcagggactgtttaccctgctgcgagaaaaaaccggtagtgacaaaacacgtaacgcgctggcggaggcagtatggaaaggcaatttttactccgttgccgctgaaattccctttattgaggctgatcatgcctgtctgagagatattaaccggcgttcccactatgaagagcaggttgccgaaatactccgccgggcaggcattcctttgggcagcggcgatctgatcatagatgtgcccgaaccaatttcttttgaaacccggactctttgtgtttga

SEQ ID NO: 32060 - protein, 285 aa, Unknown
  Obtained from environmental sample
  misc_feature (1)..(285): Xaa is any amino acid
MADQTSREGAMSFLCACLLHDLGHFPYTHSLKELSLRSHESLTGEIILSEPVKSLVGKCGADPALTAAIIDRELSGNSGNSELFFYRKLLSGCFDPDKLDYLNRDARYCGVPYGVQDVDFILSRLIPCPERGIDIDSRLIPNVEAILFAKYLMYRTVYWHRQVRAATSMIKKALLEGLESKVIAREELYDLDDQGLFTLLREKTGSDKTRNALAEAVWKGNFYSVAAEIPFIEADHACLRDINRRSHYEEQVAEILRRAGIPLGSGDLIIDVPEPISFETRTLCV

SEQ ID NO: 32061 - DNA, 546 bp, Unknown
  Obtained from environmental sample
  misc_feature (1)..(546): n is a, c, g, or t
ttggaagactgcatgaccaaactgaagggaatcaatccgcagtctttccgtctgggcagcgggcgggaagagccggacggttcgttttcctttctggtgaggtttaccggcagggaagagggaataaccggcgagttatttgtccggtttgaggaacgtcgtccaaaagccgcaactcctccgccggtaaaagaggcggaagtaaaaaccccggacgctcaatccacggacgctcagcccgcagacgcacagccctcggacgcacagtccgcggacattcaatccgtggacattcagcccgcaggttctgagaccgaaggtcctccacccgaggcccctaaatccgcggagattgaatccggaaatgaaaaaaatattcctgtacaggccgagaaaccggtacaggctacgccggtgagtgtctcctccgtccccaaaatatggttttttgaggatttgattttggaagagcctcgcagccgcgaggaagaaaacagagagaatcgtcatcgttttgacttttctccttatgagaggttttattaa

SEQ ID NO: 32062 - protein, 181 aa, Unknown
  Obtained from environmental sample
  misc_feature (1)..(181): Xaa is any amino acid
MEDCMTKLKGINPQSFRLGSGREEPDGSFSFLVRFTGREEGITGELFVRFEERRPKAATPPPVKEAEVKTPDAQSTDAQPADAQPSDAQSADIQSVDIQPAGSETEGPPPEAPKSAEIESGNEKNIPVQAEKPVQATPVSVSSVPKIWFFEDLILEEPRSREEENRENRHRFDFSPYERFY

SEQ ID NO: 32063 - DNA, 435 bp, Unknown
  Obtained from environmental sample
  misc_feature (1)..(435): n is a, c, g, or t
atgaatattttagaacttgtcggcaacactccggtaattgaattaaaaaaaatattcaacgaggcaaacggcgtttctctgtttgcaaaggcggaattttttaatccaagcggctccgtaaaagaccgcgccgcgaaagccatgatactgcacggcattaattcgggcctgcttaccaaagataaaattcttttggattccacaagcggcaataccggaatctcgtattcaatgttcggcgcggcgcttggttaccgggtaaaactgctcatgccggcaaacgccagtgaggaaagaaaaaaacttattcgcgcttacggcgcggaaattatagaaaccgatccccttgaaggctctgacggcgcgtaccgtatggcaataaagttagctgaaaaagagccggattttatttttccccaacctcggccaatctga

SEQ ID NO: 32064 - protein, 144 aa, Unknown
  Obtained from environmental sample
  DOMAIN (3)...(144): Pyridoxal-phosphate dependent enzyme
  misc_feature (1)..(144): Xaa is any amino acid
MNILELVGNTPVIELKKIFNEANGVSLFAKAEFFNPSGSVKDRAAKAMILHGINSGLLTKDKILLDSTSGNTGISYSMFGAALGYRVKLLMPANASEERKKLIRAYGAEIIETDPLEGSDGAYRMAIKLAEKEPDFIFPQPRPI

SEQ ID NO: 32065 - DNA, 1170 bp, Unknown
  Obtained from environmental sample
  misc_feature (1)..(1170): n is a, c, g, or t
atgaaatttaatttcgacgaaataattgaaagacgcaacacatacagtattaaatatgagccttcctggcgcggaaagccaggcgacgtgctgcccatgtgggtcgccgatatggatttcgcggcgccgccctgcgtacaggaagcgcttgtcaaccgcgcccaacacgggattttcgggtactccgaacccgacgcttcttattttgatgttatgcgtaagtggtttgaggaacgttttaactggactgtcgaacgcgactggctgacgattacccccggcgtggtaaacgccctgtaccttgccgtccgcgccctgacaaaaccaaacgacgggattgttatacaacagcccgtgtattatccctttgaatcgagcataagaaaaaccggacggcagctgcttgtaaatgaacttgtgtactcaggcggacgttacagcatagattttcaggattttgaaacaaaaataaaacaggcgaaaatgttcattctgtgcaatcctcataaccctgtagggcgtgtctggaaacgcgatgaactggaacgcatgggcgaaatatgccttcgccacaacgtgactgtcatcgccgatgaaatccacgaggattttattttccccggccataagcacattgtattttcaacattaaatgaggaattcgccaatataaccgttacctgcacatcgccgtcaaaaacctttaatctcgcgggattgctttgcgccaatatttttattttcaacaaagatatgcgcgataaattcaaagaggagtttgccggctgcggtttaagccagccgggcgtaatggggctcatcgcatgtaaagcggcgtatgaagacggggccgaatggctggatcagcttttgggttatctctctgaaaatatgttattccttaaaacatatctttcccaacacattccaaagatcaagcttattgaaccggagggaacataccttgcgtggctggactgcaatgaactgggactttcagcccaaaagttggatgaagcgcttacccggggaaaattatggctgagcgcgggtcattcttttggaaaaggcggaaacgggttccagcgcatgaatgtcgcctgcccccgttccgtattgcatgacgcgctggaacggttgaaaaacacggtaaacctgtggtataaatag

SEQ ID NO: 32066 - protein, 389 aa, Unknown
  Obtained from environmental sample
  DOMAIN (28)...(380): Aminotransferase class I and II
  misc_feature (1)..(389): Xaa is any amino acid
MKFNFDEIIERRNTYSIKYEPSWRGKPGDVLPMWVADMDFAAPPCVQEALVNRAQHGIFGYSEPDASYFDVMRKWFEERFNWTVERDWLTITPGVVNALYLAVRALTKPNDGIVIQQPVYYPFESSIRKTGRQLLVNELVYSGGRYSIDFQDFETKIKQAKMFILCNPHNPVGRVWKRDELERMGEICLRHNVTVIADEIHEDFIFPGHKHIVFSTLNEEFANITVTCTSPSKTFNLAGLLCANIFIFNKDMRDKFKEEFAGCGLSQPGVMGLIACKAAYEDGAEWLDQLLGYLSENMLFLKTYLSQHIPKIKLIEPEGTYLAWLDCNELGLSAQKLDEALTRGKLWLSAGHSFGKGGNGFQRMNVACPRSVLHDALERLKNTVNLWYK

SEQ ID NO: 32067 - DNA, 1197 bp, Unknown
  Obtained from environmental sample
  misc_feature (1)..(1197): n is a, c, g, or t
atgatggccgagacagtcagacttcggcaaaacaaaactgccgcaaagccagcagcaaaatctgcggcctctaagtctcccgtttatgacgaatcaaaaataaaaacgctgtcttcgcttgaacacatcagactgcggactggaatgtatatcgggcggcttggagacggctccaatcccgacgacggcatttatgttttgttaaaagaggtaattgacaacggtattgatgagttcatcatgggcaacggaaaaaatattgatgtgtcgataaaggacattgataaaacaggagcggcaaccgtaaaggtgcgcgactttggacgcggaatcccacttggaaaactggtcgaatgtgtttccgtaattaataccggagccaagtacaacgacgacgtgtttcagttttcggtagggcttaacggagtggggacaaaggcggtaaacgccctgtctgtttatttcagggtggtcgccatgagaaacggcgaatttgccgaggcgatattcgagagaggcaaattaaaaagcgaacgcaagggcaagctgaaggacaagcagaaagacgggacttatgtagagtttacccctgatcccgacattttcaaagattatctgttcaacgtcgaattcgtagagaaacggatgcagaattacgcctaccttaacgcgggaatgaccctgtcgtttaacggcaagcagtttgtctcaaagcggggactctacgatctgctgtacgaggagacgggcgatgacaacctctacccgatgggctattacaagggggagcattcgcctaacggccagcttgagtttgcctttacccataccaataactacggcgaggagtatttttcgtttgtcaacggccagtttacctccgacggcggcacacatctttcggctttcaaggaaggttttctcaaggggatacaaacttactttaaaaaagactaccgcagcgaggacatccgcgaggggacggcctcggcgatagcgataaagcttaaaaacccggtttttgaaagccagacgaagaacaaactgggcaattcggacatccgcgcctgggtggtgcaggaaacccgcaacgccgtggaggactggctgcacaaaaaccccgaggcgggaaagaaacttgagcagaagatcatttccaacgagagcctgcgcaccgagcttctcgtgccaatctga

SEQ ID NO: 32068 - protein, 398 aa, Unknown
  Obtained from environmental sample
  DOMAIN (59)...(200): Histidine kinase-, DNA gyrase B-, and HSP90-like ATPase
  misc_feature (1)..(398): Xaa is any amino acid
MMAETVRLRQNKTAAKPAAKSAASKSPVYDESKIKTLSSLEHIRLRTGMYIGRLGDGSNPDDGIYVLLKEVIDNGIDEFIMGNGKNIDVSIKDIDKTGAATVKVRDFGRGIPLGKLVECVSVINTGAKYNDDVFQFSVGLNGVGTKAVNALSVYFRVVAMRNGEFAEAIFERGKLKSERKGKLKDKQKDGTYVEFTPDPDIFKDYLFNVEFVEKRMQNYAYLNAGMTLSFNGKQFVSKRGLYDLLYEETGDDNLYPMGYYKGEHSPNGQLEFAFTHTNNYGEEYFSFVNGQFTSDGGTHLSAFKEGFLKGIQTYFKKDYRSEDIREGTASAIAIKLKNPVFESQTKNKLGNSDIRAWVVQETRNAVEDWLHKNPEAGKKLEQKIISNESLRTELLVPI

SEQ ID NO: 32069 - DNA, 423 bp, Unknown
  Obtained from environmental sample
  misc_feature (1)..(423): n is a, c, g, or t
atgaaaaaccgtaacctacagatacaccgcatactggacgccaacctcaaccgcctccgcgaagcgctccgggttgttgaagagcactaccgcttcatacttgaggacgaaaacgtttgcgttaaactgaaggcgatgaggcactcgctcacaaacatggaagagagcgtagggcaaaactccctcttggagggacgcgatacggagtcggactgcttcgcgtcgacatcccgcccggaggagatgggcagggcggacgccgcggccatcctccgcgccaacttcaaacgcgcacaggaggcgtgccgcgtcatagaggagtactcaaaaatatccgcggaaacggaagcggcgagccggcaggccaaggagatgcggttctcgctgtacgcgatggaaaaggcggcgctgtcggaaaggtga

SEQ ID NO: 32070 - protein, 140 aa, Unknown
  Obtained from environmental sample
  misc_feature (1)..(140): Xaa is any amino acid
MKNRNLQIHRILDANLNRLREALRVVEEHYRFILEDENVCVKLKAMRHSLTNMEESVGQNSLLEGRDTESDCFASTSRPEEMGRADAAAILRANFKRAQEACRVIEEYSKISAETEAASRQAKEMRFSLYAMEKAALSER

SEQ ID NO: 32071 - DNA, 303 bp, Unknown
  Obtained from environmental sample
  misc_feature (1)..(303): n is a, c, g, or t
atggatgaggagaatacagcttttattcttatcgatccatttatttttcggcctgattatgaaatggatatcagcaacgaagagcttctcccaataggcatcagtgaaagcgaaaaggctgtaatcttttcaattgttacaattccccccgataacagcccaatgacggcaaaccttcagggcccgctggttattaaccgcgaaagcaggcttggaatccaggcagtgctgacagactccagatggaagacaaagcacgatataatggcggaactcgcttctttaaagcgggaagggcggtaa

SEQ ID NO: 32072 - protein, 100 aa, Unknown
  Obtained from environmental sample
  DOMAIN (1)...(91): Uncharacterized BCR, COG1699
  misc_feature (1)..(100): Xaa is any amino acid
MDEENTAFILIDPFIFRPDYEMDISNEELLPIGISESEKAVIFSIVTIPPDNSPMTANLQGPLVINRESRLGIQAVLTDSRWKTKHDIMAELASLKREGR

SEQ ID NO: 32073 - DNA, 738 bp, Unknown
  Obtained from environmental sample
  misc_feature (1)..(738): n is a, c, g, or t
atgtcgattattgcaaacgaaaccagatccgcgacaatagtgatccaggaagacgcaaagctgctaaccctgcacggagtagatttttaccgcattgcttttgaatatcccatgattgggacaaagattttaaattctatgcgaaaagtacaaaatacctggtttgagcagatctcaaaacacttgggcgacattatgcgctggggcgagactgcccgccgccgggctgtcactgatgaacttacgggcctttacaaccgccgctttcttgaagattccgcgggcgaacgcttttcgcggggcactcttggcctccgcagcatttccctgatgatgatggatctggatagaatacatgagatcaataatgtccacggtccaaaagcgggggatctgatgtttatttcaatggcggaagttctgcgctttgttacccgcacaggggatatatgcgccagactttccggcgatgaatttgccgtcctccttccggatgccggcacggatgaagcggtttcgattgccgaaagggcaagagaaaaaatagcatcccgaaaaatttcggttccagtcaggcctaacagcagaaaaaatacagaggtaagcgtttgtacgagcattggtatcgccactgctccgattcacgcggatacctgggaaaaactggttttggctgccgacggcgctttgcgccaggctaaagcactgggaagaaacagggtagtagttgccggttga

SEQ ID NO: 32074 - protein, 245 aa, Unknown
  Obtained from environmental sample
  DOMAIN (72)...(240): GGDEF domain
  misc_feature (1)..(245): Xaa is any amino acid
MSIIANETRSATIVIQEDAKLLTLHGVDFYRIAFEYPMIGTKILNSMRKVQNTWFEQISKHLGDIMRWGETARRRAVTDELTGLYNRRFLEDSAGERFSRGTLGLRSISLMMMDLDRIHEINNVHGPKAGDLMFISMAEVLRFVTRTGDICARLSGDEFAVLLPDAGTDEAVSIAERAREKIASRKISVPVRPNSRKNTEVSVCTSIGIATAPIHADTWEKLVLAADGALRQAKALGRNRVVVAG

SEQ ID NO: 32075 - DNA, 1248 bp, Unknown
  Obtained from environmental sample
  misc_feature (1)..(1248): n is a, c, g, or t
ttggggaacaggcagttcattttccgcttgctcaacaattatttccgcgttttccttcggagtgactgtttccgcttttttgcgagaacagccgattatacaggctgttataacaaacattccaaatattacaggcaaaagcccgcgccatttaccaattattgcgtttttcataagaaattcctccctttcaggctattaacgctgtattttatatgggcagaccagcggaaatctattgcattctttactaattcggctgcactttctactaattcgtacctttcatatgtgctacttgcatatttcattcgtaattcttatactgtttctatgggtcaataccagccgcaaatcccgtgggaacttacccgcgccgtggtgagcattgctgcatggtgggtattgttttaccgcctccaccggcccgaatcgctgtggcggcgcattgtccttctaatagccatgccggcggcttacgctttctggatactcatgccgatgagcattgtcgctaactctgtctcatgggcagctattactgtgatctttgccttcatctgcggggatttgcgccgttccctttttaccgcctttttctacatcggcatggaggcatccattgacagcacccgctccgccctgattgccctgctgtttaaccggtttttcccttcccattcccccggccagtatttacaatacaatctgcaatacctcgccgtgttcggcttatgctgttgttattatatgataatgaggcggtattcgggcaaactgccgctacccagttggatattgattattatcccgcctttaattctgtgggcggttctgacttattttgccaatgtcgcggatccgcttctgatggaacagggtatcaacatttacggtcccggcttctgtttcgggctattttctatattactcaaccttgtggtactctacctatatatccgccaacttgttattaccgatgctcaacgctttacaatagcggtttccgctgttgaggcgatatggacaccggagaacggcctgtcggataatttttgcaaacaccaccaattgaatgaccgggaaaaagacatagttgaagtaatgatgaaaggcaaaagcaacaaggaaatcgccgataccctgcacatttcaatcaggacagtaggggcttatctccaaaatgtctacaagaaaacaggcgcgcccaaccgtttcgccttttactcgctgataaaaggggagtag

SEQ ID NO: 32076 - protein, 415 aa, Unknown
  Obtained from environmental sample
  DOMAIN (355)...(412): Bacterial regulatory proteins, luxR family
  misc_feature (1)..(415): Xaa is any amino acid
MGNRQFIFRLLNNYFRVFLRSDCFRFFARTADYTGCYNKHSKYYRQKPAPFTNYCVFHKKFLPFRLLTLYFIWADQRKSIAFFTNSAALSTNSYLSYVLLAYFIRNSYTVSMGQYQPQIPWELTRAVVSIAAWWVLFYRLHRPESLWRRIVLLIAMPAAYAFWILMPMSIVANSVSWAAITVIFAFICGDLRRSLFTAFFYIGMEASIDSTRSALIALLFNRFFPSHSPGQYLQYNLQYLAVFGLCCCYYMIMRRYSGKLPLPSWILIIIPPLILWAVLTYFANVADPLLMEQGINIYGPGFCFGLFSILLNLVVLYLYIRQLVITDAQRFTIAVSAVEAIWTPENGLSDNFCKHHQLNDREKDIVEVMMKGKSNKEIADTLHISIRTVGAYLQNVYKKTGAPNRFAFYSLIKGE

SEQ ID NO: 32077 - DNA, 576 bp, Unknown
  Obtained from environmental sample
  misc_feature (1)..(576): n is a, c, g, or t
atgaacatcgcgcagaccgcgcttgaactcacaggcggccagaaccttgatatgtcattgaattacaaagtaaacgcgacagtgcccgcttctgcggttggctccggcgctgccgatattttgagcaaaataccaggcggcgtaaaaataaatgaattcaaattgacaggattgataggcggcacggcagccaaacctgtcgtaaccctcagcgtcgccgatatggcaagcagtgttgccggagccgttaaagacgcggtcaaagaacaagtgaaagaagaggttgaaaaacaaataaacgccctcatggccgaagccgaaaaacaagctcaaaacatccgtaatgccgcaaagcaatctgccgacaaaatacgtcaggaagccaacagcgccgccaacaaactggaaagcgaggcaaaaaaccctctccaaaagattgcggcccaaacagcggccgatgcgcttcgtaaagaaggtgaaaccaacgctgttaaagtagaacaggaagctgaaagacaaattaagaccattatggataacgccaacaagaaagctaatgatttaaggaaaggctag

SEQ ID NO: 32078 - protein, 191 aa, Unknown
  Obtained from environmental sample
  misc_feature (1)..(191): Xaa is any amino acid
MNIAQTALELTGGQNLDMSLNYKVNATVPASAVGSGAADILSKIPGGVKINEFKLTGLIGGTAAKPVVTLSVADMASSVAGAVKDAVKEQVKEEVEKQINALMAEAEKQAQNIRNAAKQSADKIRQEANSAANKLESEAKNPLQKIAAQTAADALRKEGETNAVKVEQEAERQIKTIMDNANKKANDLRKG

SEQ ID NO: 32079 - DNA, 462 bp, Unknown
  Obtained from environmental sample
  misc_feature (1)..(462): n is a, c, g, or t
gtgaaggccgtagtacaaagagtaatagacgcttctgtcagcgttgacggggtttttaaggggagcgtttctaagggactgcttgtttacttgggcgttgcgcataatgatactgaatctgacgccgactggctttcagagaaaatagcgtatcttagaatttttgacgatgaaaatgggaagatgaatctttctttgaaagacttagcctctcttgataagcaagcgggtcttttggctgtttcgcaatttacattattagccgacgcgcgaaaaggaagacgcccttcatggaacggcgcggcttctcctgaaaaagcaaaacagctttacgagtattttattgacgcgataaaaaagaccggacttacctgcgaaagcggagagtttcagtcgcacatgatggttaagtacactaacgacggacctgtaacgattattttagatacggaattaacatga

SEQ ID NO: 32080 - protein, 153 aa, Unknown
  Obtained from environmental sample
  DOMAIN (28)...(150): D-Tyr-tRNA(Tyr) deacylase
  misc_feature (1)..(153): Xaa is any amino acid
MKAVVQRVIDASVSVDGVFKGSVSKGLLVYLGVAHNDTESDADWLSEKIAYLRIFDDENGKMNLSLKDLASLDKQAGLLAVSQFTLLADARKGRRPSWNGAASPEKAKQLYEYFIDAIKKTGLTCESGEFQSHMMVKYTNDGPVTIILDTELT

SEQ ID NO: 32081 - DNA, 663 bp, Unknown
  Obtained from environmental sample
  misc_feature (1)..(663): n is a, c, g, or t
ttgagggaactatactggaccgacggcggctattctttcggcagtgtcggcaaccccgatcttaaacccgaagacggctggggagcggatattggtttttcatggcgttacaaacatttaattaattttgaaactgttttctttacccaccgcttaaaagattcgattcactggtatcagggagccaacggcatctggcgccctgaaaatgtcggagacgcggtgtttttcggtctggataacaaactgcgttttgaaatcccggttaatcttggaaaaataaaaaaaattatcccatcggtttcgtataaataccttttaagttacctgttaagtttcggctatgactttgcggataataaaagaattccctacagtcccgtgcacactctaggcggctctcttgagattccctgggatacaggttctgtaataatcaacggacattatgaaagcgaacgctataacgacagggcaaacattataaaattaaaacagtactttttacttaacgccaatattagtcaaaagataggaaaaaatataactgcctttgcagtactgcggaatattttaaatgaatcgtatgaatcatttatagattaccccatgccaggatttacggtgactgtagggttacgcgcaaatttggagattaaatga

SEQ ID NO: 32082 - protein, 220 aa, Unknown
  Obtained from environmental sample
  DOMAIN (3)...(217): TonB dependent receptor
  misc_feature (1)..(220): Xaa is any amino acid
MRELYWTDGGYSFGSVGNPDLKPEDGWGADIGFSWRYKHLINFETVFFTHRLKDSIHWYQGANGIWRPENVGDAVFFGLDNKLRFEIPVNLGKIKKIIPSVSYKYLLSYLLSFGYDFADNKRIPYSPVHTLGGSLEIPWDTGSVIINGHYESERYNDRANIIKLKQYFLLNANISQKIGKNITAFAVLRNILNESYESFIDYPMPGFTVTVGLRANLEIK

SEQ ID NO: 32083 - DNA, 909 bp, Unknown
  Obtained from environmental sample
  misc_feature (1)..(909): n is a, c, g, or t
ttgcctctggcgttagtgttgatcatcgccattggtttaatcgcacgtgacagaatctttaatgccgatattgtagtgcttggaatattatttgccaccttgggaatgtttgcgcttaatctgggaatgacgggcggtattacagtcctcagttctcaagcgggaaattcccttaaacagacttacacggaaacgctctatgaaaataaaaccgtaatggtgcgcggcgttgatacaaattcgttaattacggttccgggagaaaacggagcggaaacttatatctgggtgcagggaagaaacggaccgactcttgaaaaatttgttcctcaacgtcttgacggtagcaattatacccatattccggttaaaggcgcaatgtcctcaaggtttgggatgattggcgcgtacatcataatacttgtcattgttttctttctgggattctttgcgatttttgcggaacccggtcttgccgttaccgcggttaccgtggaagagatgaccaccggtacatttaggcgatcaaaattgataaagattgcggctatgggcgtgggcggcggtatggtgattggttttgcgcgtgtactgttcagcaatatgttgccatccggaggcatacatctttcatggattttggcgccatgttatgcgattgccctgatactgacgatatttgcccctgaagatttttcttcaatagcgtgggatgtcgccggcatcgcgacaggccccatcacagttccaattatcataacttcagggcttgggctcggacgcgattcactgcgggctgacggcgctttcggcattgtggcgacggccagcgtatttccgattatagtaatattaatatcgggcattgttgataaagtaagatcgaagcgcgtgttaagcaggatgtag

SEQ ID NO: 32084 - protein, 302 aa, Unknown
  Obtained from environmental sample
  DOMAIN (104)...(292): Protein of unknown function (DUF1538)
  misc_feature (1)..(302): Xaa is any amino acid
MPLALVLIIAIGLIARDRIFNADIVVLGILFATLGMFALNLGMTGGITVLSSQAGNSLKQTYTETLYENKTVMVRGVDTNSLITVPGENGAETYIWVQGRNGPTLEKFVPQRLDGSNYTHIPVKGAMSSRFGMIGAYIIILVIVFFLGFFAIFAEPGLAVTAVTVEEMTTGTFRRSKLIKIAAMGVGGGMVIGFARVLFSNMLPSGGIHLSWILAPCYAIALILTIFAPEDFSSIAWDVAGIATGPITVPIIITSGLGLGRDSLRADGAFGIVATASVFPIIVILISGIVDKVRSKRVLSRM

SEQ ID NO: 32085 - DNA, 1353 bp, Unknown
  Obtained from environmental sample
  misc_feature (1)..(1353): n is a, c, g, or t
ttgaatacctctttacttacaaattatccaaaaacggacttctacggtaatagcataaccggtaaagccgccgccggagcggtacagagcagtgtaacaaccgtcagcgggatttatatcgaaacgtcggtaaatgacagcggaaggggaagcgttaaactgtcgcctgagactagtacagccgatggtcttgttacttcaacttcggttacgattacggcaaccccggtaagcagtgagtactatttagcgtactggctggtaaacggggaaaaaagtacagttacatcaacgcaattaccgctgacatctcatgcaagagtaaaggcggtatttggaaaagatttcacagtcacaaattttacggatgatggttacacatcgggaactttacgccaagcaattaacgccgcgattgacggggataagatcatcataggcggaacagcaggacaacagaccatcgcgttggaaggcaataataccataaccataaacaagagcattaccatagagggaaacggcgtaaccataacgggggcaagctcgtgggggtcgtcgtattacgggtttctgtatatcaacagaagtacagtaaccataagacgtgtctggttcaaggacggtacaacatataatgaaggaggggctatctataattcctccggaaatgtaacattggaatcctgcatattcagcgggaaccggagtaattatagttatggtggaggcggtgctatatacaattataacggaaccatgaacatcaaagcctgtaccttctatggtaacagtgctataaatgtcggcggggcgatttataataataatagtaatgacagcgctttgacccttacagggaacctattctacgggaacaccgcctcttcatgtccggtggtggggtattacaacggaacatcaaccggctacaacgtggttgacgttccattgggaacagatgattcaacattaagcggctggacagcagtaaccggagacaagcaaatttccacctttcccgtatccggaaaaacatttaaacttctttccggcggcggggcggcaaatgttattactactttgcctgcaaattatccaaaaactgacttctacggcaacactataaacaacggagccgccgccggagcagtacagtccaatgcaagcggcgggtattacgttgaaatttcggttaatgataacaccaaaggcagagttaacccatcgccttcacccaatgccgatggtcttgtttcaggttcagttacgtttacagcaacacccgacagtggttacgctttgtcgtactggcttgtaaatggagtcaaaacgggactacaaattcgttaa

SEQ ID NO: 32086 - protein, 450 aa, Unknown
  Obtained from environmental sample
  misc_feature (1)..(450): Xaa is any amino acid
MNTSLLTNYPKTDFYGNSITGKAAAGAVQSSVTTVSGIYIETSVNDSGRGSVKLSPETSTADGLVTSTSVTITATPVSSEYYLAYWLVNGEKSTVTSTQLPLTSHARVKAVFGKDFTVTNFTDDGYTSGTLRQAINAAIDGDKIIIGGTAGQQTIALEGNNTITINKSITIEGNGVTITGASSWGSSYYGFLYINRSTVTIRRVWFKDGTTYNEGGAIYNSSGNVTLESCIFSGNRSNYSYGGGGAIYNYNGTMNIKACTFYGNSAINVGGAIYNNNSNDSALTLTGNLFYGNTASSCPVVGYYNGTSTGYNVVDVPLGTDDSTLSGWTAVTGDKQISTFPVSGKTFKLLSGGGAANVITTLPANYPKTDFYGNTINNGAAAGAVQSNASGGYYVEISVNDNTKGRVNPSPSPNADGLVSGSVTFTATPDSGYALSYWLVNGVKTGLQIR

SEQ ID NO: 32087 - DNA, 957 bp, Unknown
  Obtained from environmental sample
  misc_feature (1)..(957): n is a, c, g, or t
gtgagccttgaagtacgccagacagccgagcgggaaatacaacgataccaggctaaaaccggcctgcccataaataccattttgaagtatgcgggaataccggaacggacatggtatgaatggtcagagcggtgcggggccgagacgaagcacaacaacaacatccccaaggcatattacttgacgccggaagaaatcaaggcgatagtcgcttattgcaccgacaaccccctgaaaggctaccggatgcagtgttgggaaatggtagacaaaaatgtggcgtttgtgtcctgtagcagcgtctataacgtcataaaacgccataatttagacaaaaaatgggcggaattggctgaagaggcgaagaaaggttttgaccagccgcaggcggttcacgagcagtggcacatagatttttcttacatcaagatacaaaactcgttttattattttataggcatccttgacggctacagccggaagatgcttgactggaggctttgncaaaacatggagggcattaatgctgaaatactggttgccgaaactaaagagatgtaccctgaagcggacagaccgcggctgataagcgacaacggcagccagttcatatcaaaagattttgaagagctgcttgcgctcttggaattctcccacacgcttacatcggcgaaccacccgcagagcaacggcaagctggaacggttccatcgcaccttgaaaactgaacacgtaaggagggcatcgtatttagaatatcaagacgcctgcataaggctggcagaatggatcgtgtattacaacagcgagaggctccacggcgcgatctggtatctaacgcctaatgacattttttacggtcgggcggcgggacggcttgcagagcgcaaagaaaaattgcatactgcatttatcaagagacaggaatactggcagacacgaaccgccgtttcctga

SEQ ID NO: 32088 - protein, 318 aa, Unknown
  Obtained from environmental sample
  DOMAIN (127)...(286): Integrase core domain
  misc_feature (1)..(318): Xaa is any amino acid
MSLEVRQTAEREIQRYQAKTGLPINTILKYAGIPERTWYEWSERCGAETKHNNNIPKAYYLTPEEIKAIVAYCTDNPLKGYRMQCWEMVDKNVAFVSCSSVYNVIKRHNLDKKWAELAEEAKKGFDQPQAVHEQWHIDFSYIKIQNSFYYFIGILDGYSRKMLDWRLXQNMEGINAEILVAETKEMYPEADRPRLISDNGSQFISKDFEELLALLEFSHTLTSANHPQSNGKLERFHRTLKTEHVRRASYLEYQDACIRLAEWIVYYNSERLHGAIWYLTPNDIFYGRAAGRLAERKEKLHTAFIKRQEYWQTRTAVS

SEQ ID NO: 32089 - DNA, 915 bp, Unknown
  Obtained from environmental sample
  misc_feature (1)..(915): n is a, c, g, or t
atgaccgcgccgctttttccgcatatgctttttacggagacggtcgatcaatggaaaaaaaataataattcacgtccttattgggtttatacaaaagaagaaatagaaaatttaaaccaaatatctgattatcaaatttcttttttgcttaataacgatattcttgcgtattatggccatcccggttcgcgtaacatgggaattttaggccgctattcaattgaagagctggacagattgctgaccacccttgccgcagagtacgaaaaagttaatggcgggcgaaaagtgcgtaaggctttttatttgatttatgggactgtttggcccaagggcgaaatagggataatcggggataaagctcttatgccgtatatcgagtatggtatgaagaacgatatattggtttttattgatcatcaaattggccgttatgatccgatagactcactaaaaaaaatgctgccgtatttacgctatccaaatgtacatcttgcccttgatcctgaatggcggacgacaactccgatggtagatattggtagcatcaaagcggaagaaattaacacggcgcaacaagtaatggaaaaatatatgatagataataatattcccggtgagcgtatgcttgttattcatcaatttaatcacaagatgatttcagatcgcgcacaggttaaaaacaattataacagagtcagactgattcattgcgccgatggttttggtccccctgaaatgaaacgcggcacttacgattacaatgcgcttgcttccaatatgccgattaaggcttttaaactgttttacaattttggaataccgggcgcgggttatgaccatcctctgatggcgccaagtgacgtatacaaacttaaatccgcggccttatatcattatgtatcaatagggtaa

SEQ ID NO: 32090 - protein, 304 aa, Unknown
  Obtained from environmental sample
  misc_feature (1)..(304): Xaa is any amino acid
MTAPLFPHMLFTETVDQWKKNNNSRPYWVYTKEEIENLNQISDYQISFLLNNDILAYYGHPGSRNMGILGRYSIEELDRLLTTLAAEYEKVNGGRKVRKAFYLIYGTVWPKGEIGIIGDKALMPYIEYGMKNDILVFIDHQIGRYDPIDSLKKMLPYLRYPNVHLALDPEWRTTTPMVDIGSIKAEEINTAQQVMEKYMIDNNIPGERMLVIHQFNHKMISDRAQVKNNYNRVRLIHCADGFGPPEMKRGTYDYNALASNMPIKAFKLFYNFGIPGAGYDHPLMAPSDVYKLKSAALYHYVSIG

SEQ ID NO: 32091 - DNA, 498 bp, Unknown
  Obtained from environmental sample
  misc_feature (1)..(498): n is a, c, g, or t
gtgggagaaaacacttttggtaaaggatcggttcaacaggtttatccgttaaacggggcaggttttaaaataaccacagcccgttactataccccaagcgacgttaatattgataaaatcggtatcccgcctgatcgtgaaataaaatttcccgaatacacagaggcggacgcggaaaaactaaacatactgataaacgcgaataaaatccctgagtttgccgaaaaaaatccaaaggcgacacctgcgcaaatcgacacttttgcgcaaagtcttgaacgtgattataaaattaacctgtctctgcttaaacggcttatcaggaatgaattaaacagaacaactttcgctcccgtttatgacttggaatacgatgtccaactgcaggaagcgatgaaaatttttgagagtaaaacatatcaaaacttgatgcagaactcaaaaacattgaaggagctacaggaagaagccgagaaaaatctggctattgcttcttga

SEQ ID NO: 32092 - protein, 165 aa, Unknown
  Obtained from environmental sample
  misc_feature (1)..(165): Xaa is any amino acid
MGENTFGKGSVQQVYPLNGAGFKITTARYYTPSDVNIDKIGIPPDREIKFPEYTEADAEKLNILINANKIPEFAEKNPKATPAQIDTFAQSLERDYKINLSLLKRLIRNELNRTTFAPVYDLEYDVQLQEAMKIFESKTYQNLMQNSKTLKELQEEAEKNLAIAS

SEQ ID NO: 32093 - DNA, 837 bp, Unknown
  Obtained from environmental sample
  misc_feature (1)..(837): n is a, c, g, or t
ttgcgttctaacgcaagcaagagcagacaggcgacaagccgtaaaaaagtactggaaaaacttgatcttgaaaatattcccgtaccaagccgtaaatttccgtatgtcggttntaagccggatcgtgaaataggcaataatgttctgcgcgtggagaaattaaattactcttttgagggcaaagctctgttaaaagatttttcgctgacaataaataaaaacgaaaaaatagcttttgtaggtcttgaacactcctccaaatcagcgttatttgacattatttcaggcgttaaacaggctgaaagcggcgattgttattgggggcaaaccacgtccttttcctatttcccgaaagacaactcatctttctttgattccgatttatcaattacagactggttaagacaatattcccccgatcaggacgaaacttatgtccgcagttttttaggacgtatgctcttttctggcgaagaagctctaaagcccgtaaatgttctttcgggcggcgaaaaagtgcgttgtatgctctcaaggatgatgctatccggcgcaaacgtcttaattcttgacgagccgaccaatcaccttgaccttgaagctataacagctctaaacgacgggcttacatcattccccggcgtcatactttttaattctcacgatcacgaatttatcaattcaatagcgaaccgaattatcgaaatcctgccgcagggagaaagcccggaaagttacatagaccgcatgatgacctttgacgactatcttacggactcaaacgtaaaagaacttcgcagtgcagcgtatcaccatgtggaaagattgaggatttaa

SEQ ID NO: 32094 - protein, 278 aa, Unknown
  Obtained from environmental sample
  DOMAIN (74)...(240): ABC transporter
  misc_feature (1)..(278): Xaa is any amino acid
MRSNASKSRQATSRKKVLEKLDLENIPVPSRKFPYVGXKPDREIGNNVLRVEKLNYSFEGKALLKDFSLTINKNEKIAFVGLEHSSKSALFDIISGVKQAESGDCYWGQTTSFSYFPKDNSSFFDSDLSITDWLRQYSPDQDETYVRSFLGRMLFSGEEALKPVNVLSGGEKVRCMLSRMMLSGANVLILDEPTNHLDLEAITALNDGLTSFPGVILFNSHDHEFINSIANRIIEILPQGESPESYIDRMMTFDDYLTDSNVKELRSAAYHHVERLRI

SEQ ID NO: 32095 - DNA, 741 bp, Unknown
  Obtained from environmental sample
  misc_feature (1)..(741): n is a, c, g, or t
gtgcttgcccagcagttgggacgccagcctacagacgctgaatttaaccaggcgttaaaaaatgaaagcggcatggaattacccgcgttcagagaacagcttcgcaaacaaatgatagttcaaaaataccttctcgcgaaaaaagaacctttgcttaaatccataaaagaaccaaccgaagcggaaataatggagcagtacaatctggcaaaggcccagtttgtccgcccggagacaatccgtttttccatgattcaggttccgtacgggcctgactccgcttccagagcgaaagccagagatttggcaaatgcccttcttaaggaaataaattcagatccgtctaaattcgacgatgttgttacaaaaagccacgcgccgaactcgggttatttagccggagacggagggttccttccccgtaatcacgaagctttgaatatcgtcggacaaaattttatcaatatcgctttcagccttaaacagggtgaggtttccaaattaatcgaaggcaatcctggatatcaaataattaaagttacggaaaactattctatgaaaaatcttgatattgacgacataattcagcccggttccgccgtacgcgtcagggactatatcaaacaggctttaatgaatgaaaggcagcagtctattttagcgaaagcgtccgaagagttaatatcagatttaagaaaaggaaatccttttcggatatatgaaaataacctgaactggtaa

SEQ ID NO: 32096 - protein, 246 aa, Unknown
  Obtained from environmental sample
  DOMAIN (85)...(182): PPIC-type PPIASE domain
  misc_feature (1)..(246): Xaa is any amino acid
MLAQQLGRQPTDAEFNQALKNESGMELPAFREQLRKQMIVQKYLLAKKEPLLKSIKEPTEAEIMEQYNLAKAQFVRPETIRFSMIQVPYGPDSASRAKARDLANALLKEINSDPSKFDDVVTKSHAPNSGYLAGDGGFLPRNHEALNIVGQNFINIAFSLKQGEVSKLIEGNPGYQIIKVTENYSMKNLDIDDIIQPGSAVRVRDYIKQALMNERQQSILAKASEELISDLRKGNPFRIYENNLNW

SEQ ID NO: 32097 - DNA, 585 bp, Unknown
  Obtained from environmental sample
  misc_feature (1)..(585): n is a, c, g, or t
gtgtcctctgtggttattatttttcttcttttttttctgcttacgcctgtctttgcccaggagaccatggaattcaccattcctgagccggaaaggcgatcccttgcccctgaaaatccggaagaagttccccgccagttcagagaaattgcgctgggaatgtctttggaagagcttaaaacggcccttatcgccgataggctttttagtttccggggagatcgggacgtgtcttttttgcctgtacgcgaagagaccatggtggaaactaccgggctttcctatatcagacgcgcctttttccagcttactcagggagcggtctacatcatgtcattttcccttgacacaaggcagatagaccattattcggtttttaccagctttgtaaaaaagtacggggagcccgttgatctcagtccgaccgaggcggtgtgggaatctgagaataccagggtttccattgaaaggcccctgacggtcaagtacatcgacaagacggtctttaaccgcctgcttgaagagtcaaagacccgcgacagccaggaagctttacgcagggagagtttccttggcgatttttaa

SEQ ID NO: 32098 - protein, 194 aa, Unknown
  Obtained from environmental sample
  SIGNAL (1)...(19)
  misc_feature (1)..(194): Xaa is any amino acid
MSSVVIIFLLFFLLTPVFAQETMEFTIPEPERRSLAPENPEEVPRQFREIALGMSLEELKTALIADRLFSFRGDRDVSFLPVREETMVETTGLSYIRRAFFQLTQGAVYIMSFSLDTRQIDHYSVFTSFVKKYGEPVDLSPTEAVWESENTRVSIERPLTVKYIDKTVFNRLLEESKTRDSQEALRRESFLGDF

SEQ ID NO: 32099 - DNA, 603 bp, Unknown
  Obtained from environmental sample
  misc_feature (1)..(603): n is a, c, g, or t
atggcgacgaccggcaaggaacttgaggcgacccttgcccgcctcgcagcgatgagccgcgccgtgggcatacacctggttctggcgactcagcgtccctcaattgacgttatcaccggcctaatcaaagccaatatcccaagccgcatcgcctttatggtcgccaacaagattgacagccgcatcatcatcgacgcggtgggcgcggaaaaacttctgggcaagggcgatatgctctacgcgggaatcacggatccctttccgatccgcatgcagggagcctttgtatccgaagaagaagtcgaggcggttgtcgcccatgttaaaacattcggcggaccggattatattgacgatgaaatattttttgacgaggaagaagaggaagccgagccgtctcttttttccggcgccgatgatcccctgtacgaaaaggccctggagatcgtgcttcaacagggaaaggccagcgccagttacatacaacgccgcttgaaaatcggctacaaccgctccgcccgcctggtagaagaaatggaacacaggggcgtcgtcggcccggctcaagggtccaagccgagggaactgctgcggggagtgtaa

SEQ ID NO: 32100 - protein, 200 aa, Unknown
  Obtained from environmental sample
  misc_feature (1)..(200): Xaa is any amino acid
MATTGKELEATLARLAAMSRAVGIHLVLATQRPSIDVITGLIKANIPSRIAFMVANKIDSRIIIDAVGAEKLLGKGDMLYAGITDPFPIRMQGAFVSEEEVEAVVAHVKTFGGPDYIDDEIFFDEEEEEAEPSLFSGADDPLYEKALEIVLQQGKASASYIQRRLKIGYNRSARLVEEMEHRGVVGPAQGSKPRELLRGV

SEQ ID NO: 32101 - DNA, 837 bp, Unknown
  Obtained from environmental sample
  misc_feature (1)..(837): n is a, c, g, or t
gtggcgatagtcagcgccgtgccacaaaccactagaaacgccgtccggggcatactcacacgtcctgaagggcagctggtttttgtggatacgcctggccggcacgtttcggataaaaagttcaacaaaaagctcatggatatttctgatcgtgctctggatgattcagaactggttctctacgtgcttgacgccagccgttctccagggccggaggaagaagcggtggctgagcggcttaaggggtttcaggacagaaccgtcgccgtaattaacaagtgcgacgcttcgggagcggatccaaaaaagctaatggattttcttgaaaaatccctgcccggccttccggcatcccgccgctttgaaatttcctgttacaaaaaagaaggaatccagccgcttcttgcctgcctttttgaaatggcggatgcgggtgagcctttatatcccgaagaatattacacagatcaggaagtttctttcagaattcaggagattattcgggaaaaagccatgctaaggcttagggaagagctgccgcactcgatctacgtggaagtggcggatctggaatttcgcgagatcccgtctcacgccggaaataccgagccaggaaaaaagcgcctttgggtgcgggctttcatcatcaccgagagggaatcccaaaagggcatgatagttggaaaaggcggtgaaatgatcaaagccataggccaggccgcgcgaaaagaacttaactccattttcgagtggaaagttgatttggatctgcgcgtgaagacagggaaggactggcggcataacgacagaatattaaaaaaaatacaggggaattaa

SEQ ID NO: 32102 - protein, 278 aa, Unknown
  Obtained from environmental sample
  DOMAIN (2)...(95): GTPase of unknown function
  misc_feature (1)..(278): Xaa is any amino acid
MAIVSAVPQTTRNAVRGILTRPEGQLVFVDTPGRHVSDKKFNKKLMDISDRALDDSELVLYVLDASRSPGPEEEAVAERLKGFQDRTVAVINKCDASGADPKKLMDFLEKSLPGLPASRRFEISCYKKEGIQPLLACLFEMADAGEPLYPEEYYTDQEVSFRIQEIIREKAMLRLREELPHSIYVEVADLEFREIPSHAGNTEPGKKRLWVRAFIITERESQKGMIVGKGGEMIKAIGQAARKELNSIFEWKVDLDLRVKTGKDWRHNDRILKKIQGN

SEQ ID NO: 32103 - DNA, 675 bp, Unknown
  Obtained from environmental sample
  misc_feature (1)..(675): n is a, c, g, or t
ttgcaatcgaatcctcttaaaaataatcttggttttgcatttatcccattttgcaggaggattcaaatgaaaatcagttttaagcttacggcgattatgtttgtgttgagccttttcagcataggtacggtcagtgttgttcttcttacccgttcccgttcagctatttctgatcttacgacaaagtatgccaccaccattgcaaaagaatcctcgcttgaaatttccaaatttcttgaaacttactggtctacagcggagaccactgcgcagatattgaagcagtaccaatcaatgattgtcgctaatagaaggagattttttaatatcatactccgcgggttgttagaagaaaatccggaacttatcggcgtctggagcatctgggaacctaatactcttgaaggcaacgacagggaatacattgggactgccggaaccaatcctgacgggcgctttgcttcctattggtatagaacaagcttggggatgcagaatatccccctggtagattttgatgtgggggcggcgggagattgctattttctggccagagacacgggacgtataacggttatggatccttacgaatacgaactggacgggaaaactgtgctaatgactacggttgccgctcccattcgcgggccggacagaaaggtctcggccatctga

SEQ ID NO: 32104 - protein, 224 aa, Unknown
  Obtained from environmental sample
  misc_feature (1)..(224): Xaa is any amino acid
MQSNPLKNNLGFAFIPFCRRIQMKISFKLTAIMFVLSLFSIGTVSVVLLTRSRSAISDLTTKYATTIAKESSLEISKFLETYWSTAETTAQILKQYQSMIVANRRRFFNIILRGLLEENPELIGVWSIWEPNTLEGNDREYIGTAGTNPDGRFASYWYRTSLGMQNIPLVDFDVGAAGDCYFLARDTGRITVMDPYEYELDGKTVLMTTVAAPIRGPDRKVSAI

SEQ ID NO: 32105 - DNA, 1131 bp, Unknown
  Obtained from environmental sample
  misc_feature (1)..(1131): n is a, c, g, or t
gtgcaggtgatgtttgagatatacgcctcattgggaggaacggtagaaacccttgaacccaacgcgttctacttgcggcttggcaatatcaccgattccatgattcccgttgaacaggcaaagaagatcagggcctcgatactgtttgccggcccgcttctcgcccgcaccggcaaggtgatgctgccgccgcccggaggggacgttataggcagacggcggctggacacacatttcctcgcccttacggaactgggggccaaggtaaaaaccaaagatacatttacctttagcgcgaagtcgctgaaaggcgccgatatttttttggacgaggcgtctgttaccggcactgaaaacgccataatggcggcggcgcttgcggagggaaaaacaatactgaccaacgcagccggcgagccgcatgtgcaggacctctgccgtatgcttgttttgatgggagcgcagatcgaaggcatcggttcaaacatactgactatcaccggggtaaaaagactttccggttgcgattatacaataggggccgattacatggaagtgggttcttttatagggcttgccgccgtcaccggaggggatctccatatagaaggaacccacccccaggatctgcgtccggcgaaaatcgcctttggcaagctgggcatttcctgggcgcatgagggaacaaccatccatgtcccccagaaacagccgatggaggttaactgcgacttagggggcatgattcccaagatagacgacgcgccctggcccggcttcccccccgaccttaccagcattatcaccgtcgtagccacgcaggtaaaaggtactgtgttaatccatgaaaaaatgtttgaatcgcggatgttctttgtggacaagctcatcggcatgggggcgcggatagtgttatgcgatccccaccgggctgtggtttccggtcccgcgaaactgcacggctccgagcttattagcccggatgtccgcgccggcatggctatgcttatagccgccctctgcgccgagggcaggagcgttatacgcaacgtctaccagattgagcgcggctacgagcgcctggtagaaaggctttccgccctgggagcattaataacgaaagaagaatga

SEQ ID NO: 32106 - protein, 376 aa, Unknown
  Obtained from environmental sample
  DOMAIN (7)...(365): EPSP synthase (3-phosphoshikimate 1-carboxyvinyltransferase)
  misc_feature (1)..(376): Xaa is any amino acid
MQVMFEIYASLGGTVETLEPNAFYLRLGNITDSMIPVEQAKKIRASILFAGPLLARTGKVMLPPPGGDVIGRRRLDTHFLALTELGAKVKTKDTFTFSAKSLKGADIFLDEASVTGTENAIMAAALAEGKTILTNAAGEPHVQDLCRMLVLMGAQIEGIGSNILTITGVKRLSGCDYTIGADYMEVGSFIGLAAVTGGDLHIEGTHPQDLRPAKIAFGKLGISWAHEGTTIHVPQKQPMEVNCDLGGMIPKIDDAPWPGFPPDLTSIITVVATQVKGTVLIHEKMFESRMFFVDKLIGMGARIVLCDPHRAVVSGPAKLHGSELISPDVRAGMAMLIAALCAEGRSVIRNVYQIERGYERLVERLSALGALITKEE

SEQ ID NO: 32107 - DNA, 504 bp, Unknown
  Obtained from environmental sample
  misc_feature (1)..(504): n is a, c, g, or t
atgggagatagcagcgcttgggtcactacgatgctcgatttttatggcctgcccaatgattttcctgggcaaaacgaaatccgcgacacgaatgatgcgtacaaaaatgtcgagctgctcgaaacgcgctttgctgaagcattaggcaatgagcgtgaacgcttcatccctttcataacgctgttcgaattcgaggccctagttttcagttcgccaatggcggttgccgaccactttggattccccaggttggagggaactcttcaaggcatcatcgaaagtgccaagtcccctgaattgatagatggcggcgaaaacacgcacccaaagatgcggctgatgcaattgctcaaagagcaaaacgacgcttataattgggcgatagatggcccaagcatcctgcataaaataggcatccaaaaaatcagagacgcctgtccgcacttcaactcttggcttacgcgccttgaatcactggggactgccaagcaacgacaacaatga

SEQ ID NO: 32108 - protein, 167 aa, Unknown
  Obtained from environmental sample
  misc_feature (1)..(167): Xaa is any amino acid
MGDSSAWVTTMLDFYGLPNDFPGQNEIRDTNDAYKNVELLETRFAEALGNERERFIPFITLFEFEALVFSSPMAVADHFGFPRLEGTLQGIIESAKSPELIDGGENTHPKMRLMQLLKEQNDAYNWAIDGPSILHKIGIQKIRDACPHFNSWLTRLESLGTAKQRQQ

SEQ ID NO: 32109 - DNA, 603 bp, Unknown
  Obtained from environmental sample
  misc_feature (1)..(603): n is a, c, g, or t
gtgaagcctgaaaccgtgggcgcgggaagcgcagccccgggaagaccttcccgccgtgtcgcgctttttgacttcggcgcgaagcgggggatagcgagggcgctggcggcccgcggctgcgaggtgcggtatttttcgtataacgcgagcgcggatgagatactggcttttaaacctcatgggatcatgctgagtaacggcccgggggatccggcggaaccggccaataacggaattattgagacgcttcgcgttttacaaaagagcaaagtgacgattttcggcatttgccttggacaccagctgctcgctctggctaacggttatacgacgaagaagctcaagtttgggcaccgcggggccaatcagccggttaaagacacatcgacagggcgcgtgtacatcaccagccagaatcacggctacgccgtcgtgacagataacggctcgttcgtgaacgttaatgacggaacctgcgaaggcatggattacgggaattcgttttcggtgcagtttcaccccgaggcgtgcggcggcccgcttgatacggcttttctgttcgaccgttttatagagaggatggacaaaaatgtcactcgatag

SEQ ID NO: 32110 - protein, 200 aa, Unknown
  Obtained from environmental sample
  DOMAIN (16)...(175): Peptidase C26
  misc_feature (1)..(200): Xaa is any amino acid
MKPETVGAGSAAPGRPSRRVALFDFGAKRGIARALAARGCEVRYFSYNASADEILAFKPHGIMLSNGPGDPAEPANNGIIETLRVLQKSKVTIFGICLGHQLLALANGYTTKKLKFGHRGANQPVKDTSTGRVYITSQNHGYAVVTDNGSFVNVNDGTCEGMDYGNSFSVQFHPEACGGPLDTAFLFDRFIERMDKNVTR

SEQ ID NO: 32111 - DNA, 735 bp, Unknown
  Obtained from environmental sample
  misc_feature (1)..(735): n is a, c, g, or t
atgtcccacacngactataagtacccttttaaaaaaacacaacttaagcctcacctgaaaacatgctggtgtataccgcctgaacaaaacagcgcttttgtggcggcaatggaagatgttttagcggtttatgaacgcccttacgatgaaaacacgcctgtggtggatatggacgagaagccgtatcaattactggacgacacccgcgaatcgttaccggtgaaaccaggatcggcacagctggaagattatgaataccagcggaacgggacatgcagcatttttatattcaccgagcctctttcaggctggcgtcatgcacaagcctttccacagcggacaaaaaaagattgggcgcataggataaagtggctgcttgacgagcaatacagcaaagcggaaaaggtagtacttgtgatggataatctaaacacgcatacgatttcttcgctgtatgaggcatttccgcctgaagaagcgttccgccttgcaagacggcttgagattcattttacgcccaaacacgggagctggcttaacatagccgaaatagaattgtccgccatgactgcgcaatgtctgggaaagaggcggattcctgacataataaccttaaatgaagaagttgccgcttggcatactcgtcgcaatatgtctcaaaaaggagttgactggcagtttaccacaactgatgcgcgtatcaaactaaaaaggctttatcctgtaattatgtaa

SEQ ID NO: 32112 - protein, 244 aa, Unknown
  Obtained from environmental sample
  misc_feature (1)..(244): Xaa is any amino acid
MSHTDYKYPFKKTQLKPHLKTCWCIPPEQNSAFVAAMEDVLAVYERPYDENTPVVDMDEKPYQLLDDTRESLPVKPGSAQLEDYEYQRNGTCSIFIFTEPLSGWRHAQAFPQRTKKDWAHRIKWLLDEQYSKAEKVVLVMDNLNTHTISSLYEAFPPEEAFRLARRLEIHFTPKHGSWLNIAEIELSAMTAQCLGKRRIPDIITLNEEVAAWHTRRNMSQKGVDWQFTTTDARIKLKRLYPVIM

SEQ ID NO: 32113 - DNA, 498 bp, Unknown
  Obtained from environmental sample
  misc_feature (1)..(498): n is a, c, g, or t
gtgataggcgaacccggattgatacaggcgctatacgatgttggttttaccatgaacaatgtcaaccctgactacgtggtagtcggcgaaggaaggggctacagcctggaatcgctggaacgggcggtaaagctggtacttggcggggcaaggctcatcggaaccaatcccgacctttccgggccggtcgaggacggcattgtccccgcctgcggagcgctggttgcgcccatcgagcttgccacaaaaacaaaagcgtattttgtgggcaagcctaacccgcttatcatgcgccacgggctccgccgcctcaacagccagagagaagaaaccgccatcatcggggacaggatggacaccgacataatctccggcattgaaactgaaattgaaaccatacttgttttgtcgggagttacggcaatggccgaccttccgcaatttccatacaggccgaaacatattcttgaaggcgttttcgagattcctgaagcgtga

SEQ ID NO: 32114 - protein, 165 aa, Unknown
  Obtained from environmental sample
  misc_feature (1)..(165): Xaa is any amino acid
MIGEPGLIQALYDVGFTMNNVNPDYVVVGEGRGYSLESLERAVKLVLGGARLIGTNPDLSGPVEDGIVPACGALVAPIELATKTKAYFVGKPNPLIMRHGLRRLNSQREETAIIGDRMDTDIISGIETEIETILVLSGVTAMADLPQFPYRPKHILEGVFEIPEA

SEQ ID NO: 32115 - DNA, 867 bp, Unknown
  Obtained from environmental sample
  misc_feature (1)..(867): n is a, c, g, or t
atgcaaagtataggccaacccgtgattccttcggtaatcgcaaccgacgtgcaaacggcaatttctttcgccgatgaaatcggctaccccgtcattgtgcgtcccgccttcacgcttggcggttcgggcggaggcatcgcatctaacgaagcccagcttagggaaatcgccactaacggactgtcactctctccgatacatcagatattaaccgaaaaatccatcacgggctggaaggagatcgagtttgaagtgatgcgcgaccgcatgggaaacgtaatcacggtctgttcaatggaaaactttgatcccgtaggcatacacactggcgacagtatcgtaatcgcccccgccgtcacgctggctgacaaagagtaccaaatgctgcgttcagccgcgttaaatattatctgcgccctcggcgttgaaggcggctgtaacgtacaattcgccctgcataccgacagttttgagtacgcggtcattgaagtaaatccgcgcgtatcgcgctcctccgccctcgcaagcaaggcgactggctaccccatcgcaaaagtcgcgacaaaaatcgccattggctacacccttgacgagataataaacgccgttacgggaaatacattcgccgcctttgaaccgactcttgactatgtcgcggtgaagttccccaaatggccctttgacaaatttgtgtacgcccaaaaagagcttggcacccagatgaaagccacaggcgaagtcatggcaattgcggacacttttgaagaagcccttataaaagccgtgcgcggcgcggagataggccttaacagcctaaactgccgcgcctgtcngcaaaaacagacgatgaaatccgcgaccttttaa

SEQ ID NO: 32116 - protein, 288 aa, Unknown
  Obtained from environmental sample
  DOMAIN (1)...(227): Carbamoyl-phosphate synthase L chain, ATP binding domain
  misc_feature (1)..(288): Xaa is any amino acid
MQSIGQPVIPSVIATDVQTAISFADEIGYPVIVRPAFTLGGSGGGIASNEAQLREIATNGLSLSPIHQILTEKSITGWKEIEFEVMRDRMGNVITVCSMENFDPVGIHTGDSIVIAPAVTLADKEYQMLRSAALNIICALGVEGGCNVQFALHTDSFEYAVIEVNPRVSRSSALASKATGYPIAKVATKIAIGYTLDEIINAVTGNTFAAFEPTLDYVAVKFPKWPFDKFVYAQKELGTQMKATGEVMAIADTFEEALIKAVRGAEIGLNSLNCRACXQKQTMKSATF

SEQ ID NO: 32117 - DNA, 330 bp, Unknown
  Obtained from environmental sample
  misc_feature (1)..(330): n is a, c, g, or t
ttgcttgcgagggcggaggagcgcgatacgcgcggatttacttcaatgaccgcgtactcaaaactgtcggtatgcagggcgaattgtacgttacagccgccttcaacgccgagggcgcagataatatttaacgcggctgaacgcagcatttggtactctttgtcagccagcgtgacggcgggggcgattacgatactgtcgccagtgtgtatgcctacgggatcaaagttttccattgaacagaccgtgattacgtttcccatgcggtcgcgcatcacttcaaactcgatctccttccagcccgtgatggatttttcggttaatatctga

SEQ ID NO: 32118 - protein, 109 aa, Unknown
  Obtained from environmental sample
  misc_feature (1)..(109): Xaa is any amino acid
MLARAEERDTRGFTSMTAYSKLSVCRANCTLQPPSTPRAQIIFNAAERSIWYSLSASVTAGAITILSPVCMPTGSKFSIEQTVITFPMRSRITSNSISFQPVMDFSVNI

SEQ ID NO: 32119 - DNA, 822 bp, Unknown
  Obtained from environmental sample
  misc_feature (1)..(822): n is a, c, g, or t
atggacggccccgcatggatcagaaaaggctttaccccgtcggaactacaaaaaattcctgaccctgatacaagctgggtactctttgaatcaaagccgttgtggatttggaacgcgccattgccggatatacctaaacgcaaatatctttcaccctgggggacaaaagacgaagagtttaccatcattattccggtagaaatagacagcgaagccattgctttcctgaatagtaatagaacactattacccggaattttccttgcccacatcggtgataattgggagcttttcttcaacggaacactgatccgctcggaaatgcatctggatgaaacaggccggattacaagccaccgggcatggaagtatgtgcattttccggtggacagatcgctcataattcaggggacaaacatcctggccatgcggattgtcggagacccaacatattatggcacgggtgtttcttttaacgcgcctcattacatggacgatttcgcagtcattgaaaatcggcagttcaattttttgcatatagctttttgcggcatttttggtttttcaggcgtttactatctgatgcttttcctttcgataaaaaagaaaagcgaagcctattatctatgcttcagcatcttttcgattctgctctgcgtttattccgctgtactgcttatgctgaacttgccgtttttaaggcaagcatataaggtgtgtcaggatgcagacttttgtgtccgccagtattcctgtctcttgataaatgcagtgtgcaacttttctttgcgttctgcaagccgtctagccgccctgccgtaa

SEQ ID NO: 32120 - protein, 273 aa, Unknown
  Obtained from environmental sample
  misc_feature (1)..(273): Xaa is any amino acid
MDGPAWIRKGFTPSELQKIPDPDTSWVLFESKPLWIWNAPLPDIPKRKYLSPWGTKDEEFTIIIPVEIDSEAIAFLNSNRTLLPGIFLAHIGDNWELFFNGTLIRSEMHLDETGRITSHRAWKYVHFPVDRSLIIQGTNILAMRIVGDPTYYGTGVSFNAPHYMDDFAVIENRQFNFLHIAFCGIFGFSGVYYLMLFLSIKKKSEAYYLCFSIFSILLCVYSAVLLMLNLPFLRQAYKVCQDADFCVRQYSCLLINAVCNFSLRSASRLAALP

SEQ ID NO: 32121 - DNA, 330 bp, Unknown
  Obtained from environmental sample
  misc_feature (1)..(330): n is a, c, g, or t
atgtctccggaatcgggcaggataaacgaatcgaatgatatactggcggttcgtctgtcagaacccagggataagcttttgataaggcaggtgagcggggctgttgcccgccgtattgtctgcgaggccagggaagccgccgaatatcgtcagggcgaacagttcgggatgattaaattcggttccaggacggaactttaccttcccctgggtgaaggtaaagtcgaggacgggactttcacgaacggcacattcgaggtaacggtaaaaatcggcgatcctgtccgcgccggacttaccccccttgtcaggtaccttcaggaaaaataa

SEQ ID NO: 32122 - protein, 109 aa, Unknown
  Obtained from environmental sample
  misc_feature (1)..(109): Xaa is any amino acid
MSPESGRINESNDILAVRLSEPRDKLLIRQVSGAVARRIVCEAREAAEYRQGEQFGMIKFGSRTELYLPLGEGKVEDGTFTNGTFEVTVKIGDPVRAGLTPLVRYLQEK

SEQ ID NO: 32123 - DNA, 678 bp, Unknown
  Obtained from environmental sample
  misc_feature (1)..(678): n is a, c, g, or t
ttggactgggataacgttgctagttatgacaaagacgatggcgacctgattttagggaccgcgacggcggcatttgacggaacaaacggtcggtatcaggagaccgttatgggcaatttcaccatggacggcctcgcggaatacgccaggtatatttcaggagaaagaattgattttgcattgcacaacgactcgttcatgagaaacaaccccaccctgtctgccggtgaaattttaaattccgacattaccggtatttctggtatgactgacacattggttgtcgctacttttaccggcaaacaggtcaaagacgtgattgatggatttgtaaatagctcttccaccggttcctggaacaggaactgcgccgttatagtttccaaagaactcagctataccattgatatgactacgaatccgccgcatgctgccaatgtcaaggtaaatgacgccgctattgttgaggacagggactaccggatagccgtcggtaatttcattggagataatacagctgccggtcgtttcttgcccgtattggatgctgaaaaaaagaccaaatacacgacaactgtaagtcaggcggttgccatgtatgtgttggctaaaggaacgatcgatccttccgattatcctttaggcaggtataccggcgtagtaccggaattgcaataa

SEQ ID NO: 32124 - protein, 225 aa, Unknown
  Obtained from environmental sample
  DOMAIN (17)...(179): 5'-nucleotidase, C-terminal domain
  misc_feature (1)..(225): Xaa is any amino acid
MDWDNVASYDKDDGDLILGTATAAFDGTNGRYQETVMGNFTMDGLAEYARYISGERIDFALHNDSFMRNNPTLSAGEILNSDITGISGMTDTLVVATFTGKQVKDVIDGFVNSSSTGSWNRNCAVIVSKELSYTIDMTTNPPHAANVKVNDAAIVEDRDYRIAVGNFIGDNTAAGRFLPVLDAEKKTKYTTTVSQAVAMYVLAKGTIDPSDYPLGRYTGVVPELQ

SEQ ID NO: 32125 - DNA, 474 bp, Unknown
  Obtained from environmental sample
  misc_feature (1)..(474): n is a, c, g, or t
atggactccccaatccggataggcgtggtaacagtttccgacagggcctacatgggcgagttcgaggactgctccagcccagagattatcgccgcgctgaacgactaccttctgtcccagtggcacccgattgtccgcgtggtctcagaggacgcagcgaccattgaagagacgctgaaagaaatgtgcgacgtggagggctgctgcctcgtcctcacatccggcggcaccggcccgacaaaaaaggacgtcacgcccgacgccacgatggccgtatgcgaccgcattttggacggctttggcgaaaggatgcgggccgactcgctgctcaccttcccaggcgccattctgagccgtcaactggccggggtcaggggctggactttgattatcaacctgccaggcaggccgggctacatccgggggtgcctggattccgtgttccccgccgtgcccactctcggccgaatctga

SEQ ID NO: 32126 - protein, 157 aa, Unknown
  Obtained from environmental sample
  DOMAIN (8)...(153): Probable molybdopterin binding domain
  misc_feature (1)..(157): Xaa is any amino acid
MDSPIRIGVVTVSDRAYMGEFEDCSSPEIIAALNDYLLSQWHPIVRVVSEDAATIEETLKEMCDVEGCCLVLTSGGTGPTKKDVTPDATMAVCDRILDGFGERMRADSLLTFPGAILSRQLAGVRGWTLIINLPGRPGYIRGCLDSVFPAVPTLGRI

SEQ ID NO: 32127 - DNA, 1638 bp, Unknown
  Obtained from environmental sample
  misc_feature (1)..(1638): n is a, c, g, or t
ttgggtgggattgccatcgtagaatggtcggttcaaaaactgctcgcctgcggtattgagaaaataattatcggcactggctaccacgccgaagcttacaatgaacttgcaaaaaaatatcctgcgatacaaaccgtttttagcgccgactatgaaacaaccgggagtatggccacattaagcgtatgcgccccctttgtaaccggagattttctgctgttggaatccgaccttatctatgacggcatcggtctttccgtcctttgcaacgatattcatgaaaatgttattctagcttcaggcgcgaccaattcaggcgatgaggtatatttagaagcagttaacggttcttttttaaagtcgctttcaaaaaacaaaagcgaacttgcttcaacttatggcgaacttgttggaatcacaaaaatttctccagcgctcctttctactatgtgcgcatattatgaaaaaaaacgcgctgagttaccaaaacttgattatgaacgcgcaataatgacgtgcactgacaaacataaagtttttatccgcaagattgaatattacgcgtggcgcgaaattgatgatgatagccatcttgaaatggcacagaataaaatcctgccgcttattcaagaaaatgaatcgttacgccaaatacgccgcgaagtcctgttaaatcccggacccgctacgacaagcgacagcgttaaatatgcgcaagtatgcgccgacatctgtccccgtgaaaaagaattcggcgacgtgatgaaatggatatgcagcgagcttacatcagttgtcgcagatctgtccgaatacgaaacggtatttttcggcggctccggcactgccgccgatgaggtaatgatttcatcctgcattccagaaaacgggcatatccttattgttgataacggctcttacggccagcggcttgcgaagatcgcctctgtttataaaattaaccataccgtttttaaaagttccacttatgaaaaaatcgatataaacgctcttgaaaatgaatttaaaacaggaaaatatacccaccttggcattgtataccacgaaaccacaaccggcttgctcaatccccttgacgtaatatgtccgcttgcgaaaaaatacaacatagttacgatagttgacgcggtaagcatctacgcgggaatgccgatggaactttccaaacttggcattgattttatggcttccacttcaaataaaaatattcagggaatggccggcgttggttttgttatctgcaaaaaaagcgagcttgagaaaacaaaaaatattcccatgcggaattattatcttaacctttatgatcaatacgcgcactttaccaaaacaggacaaacccgttttactcctcccgtacaaacgctttacgcgctcaggcaggcgattcttgaaacaaaacaggagacggtggaaaaaagatgggaacgttataccgaatgctggcgtattcttgttgaagctgttaaaaaatttaatttgaaaatgcttgttaaagaagaagaccagtctcatttaataaccgcaatttttgaccctgaaacgccaaaatacagttttgaggacttgcatgatcttgcccgtaaacacgggtttacaatttatccggggaaatag

SEQ ID NO: 32128 - protein, 545 aa, Unknown
  Obtained from environmental sample
  DOMAIN (221)...(539): Aminotransferase class-V
  misc_feature (1)..(545): Xaa is any amino acid
MGGIAIVEWSVQKLLACGIEKIIIGTGYHAEAYNELAKKYPAIQTVFSADYETTGSMATLSVCAPFVTGDFLLLESDLIYDGIGLSVLCNDIHENVILASGATNSGDEVYLEAVNGSFLKSLSKNKSELASTYGELVGITKISPALLSTMCAYYEKKRAELPKLDYERAIMTCTDKHKVFIRKIEYYAWREIDDDSHLEMAQNKILPLIQENESLRQIRREVLLNPGPATTSDSVKYAQVCADICPREKEFGDVMKWICSELTSVVADLSEYETVFFGGSGTAADEVMISSCIPENGHILIVDNGSYGQRLAKIASVYKINHTVFKSSTYEKIDINALENEFKTGKYTHLGIVYHETTTGLLNPLDVICPLAKKYNIVTIVDAVSIYAGMPMELSKLGIDFMASTSNKNIQGMAGVGFVICKKSELEKTKNIPMRNYYLNLYDQYAHFTKTGQTRFTPPVQTLYALRQAILETKQETVEKRWERYTECWRILVEAVKKFNLKMLVKEEDQSHLITAIFDPETPKYSFEDLHDLARKHGFTIYPGK

SEQ ID NO: 32129 - DNA, 891 bp, Unknown
  Obtained from environmental sample
  misc_feature (1)..(891): n is a, c, g, or t
ttgaaaattattaacaaatcatcaaaactcgacaatgtttgctatgatatccgtgggcccgttctcaaagaagcgaagcgccttgaggacgagggatgcaggattaccaagctgaacatcggcaaccccgcggctttcggctttaacgcgccggaagaaatcatccatgatatggcgcgcaatctgcagaacgcgcagggctacggcgattcacacgggctgtttgccgcctgcaaggcggtgatgcaggactttcagctcaagggcgtgatggatgtcgggatagacgacatattcatcggcaacggggtaagcgagctgatagtaatggcaatgcaggctcttttgaattcgggcgaggaagtgctggttcccatgcccgactaccccctttggaccgcggccgtgacccttgcggggggcagggcggtacactacctttgcgacgagggcgcgaactggaaccccgatcttgacgacatacgttcaaagatcagttcaagaaccagggctattgttgttatcaaccccaacaaccccacgggcgcggtgtacgagcgttccatcctggaaggcatcgccaatatcgcccgtgagaataaccttatcgtatacgccgatgaaatctacagccggattacctatgacggcgccgttcatattcccatgtcaacgatagccccggatattcttaccgtgagttttgacggcctttcaaaagcctggcgcgccgcgggtttccgcgccggatggctggttctttccggggacaaaaaaggcgcggcaagttatatagaaggcattgagatgcttgccagcatgaggctctgcgcaaacatgccccccccaggtcggcatacaaaccgcgctcggcgggctacaaagcgttaa

SEQ ID NO: 32130 - protein, 296 aa, Unknown
  Obtained from environmental sample
  DOMAIN (33)...(294): Aminotransferase class I and II
  misc_feature (1)..(296): Xaa is any amino acid
MKIINKSSKLDNVCYDIRGPVLKEAKRLEDEGCRITKLNIGNPAAFGFNAPEEIIHDMARNLQNAQGYGDSHGLFAACKAVMQDFQLKGVMDVGIDDIFIGNGVSELIVMAMQALLNSGEEVLVPMPDYPLWTAAVTLAGGRAVHYLCDEGANWNPDLDDIRSKISSRTRAIVVINPNNPTGAVYERSILEGIANIARENNLIVYADEIYSRITYDGAVHIPMSTIAPDILTVSFDGLSKAWRAAGFRAGWLVLSGDKKGAASYIEGIEMLASMRLCANMPPPGRHTNRARRATKR

SEQ ID NO: 32131 - DNA, 642 bp, Unknown
  Obtained from environmental sample
  misc_feature (1)..(642): n is a, c, g, or t
atgagaggtacgtcgcagcagtccaacgacgtggaaacggtgctgcaggagatccgcgatgcgctgaagagggacttggccgacaacccgtttacagtcttgcgtacagagaacgtaggccccaaaatcggcggcgagctgacacgcgacgcggtcatagcctccgtcctggcgctcttggccatcctgatctacgtgggccttcgcttcaagctctcctacgccgtggccgcggtgatcccgctcttccatgacgtttgcgtggtgctcggcatcttctccatgatgaacttggagcttacgctacccttcttggcggcggtgctcacgatcataggctactccctaaacgacacgatcgtggtgttcgaccgtatccgcgagaacctgaaaggcggtttgcgcggcaaggtatttaacgaggcggtgaactccagcataaaccaaacgctctcgcgcaccgtcataacgtctataacgacgctcttcaccgtgctggcgctctacatattgggcagcgactcgatcaaagacttcgccctggcgctgacgataggcgtggtggtcggcacgtactccacgttgttcatcgctgtgtctttgctcgtttggtggcagaagaagtggccgtttgtgaagtga

SEQ ID NO: 32132 - protein, 213 aa, Unknown
  Obtained from environmental sample
  DOMAIN (21)...(208): Protein export membrane protein
  misc_feature (1)..(213): Xaa is any amino acid
MRGTSQQSNDVETVLQEIRDALKRDLADNPFTVLRTENVGPKIGGELTRDAVIASVLALLAILIYVGLRFKLSYAVAAVIPLFHDVCVVLGIFSMMNLELTLPFLAAVLTIIGYSLNDTIVVFDRIRENLKGGLRGKVFNEAVNSSINQTLSRTVITSITTLFTVLALYILGSDSIKDFALALTIGVVVGTYSTLFIAVSLLVWWQKKWPFVK

SEQ ID NO: 32133 - DNA, 300 bp, Unknown
  Obtained from environmental sample
  misc_feature (1)..(300): n is a, c, g, or t
ttgtcacttcacaaacggccacttcttctgccaccaaacgagcaaagacacagcgatgaacaacgtggagtacgtgccgaccaccacgcctatcgtcagcgccagggcgaagtctttgatcgagtcgctgcccaatatgtagagcgccagcacggtgaagagcgtcgttatagacgttatgacggtgcgcgagagcgtttggtttatgctggagttcaccgcctcgttaaataccttgccgcgcaaaccgcctttcaggttctcgcggatacggtcgaacaccacgatcgtgtcgtttag

SEQ ID NO: 32134 - protein, 99 aa, Unknown
  Obtained from environmental sample
  misc_feature (1)..(99): Xaa is any amino acid
MSLHKRPLLLPPNEQRHSDEQRGVRADHHAYRQRQGEVFDRVAAQYVERQHGEERRYRRYDGARERLVYAGVHRLVKYLAAQTAFQVLADTVEHHDRVV

SEQ ID NO: 32135 - DNA, 402 bp, Unknown
  Obtained from environmental sample
  misc_feature (1)..(402): n is a, c, g, or t
atgggtaagcagacaaacgcccccaaagaatggcggattctcgcggaacgagatatggcggctgccgaatacttggccaagatgtatccgccgctaaatgaaattatcgcttaccactgccaacaagcaacagaaaagtatctaaaaggcgttttggtcacattaggggaggaaccgccttacacacataaccttgatgaattgtgcgtatcggcggagaaataccgtccctcgttatctgccatattgtctttctgcacgaagatatcgcaatttgccgtgcaaccgcgatatgattttggcattagcctctccgatatggatatgcgcctcgtcttagagtatgcccgaaagatcaaggcctttttggaaaaagaagttccggagatgtttcaagattaa

SEQ ID NO: 32136 - protein, 133 aa, Unknown
  Obtained from environmental sample
  DOMAIN (8)...(126): HEPN domain
  misc_feature (1)..(133): Xaa is any amino acid
MGKQTNAPKEWRILAERDMAAAEYLAKMYPPLNEIIAYHCQQATEKYLKGVLVTLGEEPPYTHNLDELCVSAEKYRPSLSAILSFCTKISQFAVQPRYDFGISLSDMDMRLVLEYARKIKAFLEKEVPEMFQD

SEQ ID NO: 32137 - DNA, 324 bp, Unknown
  Obtained from environmental sample
  misc_feature (1)..(324): n is a, c, g, or t
atggatatgacaataaaagcggaatgggacaaactgccggaaatcatagtcaacgccgttccggtgaaacagattttcctttttggctcctacgcttacggtaccccgcatgttggctcagatttggatttatacgtagtgctaaaagacgatacaccgctcagggatatagatgccggtgtggagattaggacggcgatacttcgtaaaaagtcaatgccggtggatatcgtcgccaaaaagaaaaaggatttcttaaatcgattagacgacattaccctcgaacggaaaattattcgggagggggtgcggatttatgggtaa

SEQ ID NO: 32138 - protein, 107 aa, Unknown
  Obtained from environmental sample
  DOMAIN (9)...(99): Nucleotidyltransferase domain
  misc_feature (1)..(107): Xaa is any amino acid
MDMTIKAEWDKLPEIIVNAVPVKQIFLFGSYAYGTPHVGSDLDLYVVLKDDTPLRDIDAGVEIRTAILRKKSMPVDIVAKKKKDFLNRLDDITLERKIIREGVRIYG

SEQ ID NO: 32139 - DNA, 597 bp, Unknown
  Obtained from environmental sample
  misc_feature (1)..(597): n is a, c, g, or t
atgaaagagtacaaaggacagtacgccgtaacaaagatggccaatgtttttggggtaagccgcagcggatattacgcgtgggaaaagcggaaagtgtgtcggcgtgaggaagaagaccaaaacttgatttctataataaaacggatattcaaagaacaccacaggcggtatgggagtccaagggtctgggaagaattaaagaggataggctttcgagttggacggaaacgggtggaaaaactgatgcgaaagcaggaattaacagctcggcaacggaggaaatgggtaaatacgactgattccggtcacaagttggcgacagcggataatatcctgaaccgtgagtttcatgcgtcgaatcccggagagaaatgggtgtcggacattacctatctgcgtacagataaggggtggctgtacttaaccgcggtacttgatttgtgggacaggaaagtaattggctggtcaatttcaaaagaattaacggctgaacaaacttgtctcgctttaaggatggctgttatgaaccgccctccgcgggaaggactcatatttcattccgaccgcgggattcaatacgcaggacctcggccataa

SEQ ID NO: 32140 - protein, 198 aa, Unknown
  Obtained from environmental sample
  misc_feature (1)..(198): Xaa is any amino acid
MKEYKGQYAVTKMANVFGVSRSGYYAWEKRKVCRREEEDQNLISIIKRIFKEHHRRYGSPRVWEELKRIGFRVGRKRVEKLMRKQELTARQRRKWVNTTDSGHKLATADNILNREFHASNPGEKWVSDITYLRTDKGWLYLTAVLDLWDRKVIGWSISKELTAEQTCLALRMAVMNRPPREGLIFHSDRGIQYAGPRP

SEQ ID NO: 32141 - DNA, 303 bp, Unknown
  Obtained from environmental sample
  misc_feature (1)..(303): n is a, c, g, or t
atgagaaaaagaaaagagtacacaaaggagttcaaggaatcagcaatagaactctatcaacgcggcggcgacaggaccaaaaaggaagtcgcggaaggattaggaatcagccccgagaacctcaggcgctggctgagcgaaagaaagaaagcggaaaatacaaacattcgtgtatttcccgggcgagggaatgcccgtgacgaagaagtagcacgactgaagaaagagaatgaggatcttcgggagtcgaatgaaatcctaaaaaaagcaatggccttctttgtagtaaaaaccccacgatag

SEQ ID NO: 32142 - protein, 100 aa, Unknown
  Obtained from environmental sample
  DOMAIN (4)...(87): Transposase
  misc_feature (1)..(100): Xaa is any amino acid
MRKRKEYTKEFKESAIELYQRGGDRTKKEVAEGLGISPENLRRWLSERKKAENTNIRVFPGRGNARDEEVARLKKENEDLRESNEILKKAMAFFVVKTPR

SEQ ID NO: 32143 - DNA, 549 bp, Unknown
  Obtained from environmental sample
  misc_feature (1)..(549): n is a, c, g, or t
ttgtgttcttctcttcctttgtgtcctgcgcactgtcggtcacctaaaggtgaccttgctttattacatacagcggcatttattggtgctacgctgtgcggcattattaatctacacggctacgccgtgcgtttatttagcgtgtgtgaactcttgcgtaataatcccttgcgtcaaattctagttttcattatatttaaaacaatcatgccaacttatgaatacgaatgtaaaagttgttcacataaatttgaagtttttcagtctataaatgatccgccaataaaagactgtcccgaatgcggcaaggaagtccgcaggctcatttttggcggaacaggcgtaatttttaaaggctcaggcttctatgtcaccgataaaaataaaagctccgctgataaagccggtaaaaaaacaaccgaaaccgaagcaaaacccgcacctgacacaaagcccaaaagtggcgaaagttctcagtcagcaccggctgcgcctgccccatgcagtgagtgtcctaaaaaaggcgtttccccctcctgtccggcgtaa

SEQ ID NO: 32144 - protein, 182 aa, Unknown
  Obtained from environmental sample
  misc_feature (1)..(182): Xaa is any amino acid
MCSSLPLCPAHCRSPKGDLALLHTAAFIGATLCGIINLHGYAVRLFSVCELLRNNPLRQILVFIIFKTIMPTYEYECKSCSHKFEVFQSINDPPIKDCPECGKEVRRLIFGGTGVIFKGSGFYVTDKNKSSADKAGKKTTETEAKPAPDTKPKSGESSQSAPAAPAPCSECPKKGVSPSCPA

SEQ ID NO: 32145 - DNA, 327 bp, Unknown
  Obtained from environmental sample
  misc_feature (1)..(327): n is a, c, g, or t
ttgaataaaaaaccgcgttttttttgcgattattgcgaaaatgaagtgggcagtgaagtaaaaaattgcccgtactgtggacgtgttttcgcctccgtccgttgccccatgtgcggttattccggtcaggacaggatgttccaaggcggttgccccatgtgcggctattcagcccctccgcctccaaaacagaagaaccaaaaaatgaagccgcctaaggttaaagagcaccatgtacacgaacctatccctttttggacttatgtcgtcacttttatcgctctttttactgtgattgcgtttctttcttattttattactaggtaa

SEQ ID NO: 32146 - protein, 108 aa, Unknown
  Obtained from environmental sample
  misc_feature (1)..(108): Xaa is any amino acid
MNKKPRFFCDYCENEVGSEVKNCPYCGRVFASVRCPMCGYSGQDRMFQGGCPMCGYSAPPPPKQKNQKMKPPKVKEHHVHEPIPFWTYVVTFIALFTVIAFLSYFITR

SEQ ID NO: 32147 - DNA, 882 bp, Unknown
  Obtained from environmental sample
  misc_feature (1)..(882): n is a, c, g, or t
atgaaaacaaagacctttataacaaataataaaaataataaaaccgatggcatctggaaagccgccggagtacatataaatgaaaacgcgaaattcacaatgaatggaggagaaatctccgacaatacaacaatcaatggcggcggaggtgtatgggtaaatggaacctttattatgaatgacggaaaaatctctaataacatagccaagggaaacagcggcggcggtgtgtggatttcaaagaggggaagatttaccatgaccggcggtgaaatctctgataataaagctttgggggaaaacggagatggcggtgaaggcggcggggtgcatatatgggataacgataaaaatgttggaacctttataatgaccggtgggaatattaccaacaatgaatccttagggtgcggcggtgtgtgtttgtattatggaaactttatcatgagcggcggaaaagtaaacggcaataaagcaaatacatggaaatgggccggcggcggggtatctgtaggtgaaggttcaaccttcaccatgagcggaggagaaatttccggcaatatcaccgaaggagacggcggcggcgtgcatataattggaaaagcggaattcacaatgaaaggcggagaaatccattccaataccgctgttaacgatggcggcggagtgagtatgtggggaggtaaaaatgaatatccaaaattcataatggaaggaggggtaatttctaacaatattgtcaagaatggaaacggcggcggagtaagtatgtatgcagagtctcccggtaccggaaccttcatcatggaaggcggaaaaatctcagacaataaggctttgacggcagcaaaaaaaatgaaagaggacatggcggcggaataa

SEQ ID NO: 32148 - protein, 293 aa, Unknown
  Obtained from environmental sample
  misc_feature (1)..(293): Xaa is any amino acid
MKTKTFITNNKNNKTDGIWKAAGVHINENAKFTMNGGEISDNTTINGGGGVWVNGTFIMNDGKISNNIAKGNSGGGVWISKRGRFTMTGGEISDNKALGENGDGGEGGGVHIWDNDKNVGTFIMTGGNITNNESLGCGGVCLYYGNFIMSGGKVNGNKANTWKWAGGGVSVGEGSTFTMSGGEISGNITEGDGGGVHIIGKAEFTMKGGEIHSNTAVNDGGGVSMWGGKNEYPKFIMEGGVISNNIVKNGNGGGVSMYAESPGTGTFIMEGGKISDNKALTAAKKMKEDMAAE

SEQ ID NO: 32149 - DNA, 441 bp, Unknown
  Obtained from environmental sample
  misc_feature (1)..(441): n is a, c, g, or t
atgtcctctttcattttttttgctgccgtcaaagccttattgtctgagatttttccgccttccatgatgaaggttccggtaccgggagactctgcatacatacttactccgccgccgtttccattcttgacaatattgttagaaattacccctccttccattatgaattttggatattcatttttacctccccacatactcactccgccgccatcgttaacagcggtattggaatggatttctccgcctttcattgtgaattccgcttttccaattatatgcacgccgccgccgtctccttcggtgatattgccggaaatttctcctccgctcatggtgaaggttgaaccttcacctacagataccccgccgccggcccatttccatgtatttgctttattgccgtttacttttccgccgctcatgataaagtttccataa

SEQ ID NO: 32150 - protein, 146 aa, Unknown
  Obtained from environmental sample
  misc_feature (1)..(146): Xaa is any amino acid
MSSFIFFAAVKALLSEIFPPSMMKVPVPGDSAYILTPPPFPFLTILLEITPPSIMNFGYSFLPPHILTPPPSLTAVLEWISPPFIVNSAFPIICTPPPSPSVILPEISPPLMVKVEPSPTDTPPPAHFHVFALLPFTFPPLMIKFP

SEQ ID NO: 32151 - DNA, 489 bp, Unknown
  Obtained from environmental sample
  misc_feature (1)..(489): n is a, c, g, or t
atgaccacgcccttcagcccgggcggcgccttgagcgacgagtcgcgcacgtcgccggccttctcgccgaagatcgccctcaaaagcctctcctcaggagacagctccgtctcgcctttgggcgttaccttgccgacaaggatatcgcccggctccacctccgtgccgatccttatcacgccgttctcgtcgagattgcgcaccgcgtcgtcgctgacgttgggaatttccctcgtgagctcctcaggcccgcgcttcgtgtcgcgcacctccgtctcaaagacctctatgtgcaccgacgtaaagacatcctcggccacgagcttctcggagatgattatggcgtcctcaaagttgtatccgcgccacggcataaaggccaccatcacgttcctgccgagggcgagttcgcccaaactcgtggcgtggccgtcggccagcaccgttccggcgtcgacatgctgcccctcccttatgcaaactttctga

SEQ ID NO: 32152 - protein, 162 aa, Unknown
  Obtained from environmental sample
  misc_feature (1)..(162): Xaa is any amino acid
MTTPFSPGGALSDESRTSPAFSPKIALKSLSSGDSSVSPLGVTLPTRISPGSTSVPILITPFSSRLRTASSLTLGISLVSSSGPRFVSRTSVSKTSMCTDVKTSSATSFSEMIMASSKLYPRHGIKATITFLPRASSPKLVAWPSASTVPASTCCPSLMQTF

SEQ ID NO: 32153 - DNA, 885 bp, Unknown
  Obtained from environmental sample
  misc_feature (1)..(885): n is a, c, g, or t
gtgactgtgaacacaaccaacgtgcctgttacgggcgtaacactcaacaaaacagtcacttcgattaacgttggcgcgtcggaaacactggttgccactgtcgcgccgagcaacgccacaaacaaaaccgtcacttggtcgagcagcaatacaggcatcgctacggtgaatggcggcacagtgacgggcaaagccgcaggaacagcgacaatcacggctacaactcaggatggcggcaagacggccacatgcgtggtgactgtgaacacaaccaacgtgcctgttacgggcgtaacactcaacaaaacagtcacttcgattaacgttggcgcgtcggaaacactggttgccactgtcgcgccgagcaacgccacaaacaaaaccgtcacttggtcgagcagcaatacaggcatcgctacggtgaatggcggcacagtgacgggcaaagccgcaggaacggcaacgattacagtcacaacccaagacggcaacaagacggccacatgcgcggtgactgtggaagattacgaggcacaatgggtgtcagtgaggggcgtgagcctgaacaaagcatcaaccagcatttcagtgggcgggacggaaacactcacagcaacagtcacgccaagtaacgctacaaacaagactgtaaactggtcaagcagcaatacaagcgttgccacagtgagcaatggcacggtgacaggcaaagccgtagggacagcgatgattacagtcactacccaagccggcaacaagacggccacatgcacggtgacggtgattgcggcatcatcccagaatataactgcgatcgctgcggggggaaaccattcgcatgccctcatgggcgacggcagccgttggggttgggggggccaatga

SEQ ID NO: 32154 - protein, 294 aa, Unknown
  Obtained from environmental sample
  DOMAIN (182)...(259): Bacterial Ig-like domain (group 2)
  misc_feature (1)..(294): Xaa is any amino acid
MTVNTTNVPVTGVTLNKTVTSINVGASETLVATVAPSNATNKTVTWSSSNTGIATVNGGTVTGKAAGTATITATTQDGGKTATCVVTVNTTNVPVTGVTLNKTVTSINVGASETLVATVAPSNATNKTVTWSSSNTGIATVNGGTVTGKAAGTATITVTTQDGNKTATCAVTVEDYEAQWVSVRGVSLNKASTSISVGGTETLTATVTPSNATNKTVNWSSSNTSVATVSNGTVTGKAVGTAMITVTTQAGNKTATCTVTVIAASSQNITAIAAGGNHSHALMGDGSRWGWGGQ

SEQ ID NO: 32155 - DNA, 972 bp, Unknown
  Obtained from environmental sample
  misc_feature (1)..(972): n is a, c, g, or t
gtgccttcaggttctattcttttggacgaggcgctgggtatcggcggctatccgaggggcagaattatcgagattttcggtcccgaatcgtcgggaaagacgactctcgccctgcacgccatcgcagaagcccaaaaattgggcggaaacgcggcattcatcgacgcggaacacgctctcgaccccgtttacgcaaaaaacttgggcgtaaacatcgacgatctatgggtttcccagcccgataacggcgaacaggcgatggaaatcaccgaaagccttgtccgttcgggcgctgtagatgtaattgtcgtggactcggtagcggcgcttacccctcaatcggaaatcgagggcgaaatgggcgacgctcaaatgggagcgcaggctcgtttaatgagtcaagctctgcgcaaacttacggcgaccatcggaaaatcacgcacgattttaattttcatcaaccaaatccgcatgaagatcggcgtctttttcggcaaccccgaaaccactacaggcggcaacgctctaaagttctattcgtcattacggcttgaagtgcgtaaaacggaaacaatcgaggtcagcaaggacgccgacgctatcggcaacagggtgcgcgttaaagttgtaaagaacaaagtagcgccgcctttcagaaaaacggaaatagaattgatgttcggcaagggaatttccgcgacaggcagtttgttggactgcgccgtaaagtacgacctcatcaaaaaaagcggggcgtggtattcctacaacgacgaaaagatagggcagggaagggacaatacaagagagtatcttgaacagcgtcccgattttgcgaaggaactggaattaaaactgagaaaaataattttccccgatagggaattcccgcagtttaaaacagaaaaagttaaagctgcaaaagaacccaaaccggcggcggaaccaaaacaagacggaggtgtccaataa

SEQ ID NO: 32156 - protein, 323 aa, Unknown
  Obtained from environmental sample
  DOMAIN (1)...(292): recA bacterial DNA recombination protein
  misc_feature (1)..(323): Xaa is any amino acid
MPSGSILLDEALGIGGYPRGRIIEIFGPESSGKTTLALHAIAEAQKLGGNAAFIDAEHALDPVYAKNLGVNIDDLWVSQPDNGEQAMEITESLVRSGAVDVIVVDSVAALTPQSEIEGEMGDAQMGAQARLMSQALRKLTATIGKSRTILIFINQIRMKIGVFFGNPETTTGGNALKFYSSLRLEVRKTETIEVSKDADAIGNRVRVKVVKNKVAPPFRKTEIELMFGKGISATGSLLDCAVKYDLIKKSGAWYSYNDEKIGQGRDNTREYLEQRPDFAKELELKLRKIIFPDREFPQFKTEKVKAAKEPKPAAEPKQDGGVQ

SEQ ID NO: 32157 - DNA, 405 bp, Unknown
  Obtained from environmental sample
  misc_feature (1)..(405): n is a, c, g, or t
atgagtgaagacaaaaaaaacacggtgcttattgttgatgatgaaaatataaatcttaaaattttaactcatatactggaaaaggaatatacaatttattccgcgaaagatggtataagcgccgttgaaaaagcaaaagaaattttacccgatcttattttattggatattgttatgccgggaacagacggatatgaaactatcattaagttaaaaaatattgaagaaaccaaagagataccggttatttatatatccggtttaagtcattctgatgaagaggaaaaaggattatcgcttggcgccgtcgactatatttcanagccgttcagcgcgatgatagtaaagttaagagtagggcatcagattaaaattattaatcaaactcggataattaacaattaa

SEQ ID NO: 32158 - protein, 134 aa, Unknown
  Obtained from environmental sample
  DOMAIN (7)...(118): Response regulator receiver domain
  misc_feature (1)..(134): Xaa is any amino acid
MSEDKKNTVLIVDDENINLKILTHILEKEYTIYSAKDGISAVEKAKEILPDLILLDIVMPGTDGYETIIKLKNIEETKEIPVIYISGLSHSDEEEKGLSLGAVDYISXPFSAMIVKLRVGHQIKIINQTRIINN

SEQ ID NO: 32159 - DNA, 306 bp, Unknown
  Obtained from environmental sample
  misc_feature (1)..(306): n is a, c, g, or t
atggcagtttatcatggcccacggtgccgtcagtgccgcagggagggcgtcaagttgatgctgaaaggcgagcggtgcgccacagagaagtgcgccgtggagcgtaggccttttccccccggaatgcgcacgaccaagcgcaggcgttccgcgactgagtacaacaatcagttgagggagaagcagaagatccgcaggatctacggcattcttgagaagcagttcagcctctactttgagatcgcctcgcggcagaacggcgtgacgggcgagaatatgcttcgtctgttggagactgcggcttga

SEQ ID NO: 32160 - protein, 101 aa, Unknown
  Obtained from environmental sample
  DOMAIN (2)...(98): Ribosomal protein S4/S9 N-terminal domain
  misc_feature (1)..(101): Xaa is any amino acid
MAVYHGPRCRQCRREGVKLMLKGERCATEKCAVERRPFPPGMRTTKRRRSATEYNNQLREKQKIRRIYGILEKQFSLYFEIASRQNGVTGENMLRLLETAA

SEQ ID NO: 32161 - DNA, 726 bp, Unknown
  Obtained from environmental sample
  misc_feature (1)..(726): n is a, c, g, or t
ttgtgcgccggctgcccccatcgcgcttctttctttgcggttaaagaagccgcaaaaggcagaaaggctgtttttacaggggacatcggctgttatacgctgggaaacgccatgccgcttgacatggtagacacctgtttgtgcatgggcgcgggcattaccgtagcgcagggccttaagcgaattgaaccggacgctgttcattttgcgtttatcggggattcaactttttttcacgcgggaattaccggagtaataaacgccgtgtacaaccaaaccgacattatcgccgttgtgctggataactcgacaacggcaatgaccggaaatcagccgcacccgggaaccggccttacaatgatgaagacccaaacggtaaaattggacattgaaaaaatcgtaaaggcgtttaatgtttccggcgtagtaagggtaaacccctttgatcagaaagcggctaaagacgccgttcgctctttgatggaacaaaaaggtgttcgcgtgcttttgttcgaagcgccctgcgttgttgtctcaaagccagcgggaaaatcgctggttaatacagacaagtgtacaggctgtcaggtctgtataaaaaaattgggttgtcccgctcttggttttgagaacaacaaagcgcttgtcaattccggcctttgtacaggctgcggcctgtgcgccaccgtttgtggaacagacgncattacggcaggcgaaaaatga

SEQ ID NO: 32162 - protein, 241 aa, Unknown
  Obtained from environmental sample
  DOMAIN (214)...(237): 4Fe-4S binding domain
  misc_feature (1)..(241): Xaa is any amino acid
MCAGCPHRASFFAVKEAAKGRKAVFTGDIGCYTLGNAMPLDMVDTCLCMGAGITVAQGLKRIEPDAVHFAFIGDSTFFHAGITGVINAVYNQTDIIAVVLDNSTTAMTGNQPHPGTGLTMMKTQTVKLDIEKIVKAFNVSGVVRVNPFDQKAAKDAVRSLMEQKGVRVLLFEAPCVVVSKPAGKSLVNTDKCTGCQVCIKKLGCPALGFENNKALVNSGLCTGCGLCATVCGTDXITAGEK

SEQ ID NO: 32163 - DNA, 1017 bp, Unknown
  Obtained from environmental sample
  misc_feature (1)..(1017): n is a, c, g, or t
atggagtttgctttccccgtggatattttgcctcccgaagattattactggcttccgtttttctcccgagtggttgtttctgtcgggcttcccggtatggactacggagaagtgtcaagtttacttgcccgtacggttggcggttttatcgcggttcttcatacgggttctgccgtaaagaacactccgttacagctgcaaaccgcatcgggtaattttgatttgtcagaccgcgactggatattgttccgtataaaatgtcttgatgaaaaaatcgcgccgtcgctcgaccttgcaatgcgcgtaatctgtgaagcggatttttccgaccgtagaagaataaatgatcttgttctggaaatgaagaacgaaattaattccagtcttgcgccaatgggacatatttattcatcaggcagggcaggtcgttttagttcgcgttctaaaaatgtggaagaaaaattctcagggatttcgcagattgaatttgttcaacagcttgcgagatacgatacgggggaaataattaagaaattgcaatacatcagggaaaaaattattaaggcggggcttatagtaaatgtcacgggaaacgcccttaatgtcgcgggaacggagatagcgcagagattcaaccgctttggtccgcctttgccccggctttccgtggaaataggcgcaggtacgcaaaccacacaatcacctgaagtttttacttccaagtctttgcaagtgggttttgcggcgttggcgttaaattccgcgcctcatgacacattggaacaagttgcagaatttgttttaacgcaccagttgagtaccggggcgttatgggaagatatacggatgaaaggtggcgcttacggcgcttttattaacagcaattcacttgagaactgcgtgtcttttgccacatatcgcgatccgaatccgttgcgttcattggatgtgatttccttcatatttaaagatactacttacggaaaaatgttcgaggactatnctgttaatccataa

SEQ ID NO: 32164 - protein, 338 aa, Unknown
  Obtained from environmental sample
  DOMAIN (2)...(167): Peptidase M16C associated
  misc_feature (1)..(338): Xaa is any amino acid
MEFAFPVDILPPEDYYWLPFFSRVVVSVGLPGMDYGEVSSLLARTVGGFIAVLHTGSAVKNTPLQLQTASGNFDLSDRDWILFRIKCLDEKIAPSLDLAMRVICEADFSDRRRINDLVLEMKNEINSSLAPMGHIYSSGRAGRFSSRSKNVEEKFSGISQIEFVQQLARYDTGEIIKKLQYIREKIIKAGLIVNVTGNALNVAGTEIAQRFNRFGPPLPRLSVEIGAGTQTTQSPEVFTSKSLQVGFAALALNSAPHDTLEQVAEFVLTHQLSTGALWEDIRMKGGAYGAFINSNSLENCVSFATYRDPNPLRSLDVISFIFKDTTYGKMFEDYXVNP

SEQ ID NO: 32165 - DNA, 1005 bp, Unknown
  Obtained from environmental sample
  misc_feature (1)..(1005): n is a, c, g, or t
ttgcctgataaacgaattatgaaaaacgaaactgaaatcctaaaagggcttgttatccgaggttcgcgcaatgttatgactgtattggttaataaccttgttaataaccttcctgttaacggcgaaccggcagaacttgaatgccgtataaaaggaaaagtattaaagggcggcgaaaatttttacaatccgcttgcgccgggggatattgtggtaattgagcggcaaataaacacaaacacggtacgtgacagcgcccttatcctttccgtggaaaaaagacacaatcttttcagccgctttaaccaaaaaggcagcgcgagccagcttctggcggctaatgtcgatcttgttatttgcatttgcactccggattctcctcctttcaggccgcgctttatagacagggttcttttgcaggcggattttgccggaattgactctcttattgtttgcaataaaatcgatcttgaccctgacgacattgacgtgaacgagcgactcgaggattttaagcgtattggttataagatattgagcgtttcggcaaaaaccggagaagggcttgatgagcttcgccgtcaaatagcggggaaaaccgctgtgctggcaggccagtcgggcgtaggaaaatccagtttaataaacgccttacagcccggacttgatattaaagaaggggagttaaacgaaaaatacaacagaggcgttcatacaaccacaatgtcttatatgatagaacttgcggataacacgcgcttgattgacactccgggtgtgcgtctttttatcccggacggaattaaaaaagacgaaattattaaccacatgagggaatttgcccctcttgccggcaagtgcagtttcgggatgtcatgttctcacataacggaaccgggctgtaaaatactggaagcagtttccgccggcgtcattcacgaggaccgctacgaaagttatctgcgtatcagggacagtcttgaaggcaagtacggcgatgattaa

SEQ ID NO: 32166 - protein, 334 aa, Unknown
  Obtained from environmental sample
  DOMAIN (199)...(288): GTPase of unknown function
  misc_feature (1)..(334): Xaa is any amino acid
MPDKRIMKNETEILKGLVIRGSRNVMTVLVNNLVNNLPVNGEPAELECRIKGKVLKGGENFYNPLAPGDIVVIERQINTNTVRDSALILSVEKRHNLFSRFNQKGSASQLLAANVDLVICICTPDSPPFRPRFIDRVLLQADFAGIDSLIVCNKIDLDPDDIDVNERLEDFKRIGYKILSVSAKTGEGLDELRRQIAGKTAVLAGQSGVGKSSLINALQPGLDIKEGELNEKYNRGVHTTTMSYMIELADNTRLIDTPGVRLFIPDGIKKDEIINHMREFAPLAGKCSFGMSCSHITEPGCKILEAVSAGVIHEDRYESYLRIRDSLEGKYGDD

SEQ ID NO: 32167 - DNA, 1209 bp, Unknown
  Obtained from environmental sample
  misc_feature (1)..(1209): n is a, c, g, or t
ttgaaagaaatatcagaattattgaacactgatgatgaattaccgctgttgattgactgtctgaattgtgaaaaaggctgtattggcggtcccggcacggggaacgccgagaaaccgctggctgttcttaaggctcctgtacaaaaacgcatggccaaactggaagaaaaacaacattctctaatcggaaatgacacatacaaaaaataccacgatactttgggtaagtattggaaaaaaggactgtataaccgtatctaccgcaatctttccgaaaacaatacaattaaacagccgagcgaaactgaaataaccgaaattttccacagtatgaaaaaattccaaaaagaagatatatacaactgtacctgttgcggttacggaagctgtaaagcgatggctacggcaatttacaacaaactgaacaaaccgaaaaattgcgcccattatattctcgacttgctcaaggagaatcaagaacacattgccaacgcttcagaccttattgaagggataaacaaactaatacaggaattgaacgctactatcagctcacaggcggaggcggttgatcactcctcagcggaaaccgaagaaataataacctcaattaaagacacttctgaaatgtcccttaaacaacaggaatcagtaaaagggttgatagaaattgcgggacgtggacaggaatccatgagaaaaaccattcaatcaataaatgaaatctctcaatctgttgaaggcataagttcggcaattcaaataatttcttcaatagcggcaaataccaatttgctgtcaatgaacgcggcgatagaatcagcacacgccggagacgccggaaggggttttgcggtggttgccggcgagatacgccgcctttcggaaacaaccagagaaaattcagtaagtatttcccgtacacttaaaaatattatcagcggaatatccgacacgacaaaacaatccggtgaaacagatgcacgaatagcccaaatgtccaaagagataagcgggtttgccgaaaccatgtctgtttttatgaacacgtttaatgaattatcggcaaaaagcggaaacattaccgcctcccttgtaagcctaaaagagcaaagttcggcggttaaaacaagttatgctcaaatgattgaaatgacaaataaacttgccggagcgttgaaggacttatccgacttgtcaaaaagataa

SEQ ID NO: 32168 - protein, 402 aa, Unknown
  Obtained from environmental sample
  DOMAIN (184)...(397): Methyl-accepting chemotaxis protein (MCP) signaling domain
  misc_feature (1)..(402): Xaa is any amino acid
MKEISELLNTDDELPLLIDCLNCEKGCIGGPGTGNAEKPLAVLKAPVQKRMAKLEEKQHSLIGNDTYKKYHDTLGKYWKKGLYNRIYRNLSENNTIKQPSETEITEIFHSMKKFQKEDIYNCTCCGYGSCKAMATAIYNKLNKPKNCAHYILDLLKENQEHIANASDLIEGINKLIQELNATISSQAEAVDHSSAETEEIITSIKDTSEMSLKQQESVKGLIEIAGRGQESMRKTIQSINEISQSVEGISSAIQIISSIAANTNLLSMNAAIESAHAGDAGRGFAVVAGEIRRLSETTRENSVSISRTLKNIISGISDTTKQSGETDARIAQMSKEISGFAETMSVFMNTFNELSAKSGNITASLVSLKEQSSAVKTSYAQMIEMTNKLAGALKDLSDLSKR

SEQ ID NO: 32169 - DNA, 612 bp, Unknown
  Obtained from environmental sample
  misc_feature (1)..(612): n is a, c, g, or t
ttgacgtggcgcaaggcaacacccgcgccgatggtatcgacccgccgccggagatatagaatgggccagaaaagcaccattgacaaactgccgaaaaaactccgcgacaaactgacagagatgctgcaaaatccggccgtaacgcaggcggaaattgtagacgcaataaacgccgaggcgggcgagccgcttatttcaaaatcgtcaatgaaccgctacgcgcaaaaaatgaaacacttcacggaaaagaaccgacaggcgaaagaaatcgccgatgcgtacattgaaaaatacggcagcgaaaatcggcagaacttaggcaaagtaatcaatcagcaaatgcgtgtggcgatatttgatcttatgggtgagtttgaagaaatccttgccgaccctgaaacaaaaagcgtggaagcggcggacatactctacaaaatatctcgcggactgaaagaacttgagcaggcggaaaaactgaacgccgagcgcacccagcacatacgccaagaagcgttagccgatgccgccaaaattgtggagaaagaagcgaagtcggcagggcttgacgaagccgcgcttgaggttatcaagcgtaaaattttagggatatag

SEQ ID NO: 32170 - protein, 203 aa, Unknown
  Obtained from environmental sample
  misc_feature (1)..(203): Xaa is any amino acid
MTWRKATPAPMVSTRRRRYRMGQKSTIDKLPKKLRDKLTEMLQNPAVTQAEIVDAINAEAGEPLISKSSMNRYAQKMKHFTEKNRQAKEIADAYIEKYGSENRQNLGKVINQQMRVAIFDLMGEFEEILADPETKSVEAADILYKISRGLKELEQAEKLNAERTQHIRQEALADAAKIVEKEAKSAGLDEAALEVIKRKILGI

SEQ ID NO: 32171 - DNA, 384 bp, Unknown
  Obtained from environmental sample
  misc_feature (1)..(384): n is a, c, g, or t
atgggctatccatgcattgatattacagcgacagttacaggcattcagtattcggaacaaaccggcaccccctttgcctttgaagcctgcgccagcatggcctttgacgaagcctgccggaacgcctcccccatcctccttgagcctattatggccgtcaaccttaacactccccatgaatttgtgggggaggtcatgagccttgtaacacagcgcggcgggcaaatccttaacatgaacgcgaaatcggacgcggatgaaataaaggctcaggcgcctatggaaaaaatgttcggatttatgaccagcctgagaagcgtttcacagggacgcgcgagttttagtttggaattttcgcactttgagaagaagtcggaacggtaa

SEQ ID NO: 32172 - protein, 127 aa, Unknown
  Obtained from environmental sample
  DOMAIN (45)...(127): Elongation factor G C-terminus
  misc_feature (1)..(127): Xaa is any amino acid
MGYPCIDITATVTGIQYSEQTGTPFAFEACASMAFDEACRNASPILLEPIMAVNLNTPHEFVGEVMSLVTQRGGQILNMNAKSDADEIKAQAPMEKMFGFMTSLRSVSQGRASFSLEFSHFEKKSER

SEQ ID NO: 32173 - DNA, 477 bp, Unknown
  Obtained from environmental sample
  misc_feature (1)..(477): n is a, c, g, or t
atgaacaagttaggaaagtgggcggaaagtaaacttgtcaaaaacgaccaggcagacacaaaacacgactttgccaaaggctttgtttcagcgactattcttttctgcacaggctctatggcgattataggatcgatgcaaagcgggcttgtaggaaaccatcagatactttttacaaaaactgtcatggacggttccatgtctattgtcttcggcgcgacattcggaataggcgcggcgttctcggcaataccgctcttgctctatcaggggggaatcgcgcttgcttcagcctctatccgagattttcttaatccggaagttatccgcgaaatgtccgccgtgggaagccttgtcattacggctataggctttaacttcctttccgtaaaggagataaaggtcgcaaaccttatcccggccatgtttatcccatggatctacctgacagccgcccaatacttcattcatggttaa

SEQ ID NO: 32174 - protein, 158 aa, Unknown
  Obtained from environmental sample
  DOMAIN (1)...(155): Protein of unknown function (DUF554)
  misc_feature (1)..(158): Xaa is any amino acid
MNKLGKWAESKLVKNDQADTKHDFAKGFVSATILFCTGSMAIIGSMQSGLVGNHQILFTKTVMDGSMSIVFGATFGIGAAFSAIPLLLYQGGIALASASIRDFLNPEVIREMSAVGSLVITAIGFNFLSVKEIKVANLIPAMFIPWIYLTAAQYFIHG

SEQ ID NO: 32175 - DNA, 501 bp, Unknown
  Obtained from environmental sample
  misc_feature (1)..(501): n is a, c, g, or t
atgatagaaagaaatgatctctgttggtgcggaagcgggaagaagtacaagaagtgccacctcgcgagcgatgaagagaagcgtgtaccgcctccgaaaggcgttcaggcgcgcgccgccgcgaggagcagggggcccgcgtcgcaaaaggggcggcctaaaaccccggatcagatcgacggaatgcgccgcagcggcgcgttcaacgggcgtcttatggactacatacgcccgttcgttaaagcgggcgccgtcacggacgacctcaacacgctcatccacaattacaccgtcgaaaacggccacataccggcttgcctcggctacaaggggcataggtgcgctttccctaaatcatgctgtatctcacggaacaacgtggtatgccacggcatcccgtccgcggatgaacgcgtattggagggggatatcgtcaatatagacctcaccacaatcgggacggttccacggcgatcctccagacctcagaagccgcgataa

SEQ ID NO: 32176 - protein, 166 aa, Unknown
  Obtained from environmental sample
  DOMAIN (4)...(24): SEC-C motif
  misc_feature (1)..(166): Xaa is any amino acid
MIERNDLCWCGSGKKYKKCHLASDEEKRVPPPKGVQARAAARSRGPASQKGRPKTPDQIDGMRRSGAFNGRLMDYIRPFVKAGAVTDDLNTLIHNYTVENGHIPACLGYKGHRCAFPKSCCISRNNVVCHGIPSADERVLEGDIVNIDLTTIGTVPRRSSRPQKPR

SEQ ID NO: 32177 - DNA, 1461 bp, Unknown
  Obtained from environmental sample
  misc_feature (1)..(1461): n is a, c, g, or t
atgacagcgacgcgacgtccggttacaggcggcggcacacctacacccacacccacggtcacaagcgtaacggtaagtcccgcaagtccgagtgtaaccaagggcggaacacaggcatttacggcaactgtggccggaaccaataatccggcgcagaccgttacatggacggtaacaggcggagggactggaactagcattgcgactaacggaaccttaaccgtagccgccggggaaaccgcgactaccttaaccgtaagggcaacctctacggtagatattaccaagtccggcacggcaacggtcacggttacaggcggcagtacagaagccgaagtgataaaaagtaccaataccggttctacagcttctactgagggactgaaaagcagcgcttcttcttatcagattgtggatcttccaacagataacaatcggcaaaatgttatgaaagtcagtccggcagatctgggtagcggctatgcagtggttgtgtattctctgtccgcatataaaagtaaagaaattaccataacgttttcggtggatgttaaacgggtaggagccgccggaaccttgaattggcagataaataacagcaattatccttcagcaggaactccaataaataatgctgcagcgggaacatggcattccatgaccgggacatggaccggaactcccaccgatgataaccccgccctatacctcagcacttaccagaacaacagtgacaccaccacatactacattgacaatttcaccatcacaataactgaaacaagttccggtgatggcggtggcgacggaccgccaaccattacaactactcaattagacaaagacgccattggcgtgcagacttttaccagcaattcaggcggtaataagtcccttacaggttccccttatggttacgaaatgtggacagatggcggaaataacaacaaacttatatggtatgggccaaatcagggaggcggagcagcgttcagggcggaatggaacaatcctaatgactttttgggccgcttaggttatttctggggcaatggcggattgtttacccaatacaaaaatatttacgcggattttaactatacaagatcaggcagaagcaccgccggagattattcttatataggaatttacggctgggcaagaaacccaagcgcggcagatacaaaagagcagttaatagagtactacattgtagaagactggtttggcaaccaatggcaaaatgacacaaatcctatgggaaccggtaccacacaggggaccgtagtgggtagttatacgctggatggcgcaacgtacagtgttcataanagtgtgagaactaacaagcccttcatagacggtaacaaaactttcacccagtacttcagcatacgacaaacgcttcgcaaaacggggacaatttctngtaccgagcatttcaaaaatgggacggattga

SEQ ID NO: 32178 - protein, 486 aa, Unknown
  Obtained from environmental sample
  DOMAIN (19)...(102): Bacterial Ig-like domain (group 2)
  misc_feature (1)..(486): Xaa is any amino acid
MTATRRPVTGGGTPTPTPTVTSVTVSPASPSVTKGGTQAFTATVAGTNNPAQTVTWTVTGGGTGTSIATNGTLTVAAGETATTLTVRATSTVDITKSGTATVTVTGGSTEAEVIKSTNTGSTASTEGLKSSASSYQIVDLPTDNNRQNVMKVSPADLGSGYAVVVYSLSAYKSKEITITFSVDVKRVGAAGTLNWQINNSNYPSAGTPINNAAAGTWHSMTGTWTGTPTDDNPALYLSTYQNNSDTTTYYIDNFTITITETSSGDGGGDGPPTITTTQLDKDAIGVQTFTSNSGGNKSLTGSPYGYEMWTDGGNNNKLIWYGPNQGGGAAFRAEWNNPNDFLGRLGYFWGNGGLFTQYKNIYADFNYTRSGRSTAGDYSYIGIYGWARNPSAADTKEQLIEYYIVEDWFGNQWQNDTNPMGTGTTQGTVVGSYTLDGATYSVHXSVRTNKPFIDGNKTFTQYFSIRQTLRKTGTISXTEHFKNGTD

SEQ ID NO: 32179 - DNA, 750 bp, Unknown
  Obtained from environmental sample
  misc_feature (1)..(750): n is a, c, g, or t
atgttccgtttctttgaggacacggccagtaccatggataacgcgcgggaattagcggctcaggcccagatggccgggattgtcgcggttgccgacacgcaaagcgctggcagggggcgtagcggcagaacatgggcttcacggcatggcggcctgtattgcagcattctggaccgtcctgctataccgcttgccgattactgtatgccggctatgctgtaccagatagccgttgcaagggctgtagaggggtgttgcgggaagccggcaaaattacgctggccgaatgacatttatataggcggccggaaaatcgccggcatcctcaccgagcttgaagccgaaggggatatgataagctggataacgaccggcatcggggtgaatgttaacaatccaagcccttccgcaaaggccattaactgctccgagatcgtccgtcacgccgtatcacggcgtatgctgttaaccgccattatgaacgaggcggataaattaaagaaaagcgccggtcccacgatggcctacgcccagggaaaccggtatctggcgacggaatggaattccctggcggactgtatcggcgcgaaagccgcgatcgtggattccgtgaatatggaaaaaggcaggatgttagccaggggaatttttaccggtattgatcctgccggtcgctgtatcatcaaatcgcacaatgacggcgaagctatgtattttaacccgggacctgtgtcggtgatgtttttatag

SEQ ID NO: 32180 - protein, 249 aa, Unknown
  Obtained from environmental sample
  DOMAIN (4)...(101): Biotin/lipoate A/B protein ligase family
  misc_feature (1)..(249): Xaa is any amino acid
MFRFFEDTASTMDNARELAAQAQMAGIVAVADTQSAGRGRSGRTWASRHGGLYCSILDRPAIPLADYCMPAMLYQIAVARAVEGCCGKPAKLRWPNDIYIGGRKIAGILTELEAEGDMISWITTGIGVNVNNPSPSAKAINCSEIVRHAVSRRMLLTAIMNEADKLKKSAGPTMAYAQGNRYLATEWNSLADCIGAKAAIVDSVNMEKGRMLARGIFTGIDPAGRCIIKSHNDGEAMYFNPGPVSVMFL

SEQ ID NO: 32181 - DNA, 882 bp, Unknown
  Obtained from environmental sample
  misc_feature (1)..(882): n is a, c, g, or t
gtgcgcgtcgcgccgcgaagcgccttaaaccaggaacatggcatcccaccttttgcaaacagggaacacggcaggcttccacgaccgagcggggacacttcaagcgattcccggacaatctgtttggcggactcccgattatcggagtcgcgtatgagtccattggattgggtactactggtgctgacatgcgccgcattcgtcttcgggctgctacagcttcgccgtgcccatgccgctgtgctggacgtggccaaggcccacgtcaaggccgaggagggtctgaaggccgacagggagcgcatgatgctcgaagcggagaaagacgcctccaggatcatcgccaacggtaagaaggaggcagaggcgctgcgccgcgaggccgagctaaaaaacaaagagcaggctctgacggctaggcaggaggccgaaaggatagcaaacgagcgcatggccgcgctgggcaagcaggagcagcgcctccagtccaaagaggacagccttgacaaaaagctgcaggccgccgaccagaaggccaaggagatagagaccaaagccgagaaggccagacaggatgccgagcaaaaggcaaaggaaatggatgccaaggtcgagaaggtcaaacaggaggcggaaagactggaggcacagcacgcaaaggccaaggaggtgatcgaggtccagacacgcaggcttgaggaaatagcagggctgaccagggaagaggccaaggccgaaatagtggcgcagttggagtacacggccaagatggattctgccaagctcgtccgccgcatagaagaagaggccgaggaggaggccgacagaagggccaggtggaccatcgccaacgccatacagagggtggcatccgaagtgtga

SEQ ID NO: 32182 - protein, 293 aa, Unknown
  Obtained from environmental sample
  misc_feature (1)..(293): Xaa is any amino acid
MRVAPRSALNQEHGIPPFANREHGRLPRPSGDTSSDSRTICLADSRLSESRMSPLDWVLLVLTCAAFVFGLLQLRRAHAAVLDVAKAHVKAEEGLKADRERMMLEAEKDASRIIANGKKEAEALRREAELKNKEQALTARQEAERIANERMAALGKQEQRLQSKEDSLDKKLQAADQKAKEIETKAEKARQDAEQKAKEMDAKVEKVKQEAERLEAQHAKAKEVIEVQTRRLEEIAGLTREEAKAEIVAQLEYTAKMDSAKLVRRIEEEAEEEADRRARWTIANAIQRVASEV

SEQ ID NO: 32183 - DNA, 585 bp, Unknown
  Obtained from environmental sample
  misc_feature (1)..(585): n is a, c, g, or t
gtgttactgaaaacaaccccggcaaaaaaagcaattgtaaaaacggaatttccggggctttcattattgccaacagcgggcctcggagggcacttgaaagtgttttcagaaggccccgcgcttcaacagcctttttgcatgaaaaaccttgttaaagacatagccgccgccggttttcggttttgcattattgacctctcccccggctgggggccaattgaacgcgccgccttaatagccgccgatgaggtaataaccccggtaatgggcgatagcttcgccgctgacggactggagattttcgcggataatctgaaaaggctccggcaagatatggacaccgaccggcccggctataagcgggtaattgtgaacgccctcgatggccgtataaaacagcatggggaaatgttaggtgaaataaaagcaaacgccgggggcttgcgggtgtatagtgtaccagttgaccccgctttccggctggggcaaagaaaaggggtaacaattcaagcccttacatcggcaaagccggaaacaagggacgctatacgcgccctgaccgctgacattttacaagaagggtaa

SEQ ID NO: 32184 - protein, 194 aa, Unknown
  Obtained from environmental sample
  misc_feature (1)..(194): Xaa is any amino acid
MLLKTTPAKKAIVKTEFPGLSLLPTAGLGGHLKVFSEGPALQQPFCMKNLVKDIAAAGFRFCIIDLSPGWGPIERAALIAADEVITPVMGDSFAADGLEIFADNLKRLRQDMDTDRPGYKRVIVNALDGRIKQHGEMLGEIKANAGGLRVYSVPVDPAFRLGQRKGVTIQALTSAKPETRDAIRALTADILQEG

SEQ ID NO: 32185 - DNA, 1164 bp, Unknown
  Obtained from environmental sample
  misc_feature (1)..(1164): n is a, c, g, or t
gtggatatccctatatcaaattgcataaacgccgatctgcgccaaatatacatcgttacccagttcaattcagcctctttgcaccagcatatcgggcaaacctatctttttgattcattttccaatggatttgtcgaaatccttgccgcggagcagacttttgaacattccggctggtatgagggcaccgccgacgcggttcgcaagaatttcccccatttcaggacccataagcccgcgtactatataatactttcgggcgatcagctttaccgcatggatctgaaagatctgctgaaaagccatattgattccggcgcggcaataactattgcctgtaccccggtgggcaggggggacgccagcgccctgggtattctgaaaaccgataaaagccgcaggataaccgaattcatggaaaaacctggcccgaccaaggatatttctgattataaagttccctcggaactgaaaatggagaagaaaattgacggggacgctttccttgcttccatgggtatttatgtttttaacgcaaaggcaatggatgacggccttgaaaatgaactgaccgatttcggaaaggaagtaatcccccaggctataaacagcctaaaggtcaacgcctatctctttgacggttactgggaagatatcgggactatacggaatttttacgagacaaatctggagttgacggccctgaggccgaaattcgacttctatgacgaggataggccgatattcacacacaggcgcaacctgccgccgtctaaaataaatttcggcaatatgaaccagtccatagcggcggaaggctgcattataacaaacggcagtataaccgattcgattgtcggcatacgcaccatcatagaaaccggctcaagcctgaacggggtaatctgcatgggggcagacttctatgaaaccgaaagccaaaaagcatataacgccgaagcaagaatacccaacgttgggattggcagagggtcaattatcaaagggtctatcattgacaaaaatgtccgcataggcgagggctgccgcatcggcgttgacaacataagccggaccgacggtaattacggccattatcatgttgttgacgggatcatcgttatcccgaagaatacggtgctgtacccgggaacggttatttaa

SEQ ID NO: 32186 - protein, 387 aa, Unknown
  Obtained from environmental sample
  DOMAIN (1)...(235): Nucleotidyl transferase
  misc_feature (1)..(387): Xaa is any amino acid
MDIPISNCINADLRQIYIVTQFNSASLHQHIGQTYLFDSFSNGFVEILAAEQTFEHSGWYEGTADAVRKNFPHFRTHKPAYYIILSGDQLYRMDLKDLLKSHIDSGAAITIACTPVGRGDASALGILKTDKSRRITEFMEKPGPTKDISDYKVPSELKMEKKIDGDAFLASMGIYVFNAKAMDDGLENELTDFGKEVIPQAINSLKVNAYLFDGYWEDIGTIRNFYETNLELTALRPKFDFYDEDRPIFTHRRNLPPSKINFGNMNQSIAAEGCIITNGSITDSIVGIRTIIETGSSLNGVICMGADFYETESQKAYNAEARIPNVGIGRGSIIKGSIIDKNVRIGEGCRIGVDNISRTDGNYGHYHVVDGIIVIPKNTVLYPGTVI

SEQ ID NO: 32187 - DNA, 399 bp, Unknown
  Obtained from environmental sample
  misc_feature (1)..(399): n is a, c, g, or t
gtgaaacgcctgttcccccctgaattcctgaaccgtgtggatgacgtagttgttttccacccgctgagcattgagcagatagagaatattctggagattgaactggccgaactgtccaacaggcttatggagcagaattacagcattgacatacagcatgaggccagggaattgcttatcgaaaaaggctgggaccccaaattcggaggaaggcccntgcgacgtaccctgcaaaaagaactcgaagaccccctcgcccgcctcctcatggaacacgactggccgaaaggaactgtttttaccgcgaataaccgtgatggaaagatagaacttatcggcaatataccctacacagaagaattagaaatgagggatgaggaactggcattatacaaataa

SEQ ID NO: 32188 - protein, 132 aa, Unknown
  Obtained from environmental sample
  misc_feature (1)..(132): Xaa is any amino acid
MKRLFPPEFLNRVDDVVVFHPLSIEQIENILEIELAELSNRLMEQNYSIDIQHEARELLIEKGWDPKFGGRPXRRTLQKELEDPLARLLMEHDWPKGTVFTANNRDGKIELIGNIPYTEELEMRDEELALYK

SEQ ID NO: 32189 - DNA, 552 bp, Unknown
  Obtained from environmental sample
  misc_feature (1)..(552): n is a, c, g, or t
gtggaagcgcggcgacaccgagtaccgcgtgaacgccatcccgttcggcggctacgtactgatggccggcgagaaccccgacggcgaacgcagcggcgcggacgacgagtaccacaccaagcctatatggcaacgcgccgtcgtggcgcttgccggccccgtggcaaacctcatcttcgcgttcttcacgctctgggcggcgttcgtccacggcatagaccgcccggcgtttctggacagcgccaaagtcggcatcgtccagaaagactccccggcggaaaccgccggatttctggccggagacagcatcctgtcaataaacggcgcgccgatctcgtcctgggagcaggtggacacccacctgtcgacgcagctaagcgacggctacaaaatcgtagtgcaacgggacggaaaacccgcggaactcagcctgaccgtggaacgaacgggcgcgcacctgcccaaaacgctctccggcggccttatgccctcccgctacccgcccgtcgtgggcggcgtgaagcccaagagcgccgccgacgggttgcttga

SEQ ID NO: 32190 - protein, 183 aa, Unknown
  Obtained from environmental sample
  misc_feature (1)..(183): Xaa is any amino acid
MEARRHRVPRERHPVRRLRTDGRREPRRRTQRRGRRVPHQAYMATRRRGACRPRGKPHLRVLHALGGVRPRHRPPGVSGQRQSRHRPERLPGGNRRISGRRQHPVNKRRADLVLGAGGHPPVDAAKRRLQNRSATGRKTRGTQPDRGTNGRAPAQNALRRPYALPLPARRGRREAQERRRRVA

SEQ ID NO: 32191 - DNA, 486 bp, Unknown
  Obtained from environmental sample
  misc_feature (1)..(486): n is a, c, g, or t
atggaataccgcgcccgtctggattcgctccgtctttttgccgaaaccaaagccattcccctcaatgctgaggatgactacgggcttcgttcttttataaaagccgtaacggccattgacgatgccagagaaaatgctttgatgggggaaagctctacaggagtttctatagaggcccgctgtcgctactgttacgggctaaggcttgaaaaaacagcccgccttgccgcggaaaaggcctatgacgctttctcgacaagcctcctaataagtccctatcaaaaccatgaactaatccgggggattggggaagagcttggatctgtttacggagttaagtttttttacagggatttccgccccggtttccgcgaaggccggaacaaagcaaggcaggcaggctactatatgcagaagtactgcggctgcgtttatagcgaggaggagcgctacctgaagcggcctgtcaccgggacattcagatga

SEQ ID NO: 32192 - protein, 161 aa, Unknown
  Obtained from environmental sample
  DOMAIN (1)...(161): Uncharacterized BCR, COG1636
  misc_feature (1)..(161): Xaa is any amino acid
MEYRARLDSLRLFAETKAIPLNAEDDYGLRSFIKAVTAIDDARENALMGESSTGVSIEARCRYCYGLRLEKTARLAAEKAYDAFSTSLLISPYQNHELIRGIGEELGSVYGVKFFYRDFRPGFREGRNKARQAGYYMQKYCGCVYSEEERYLKRPVTGTFR

SEQ ID NO: 32193 - DNA, 1020 bp, Unknown
  Obtained from environmental sample
  misc_feature (1)..(1020): n is a, c, g, or t
atggcggaacgcggaattttggatttaatcatctcatgccttcccgatctttcataccgggagaaaataaccctttgcgaatcgttaggtgaagaatctgatttgttccaaagctccggatccggcattgaggcgcttatagggcgcagacttaacgccggggacgtcgattcgtcaaggcgcgcggcggaaaggacggccgaaaaagcgcgcatccgcgggatcaacatcgtttcatggcacagccccctgtacccgccgctgttaagggaaatatacgacccgcccgttctgctgtttttcaggggaaagctccccgatccgcaaaacccactggtcgcggttgtcggaacacgaaagcccagcccggcggcttcggcgcaggcctttgacattgccaggggcctgggcagggggggcatttccgtcgtttccggccttgcgattggtattgacgcctgcgcccacaggggaaacatggagggcggcgccccgactgtcgcggtgctgggttccggggtcgatgaggtttacccctcaaccaaccgcgtcctcgcccggcggattctggaaacgggcggcgccctgctttccgagtacccccccggcacgggcccccgcaaatggactttccccgcgaggaacaggatcatttccggtctttgccgcggcgttcttatagtcgaggccccgcagaaatccggggcgcttataaccgcgagattcgcccttgatcagaacagggatctctggaccgcgtcgtcgggcgtggaacaagccgagtatcaaaaacaggaaaggttgttcggattttttgacaaaaggggaacgtcaaaactggcggaggacggagctcccatattaatgacggcctcggatatactgggagcatggaatatcaagagccccgaacaggagccggcccccgaacagtggtacgttcccgaacaggagcgcgaccttgccggcggcccggcgctcgcggcctcgctggccgcttcgctcggcgtaaaattgtag

SEQ ID NO: 32194 - protein, 339 aa, Unknown
  Obtained from environmental sample
  DOMAIN (69)...(278): SMF family
  misc_feature (1)..(339): Xaa is any amino acid
MAERGILDLIISCLPDLSYREKITLCESLGEESDLFQSSGSGIEALIGRRLNAGDVDSSRRAAERTAEKARIRGINIVSWHSPLYPPLLREIYDPPVLLFFRGKLPDPQNPLVAVVGTRKPSPAASAQAFDIARGLGRGGISVVSGLAIGIDACAHRGNMEGGAPTVAVLGSGVDEVYPSTNRVLARRILETGGALLSEYPPGTGPRKWTFPARNRIISGLCRGVLIVEAPQKSGALITARFALDQNRDLWTASSGVEQAEYQKQERLFGFFDKRGTSKLAEDGAPILMTASDILGAWNIKSPEQEPAPEQWYVPEQERDLAGGPALAASLAASLGVKL

SEQ ID NO: 32195 - DNA, 336 bp, Unknown
  Obtained from environmental sample
  misc_feature (1)..(336): n is a, c, g, or t
atgcacgaaatgaaaagacagtcgctcattatgaaagaagccctgctaaagggggattttaacagcttttccggctgtcttttgaacggctggcttgcaaagaaaaacgccgccgcttcgattaccaattcattcttggatgaaatgtatcaatacgcgcttgacaatggcgcggaatcggcaaaaatttcaggcgccggcggcggaggcttcatgatgatatactgtaacccctgtaagagaatcgcgctcattcgcgcgctaaaagaaaaacagggaatggttttaacgccttcatttactgaaacggggacgcaagcatggtgcctatattag

SEQ ID NO: 32196 - protein, 111 aa, Unknown
  Obtained from environmental sample
  DOMAIN (11)...(95): GHMP kinases C terminal
  misc_feature (1)..(111): Xaa is any amino acid
MHEMKRQSLIMKEALLKGDFNSFSGCLLNGWLAKKNAAASITNSFLDEMYQYALDNGAESAKISGAGGGGFMMIYCNPCKRIALIRALKEKQGMVLTPSFTETGTQAWCLY

SEQ ID NO: 32197 - DNA, 702 bp, Unknown
  Obtained from environmental sample
  misc_feature (1)..(702): n is a, c, g, or t
atgttaattcgttccaaagccccgctgcggctggggcttgcaggcggcggaaccgacatcgcggattactacaaccgtttcggcggttatgtgctaaacgcgacggtggatatgtacgcctactgtacaatcgaaccgaatgatgcgggcaaaatagaatttattgccgccgatttgggcaaacaagaggaatataaagcagtagaaaaacttccggtttcctctatcctgcagcttcattgcggcatttacaacagaataatttccgactttgtaaaaaagccgctttccttcaaaatgaccacttactctgacgcgcccgcaggttcggggctgggttcatcttccacaatggtcgtggcgataatcaaagcctttgaggaatggcttaatctgcccctgggcgaatacgacatcgccgcccttgcctgtaaaattgaacgcgaagatctggcgcttgcaggcgggaaacaagaccaatatgcggcgacattcggcggttttaactttatggagttttatgaaaatgagcgtgtaattgtaaatccgctccgcctaaaacgctggatcagaaacgagattgaatcttcgctggttttatattacacgggagtttcaagggaaagcgcgaatatcattaacgaacaaattaagcacacacaaaaaggcgacgctaaaaacatgaaagcatgcacgaaatga

SEQ ID NO: 32198 - protein, 233 aa, Unknown
  Obtained from environmental sample
  DOMAIN (99)...(167): GHMP kinases N terminal domain
  misc_feature (1)..(233): Xaa is any amino acid
MLIRSKAPLRLGLAGGGTDIADYYNRFGGYVLNATVDMYAYCTIEPNDAGKIEFIAADLGKQEEYKAVEKLPVSSILQLHCGIYNRIISDFVKKPLSFKMTTYSDAPAGSGLGSSSTMVVAIIKAFEEWLNLPLGEYDIAALACKIEREDLALAGGKQDQYAATFGGFNFMEFYENERVIVNPLRLKRWIRNEIESSLVLYYTGVSRESANIINEQIKHTQKGDAKNMKACTK

SEQ ID NO: 32199 - DNA, 657 bp, Unknown
  Obtained from environmental sample
  misc_feature (1)..(657): n is a, c, g, or t
gtgggtaatcctgacttaaaacccgaagacggctggggaggtgatcttggcgttgaatggcacataacacaaaatacaaaactggaaagcgttatttttacccagtggctaaaagattcaattcactggtatgccgaaaccaacggtatctggcggcctgagaatgtgggcgaagcaatgttcttcggcttggacaacaaactgcgttttgaaattccagttaagccgggagcggtaaaaaaaattattgcttctgtttcatatcagtaccttttaagttacctcttgagttttggctatggctttgcggacaataaaagaatcccctacagtcccgcgcatacaataggcggatcgcttgaggttccctggggaagcggctctgtaataatcaccgggcattatgaaagccttcgccatgacgacagagccaacattacgaaattaaaaccgcattttctgcttaacgccgccgttaatcagaaaataggaaaaaatctaacggcatttggcgtactgcggaatatccttaacgaatcatatcaatcgtttaacgattaccccatgccgggtatcacgctgacattggggatgcgggctaattttgatattaacaaaaatcagggagataaagaaaatgaacaaaaaaaacagtaa

SEQ ID NO: 32200 - protein, 218 aa, Unknown
  Obtained from environmental sample
  misc_feature (1)..(218): Xaa is any amino acid
MGNPDLKPEDGWGGDLGVEWHITQNTKLESVIFTQWLKDSIHWYAETNGIWRPENVGEAMFFGLDNKLRFEIPVKPGAVKKIIASVSYQYLLSYLLSFGYGFADNKRIPYSPAHTIGGSLEVPWGSGSVIITGHYESLRHDDRANITKLKPHFLLNAAVNQKIGKNLTAFGVLRNILNESYQSFNDYPMPGITLTLGMRANFDINKNQGDKENEQKKQ

SEQ ID NO: 32201 - DNA, 618 bp, Unknown
  Obtained from environmental sample
  misc_feature (1)..(618): n is a, c, g, or t
atgcggtacggctattttgacaatactgaatgcgagtatgtgattgagcgggtcgatacgcccatgagctggaccaattacatcggtaccgagaacatgataggcgttttcaaccagacctgcggcggctacctgttttacaagagcgcggagcatcacaggataacccgtttcaggggcaacgccgtgccaactgaccgtcccggccattatatatatctgcgtgatgatgaaaccggcgattactggacaataagctggcagccgacggcaaagcctgtcgaatgttacagggcaaggcacggcctttcctattcggtgtattcatgcgaatattcggggatttacgcggaacaaaccctgtttatcccgagaggcgcggacgtggagctatgggatgtcaagctcgaaaaccgcagcggcaggcccagaaagataagcgtgttttcctatgccgaaatgagctggcatcagattgacggcgacaataaaaattttcaaagtaccttatactgcgccggggcttcgtacaaggacggagttatcgagcaggaactccattacgaggaaaacgcttatcagttctttacagccgattttgttccggacggtttttga

SEQ ID NO: 32202 - protein, 205 aa, Unknown
  Obtained from environmental sample
  DOMAIN (1)...(63): Putative carbohydrate binding domain
  misc_feature (1)..(205): Xaa is any amino acid
MRYGYFDNTECEYVIERVDTPMSWTNYIGTENMIGVFNQTCGGYLFYKSAEHHRITRFRGNAVPTDRPGHYIYLRDDETGDYWTISWQPTAKPVECYRARHGLSYSVYSCEYSGIYAEQTLFIPRGADVELWDVKLENRSGRPRKISVFSYAEMSWHQIDGDNKNFQSTLYCAGASYKDGVIEQELHYEENAYQFFTADFVPDGF

SEQ ID NO: 32203 - DNA, 732 bp, Unknown
  Obtained from environmental sample
  misc_feature (1)..(732): n is a, c, g, or t
atgcagttagtacgccaagccgtcgccatgggccgcgccctgcgcagccgctttaccataaagacccgccaaccgctcagcgagttcacagtcgtcctctccgatcgcaagaagatcgacctcattagggatatggaggagcttgtcaaagaggaattaaatgtcaaaaaggtaatctttgacagtgacgaagaacgagtggtaagcatatcagccaagccgaacttcaaaaaactgggcaaggtctttgggcctaagatgaaagacgcgggcgcgttgatagaacaattcagcgccgcggatataaagaaacttgagggcggcgcggcgattgacgtgatgggaaccgcgctggcctacggcgacatagaggtccgccgcgccaaacgcgaaggattggaggtggagacggagggcgaactcactgtggcgcttgaggtcacaatcacgcctgaactaaaacgtgaatgcgtggcgcgcgagtttgtcaaccgcgtacagaataggcgcaaagagataggcctaaacgtagccgaccgaatcgtcatacgctactcgtcgcccaaagagatcgaggacgcgctcgccgatttccgcgattacgtatgcgccgaaacgctggccgtcaatatagagagcgttccatcagtgacaatcaacaacgccgagagcgttgaggtagagggaatggatgtgacgatcggcgtggaaaaaacggaacaaggcggttga

SEQ ID NO: 32204 - protein, 243 aa, Unknown
  Obtained from environmental sample
  misc_feature (1)..(243): Xaa is any amino acid
MQLVRQAVAMGRALRSRFTIKTRQPLSEFTVVLSDRKKIDLIRDMEELVKEELNVKKVIFDSDEERVVSISAKPNFKKLGKVFGPKMKDAGALIEQFSAADIKKLEGGAAIDVMGTALAYGDIEVRRAKREGLEVETEGELTVALEVTITPELKRECVAREFVNRVQNRRKEIGLNVADRIVIRYSSPKEIEDALADFRDYVCAETLAVNIESVPSVTINNAESVEVEGMDVTIGVEKTEQGG

SEQ ID NO: 32205 - DNA, 1728 bp, Unknown
  Obtained from environmental sample
  misc_feature (1)..(1728): n is a, c, g, or t
gtggggcaatgcaatgattacgccctgatcgaaaaaaaagcggccaaaatcggcgttggcaaggtagttattattaacgcaagggatgagtttattaccgactttatctatccaatggttaaggcgaacgccgtttatgagggcaaataccttcttggaacctccgccgcccggcccctgatcgcgaaaaagctggtcgatctcgcccttgccgaaggcgcgaacaccatttcccacggggctacgggcaagggcaatgaccagatacgttttgagctgaccataaaagcctttgcgccctggatgaagatcatcgcgccctggcgcttgtgggacattaaatcccgcgaagaagaaataaagtatttgcaggatcgcgggattgaagttcccatgaaaaccgagcagagctacagccgcgacgacaacgtatggcatttaagccatgaggggcttgagcttgaagaccccgcccaggagccggattacaaaaaattattacaactgacagtcaggccggaagacgcgccggataagccggagtatgtggagctgggctttgagaaaggcatccccgtcagcctgaacgggaaagccgccgcgccccttgagctgctggagtcattaaataaaatcggcggcagaaacggcgtcggcatagtggacattgtcgagaaccgggtggtcggcatgaagtcgcgcggcgtgtacgaaacgccgggtggaagcatcgtgtacgcggcgcacagggaactggaaaatctgtgccttgaccgccagacaacatcgttcaaggcgatggtcggggcaaaagctggccgaattgatctatttcagagaatggtattcgccgttaagggaagcgctgtcggcctttgtggacaaaacccaggagaccgtcaccggcactgtccggctgaaattgtacaaggggaacatcattccggcgggcagcaagtcgccgtattcgttgttcaatatagaactgtccagtttcacaaccggaagcctctacgatcacagggacgcggacggtttcatcaaactgcttgggcttccaatgactgtccgcgctttgatgaaaaagtctgtagaggaaaagcgttgagcgaaaaattatggggggggcgcttttccggacagaccgatgagcaggccggcagctttcattcttccattgcgtttgactcaaggctttacaggcatgatataaagggcagcatagcccacgctcaaatgcttggcaaacaggggatcattcccatgcaggcttctgaggcgatagtaaaatcgcttgagggcattttagcagacatcgaaagcggcgcgttgaaaatagacatggacgccgaggatattcattcctttgttgagtccgagcttgtatcgcgcattggcgatcctggcaggcgtctgcatacgggcagaagccgtaacgaccaggtcgcccttgatatgcggatgtatgtaaaagaagagattgacgctgtaaccgctcttcttaaccaactgtttgacgcgctgcttgagaccgcaaaaaaacacaccgcttcgataatgcccggatacacccatctgcaaaaggcgcagccggttacgcttgctcatcatcttctggcctatgttcagatgttcaagcgggacaacgaaaggcttaagggctgccgcgaaagaaccgacgaaatgcccctggttccggggcgcttgcctccaccagctatccgctga

SEQ ID NO: 32206 - protein, 575 aa, Unknown
  Obtained from environmental sample
  DOMAIN (376)...(575): Lyase
  misc_feature (1)..(575): Xaa is any amino acid
MGQCNDYALIEKKAAKIGVGKVVIINARDEFITDFIYPMVKANAVYEGKYLLGTSAARPLIAKKLVDLALAEGANTISHGATGKGNDQIRFELTIKAFAPWMKIIAPWRLWDIKSREEEIKYLQDRGIEVPMKTEQSYSRDDNVWHLSHEGLELEDPAQEPDYKKLLQLTVRPEDAPDKPEYVELGFEKGIPVSLNGKAAAPLELLESLNKIGGRNGVGIVDIVENRVVGMKSRGVYETPGGSIVYAAHRELENLCLDRQTTSFKAMVGAKAGRIDLFQRMVFAVKGSAVGLCGQNPGDRHRHCPAEIVQGEHHSGGQQVAVFVVQYRTVQFHNRKPLRSQGRGRFHQTAWASNDCPRFDEKVCRGKALSEKLWGGRFSGQTDEQAGSFHSSIAFDSRLYRHDIKGSIAHAQMLGKQGIIPMQASEAIVKSLEGILADIESGALKIDMDAEDIHSFVESELVSRIGDPGRRLHTGRSRNDQVALDMRMYVKEEIDAVTALLNQLFDALLETAKKHTASIMPGYTHLQKAQPVTLAHHLLAYVQMFKRDNERLKGCRERTDEMPLVPGRLPPPAIR

SEQ ID NO: 32207 - DNA, 387 bp, Unknown
  Obtained from environmental sample
  misc_feature (1)..(387): n is a, c, g, or t
gtggaagcatcgtgtacgcggcgcacagggaactggaaaatctgtgccttgaccgccagacaacatcgttcaaggcgatggtcggggcaaaagctggccgaattgatctatttcagagaatggtattcgccgttaagggaagcgctgtcggcctttgtggacaaaacccaggagaccgtcaccggcactgtccggctgaaattgtacaaggggaacatcattccggcgggcagcaagtcgccgtattcgttgttcaatatagaactgtccagtttcacaaccggaagcctctacgatcacagggacgcggacggtttcatcaaactgcttgggcttccaatgactgtccgcgctttgatgaaaaagtctgtagaggaaaagcgttga

SEQ ID NO: 32208 - protein, 128 aa, Unknown
  Obtained from environmental sample
  misc_feature (1)..(128): Xaa is any amino acid
MEASCTRRTGNWKICALTARQHRSRRWSGQKLAELIYFREWYSPLREALSAFVDKTQETVTGTVRLKLYKGNIIPAGSKSPYSLFNIELSSFTTGSLYDHRDADGFIKLLGLPMTVRALMKKSVEEKR

SEQ ID NO: 32209 - DNA, 717 bp, Unknown
  Obtained from environmental sample
  misc_feature (1)..(717): n is a, c, g, or t
atgtggcgcgtgcgttccgtgagcttcaagggcaacaagacctacggcaagaaggatcttcaaagtctgatggaattgaagcgcaagtcgcgttttaccaactacctgatgaaatccgatttaagcgcgttgaccgcgttctacaagaacggcggtttcgagtacgtgagcgtcaagtccgaaagcgtggagcgtgacagcgtaaagcgcagggtggctatccacatctccgttgaggaggggccgcgcattcatgtaagcgaggttaacgtggacgcggagcgtttcgcgcccggtccgtccgttatgcgcaggctcgcgaccaaacccggcgcgccgctcgtacactccgacgtgcgccaagattgccgcaaactgaaggagatcgccggcgagcgtggatttatggaggccatagtggaaccggaggtcatggtagacactgtcgaacatcaggcaagcgtggtattcaaggtgagggagggcccggtagtcactatcggcgatataaatatcaagtcgaagggattcaagagctacaccatcaggcgggagctctccatacgcagcggcgacacgctgaatctccgtaacgtacgggagtccgagcgcaatctctacaccaccggtctcttcaactacgtgcagataaagccngatgttcgattccaccgtcgacgccgggaattgccggacagcgtcactcgtgcgatctga

SEQ ID NO: 32210 - protein, 238 aa, Unknown
  Obtained from environmental sample
  DOMAIN (84)...(162): Surface antigen variable number repeat
  misc_feature (1)..(238): Xaa is any amino acid
MWRVRSVSFKGNKTYGKKDLQSLMELKRKSRFTNYLMKSDLSALTAFYKNGGFEYVSVKSESVERDSVKRRVAIHISVEEGPRIHVSEVNVDAERFAPGPSVMRRLATKPGAPLVHSDVRQDCRKLKEIAGERGFMEAIVEPEVMVDTVEHQASVVFKVREGPVVTIGDINIKSKGFKSYTIRRELSIRSGDTLNLRNVRESERNLYTTGLFNYVQIKPDVRFHRRRRELPDSVTRAI

SEQ ID NO: 32211 - DNA, 402 bp, Unknown
  Obtained from environmental sample
  misc_feature (1)..(402): n is a, c, g, or t
atgcctggcgcgaaaataggtaaaaaatgttctattgggcaaaatgtaaatgtaggttcccgtgcgattataggtaatggagtaaaaatccaaaacaatgtttctgtttatgatgatgtaattattgaagatgatgttttttgcggtccttcctgtgtatttaccaatgtaataaacccgcgcgcctttgttgaacgtaagcatgaatataaaatgactgtagtaaaaaaaggcgcgagtataggggcgaacgcgacaattgtttgcggcgtaaccattggggaatatgcgcttatcggcgcgggcagcgtagtaacgcgggatattcccgcttacgcgcttgtgtatgggaatccggcgcgtgtacaggggaaagtagatgagaatggggagaaagtgtaa

SEQ ID NO: 32212 - protein, 133 aa, Unknown
  Obtained from environmental sample
  misc_feature (1)..(133): Xaa is any amino acid
MPGAKIGKKCSIGQNVNVGSRAIIGNGVKIQNNVSVYDDVIIEDDVFCGPSCVFTNVINPRAFVERKHEYKMTVVKKGASIGANATIVCGVTIGEYALIGAGSVVTRDIPAYALVYGNPARVQGKVDENGEKV

SEQ ID NO: 32213 - DNA, 591 bp, Unknown
  Obtained from environmental sample
  misc_feature (1)..(591): n is a, c, g, or t
ttgttttttaaggatgcgcaaatgcggaataaaataataaatacggctgatgaggctgtggccccaatcaaagacggggccgttattatggtcggcggttttatgacttgcggtactccggaaattttaattgacgcgctggttaagaaaggcgtaaaaaatttaaccattatttgcgacgacggcggatggccggacaagggcgtcggcaggctcatagccaacggacaggcaaggcgcctaatcgcgtcccatgtggggcttaatcccgaagtcgcaaggcgcagcaataccaatgacgaggccgacaagctcgaattgacgctggttccccaggggacgctcgccgaacgcataagggcgggcggcgcgggacttggcggcgttcttactcctacaggagtggggactataataaccgagggcaaacagcttgttaatattgacggcagggattttctgctggaaaaacccctccgcgccgatttcgcctttatcagggcttccagaattgacaaaatgggaaacacggttttcttcgggacaacaaggaatttaacccccttatggcgaccgccgctgactatgtaa

SEQ ID NO: 32214 - protein, 196 aa, Unknown
  Obtained from environmental sample
  DOMAIN (13)...(194): Coenzyme A transferase
  misc_feature (1)..(196): Xaa is any amino acid
MFFKDAQMRNKIINTADEAVAPIKDGAVIMVGGFMTCGTPEILIDALVKKGVKNLTIICDDGGWPDKGVGRLIANGQARRLIASHVGLNPEVARRSNTNDEADKLELTLVPQGTLAERIRAGGAGLGGVLTPTGVGTIITEGKQLVNIDGRDFLLEKPLRADFAFIRASRIDKMGNTVFFGTTRNLTPLWRPPLTM

SEQ ID NO: 32215 - DNA, 1329 bp, Unknown
  Obtained from environmental sample
  misc_feature (1)..(1329): n is a, c, g, or t
atgacggcattttccgcgtgccggaaagaaaagtcaaaagggacgggagggcgcggcaagcacgcggccattaccgttgaagtttttgaccgcggcactgacggcggcaagaccaatccggccaataacgcctggacggactggattaagaaaaaagttttggaagacgaaaacatcgccgtcacctttatcccgattccccgccatgaggacacgcaggcgctgaacgccatgatggcggcaggcaccgcgcctgacctctgttatacctattcggcggatttgataacccattacggagagcttggcgggctggttgatctggccccttatgtcgataccctgctcagggattgcaagcagtttctgggcatggatccgggcataccgggcgaatacctgatttaccgcggacgtgatcttgatacaggaaaaatgttttttattccggggcgttatatgtataccgcttcgcagaatttatttatccgcaaagactggcttgataaactcgggcttcctttgccttcaaccaaagaagaatactacaacgcgcttttggctttcaaggaaaaggatccgggcggggttggcaaaagccgcgtcgtcccctttaccatgacaaaagacgcgcgctggagggcgggaattatcctcgatccgtttatcgatccgtccctcagcccgaaagagcgctggatcaatacggtggtcgaacggtatatactcctgcccggctacaaagaaggttttcgcttccttaacagaatgtataacgacgggcttatcgacagggattttccgttgtacaattccgacgaggcttccgacaacctggttaaaagcggcgtggtaggatcgctggcgggcaactgggatcatatttaccgtgataataccaaggtgctggaagatttacgcaagaacgtgcccggcgcggatctggttcccattgacgcgattcagggcgttgacggcctgacgcacaagcggggttccccgccgacagccctgctctggtttgtttccaaaagcgcgaaaaaccccgaagcggctatccgttatgtgaactggctttcccgttttgagaattaccattttctgcaggtcggccaggacggaatcaaccacgatacagttgacgggattccaaaaataaaatccgcggccggcccctggattcaaaactccgcgggcaacggcgactatgcctttaccctgaacggctatgacctgggcgatccggaacttaacgtgcgggtgctagccaacagttacaactggccggcgggaggtgattaccgaagcctaccgaatttcatcgactaa

SEQ ID NO: 32216 - protein, 442 aa, Unknown
  Obtained from environmental sample
  misc_feature (1)..(442): Xaa is any amino acid
MTAFSACRKEKSKGTGGRGKHAAITVEVFDRGTDGGKTNPANNAWTDWIKKKVLEDENIAVTFIPIPRHEDTQALNAMMAAGTAPDLCYTYSADLITHYGELGGLVDLAPYVDTLLRDCKQFLGMDPGIPGEYLIYRGRDLDTGKMFFIPGRYMYTASQNLFIRKDWLDKLGLPLPSTKEEYYNALLAFKEKDPGGVGKSRVVPFTMTKDARWRAGIILDPFIDPSLSPKERWINTVVERYILLPGYKEGFRFLNRMYNDGLIDRDFPLYNSDEASDNLVKSGVVGSLAGNWDHIYRDNTKVLEDLRKNVPGADLVPIDAIQGVDGLTHKRGSPPTALLWFVSKSAKNPEAAIRYVNWLSRFENYHFLQVGQDGINHDTVDGIPKIKSAAGPWIQNSAGNGDYAFTLNGYDLGDPELNVRVLANSYNWPAGGDYRSLPNFID

SEQ ID NO: 32217 - DNA, 1158 bp, Unknown
  Obtained from environmental sample
  misc_feature (1)..(1158): n is a, c, g, or t
atggccgagccttattcgccgcttccgttacaggcaaccaaggccgcctttgcgcaggaacttatcaagcggcttgaaaaaatggagcgcattgagattccagaaaacttaaaaaagataagtatcagttttccgccgccgccccattcgccgcgcgtagccctaacgctggaagcgatttccaaaagctatggcgaaaggcaggttctctcgtaccttgacctagcccttgacgccggtgagcggctgcttgtggcaggccccaacggcgcggggaaaaccacgctgctaagaattattgcaggcggggatacagattacgaagggatagtcaaatacggcgcgggtatttccaccagctacttttcgcagaacgcggcggaaaacctttcaggcagccagacggtagagcaatacatcgagagcgaagcacccacacacctgattccaaaagtaaggggaatgctaggggcctttcttttcaggggcgatgatgttttcaaatccctttcggtattgtcaggcggtgaaaaaagccggcttgccatgctcaggatgcttcttaaacccatgaaccttttgatattagacgagccgacaaatcacctggatttacagagcaaggacatactgcttgactgtcttaaagctttcgaggggacaataattttcgtttcgcacgaccgtggttttatggaagccctgtctacaaagacactggagctgtccatcgggaaattagcgggtgaagctgaaccgaagcggcggcatcgtcttttttacggcaactacgcttattatctggatcgcatagcaaaggaagaggcaggagagataagcacaggtgacaatcttgagttacaacctacaaaaagccagccgacctcagaacgccgggaacaggaaaagcaaaagcaggcccttgtgcggcggcttgagcggcaagaaacagaaacgctttcggtcatggaaaaactggaaaccgaaaaaaagcgccttgaagaagaacttggcaagccggaagtttactcgtcaggagaaaaagccagggccgttaagctcgctgtggacgaaactgcggcggcccttgaaggtaaatccagggaatgggaaagcattgccggggagctggaaagggcgaggaaaagcgccctgtaa

SEQ ID NO: 32218 - protein, 385 aa, Unknown
  Obtained from environmental sample
  DOMAIN (80)...(245): ABC transporter
  misc_feature (1)..(385): Xaa is any amino acid
MAEPYSPLPLQATKAAFAQELIKRLEKMERIEIPENLKKISISFPPPPHSPRVALTLEAISKSYGERQVLSYLDLALDAGERLLVAGPNGAGKTTLLRIIAGGDTDYEGIVKYGAGISTSYFSQNAAENLSGSQTVEQYIESEAPTHLIPKVRGMLGAFLFRGDDVFKSLSVLSGGEKSRLAMLRMLLKPMNLLILDEPTNHLDLQSKDILLDCLKAFEGTIIFVSHDRGFMEALSTKTLELSIGKLAGEAEPKRRHRLFYGNYAYYLDRIAKEEAGEISTGDNLELQPTKSQPTSERREQEKQKQALVRRLERQETETLSVMEKLETEKKRLEEELGKPEVYSSGEKARAVKLAVDETAAALEGKSREWESIAGELERARKSAL

SEQ ID NO: 32219 - DNA, 795 bp, Unknown
  Obtained from environmental sample
  misc_feature (1)..(795): n is a, c, g, or t
ttgcgtgcctgcaggtcgactctggaggatcccaccaaaataaacctggacgagcttgcgtaccactggaattttgatccggggcaggacaccggcattgccagaatcaaaataaaagacctggagcttaattttgaatataccaagattcgctcgacagggacacagtcctggcgttttgaagggacacctttgcaaatgaatctgcgttcagataccacgctggcggtacaatttaccgaagaaaacggagtactgcgaaccctgctttttgttgctctgccttccccggttgatgacattgtcttacaggaaaccgcgcgccgggaagaacttttccgcaatctttatgatcttggaccggtatacatcagcaacaattacggtactctgaccttttacgaggacgggcgtttttcctggatcggcaattaccttttggtgcctcaagtgatttcaccaacggcgctggggagcggcgttatggatatgcggctccatgtgtccgatgtgttaagcagccgctatgacggagcgtttacaatgcgctttgacggagtcggcggcatcaggacaacaacggatttcatttacgccatcgatccgcagggccttagaatggaatatgtgcccgagacaagcctggacggaattatcgtcgttaggcgggcttcttctcctgtggtgatttacttctttagaaacgattttcaggacgacagctcttccttattcccacaagactatgagggggaggatagcgattcggaattcttgtttgagttaatgaactga

SEQ ID NO: 32220 - protein, 264 aa, Unknown
  Obtained from environmental sample
  misc_feature (1)..(264): Xaa is any amino acid
MRACRSTLEDPTKINLDELAYHWNFDPGQDTGIARIKIKDLELNFEYTKIRSTGTQSWRFEGTPLQMNLRSDTTLAVQFTEENGVLRTLLFVALPSPVDDIVLQETARREELFRNLYDLGPVYISNNYGTLTFYEDGRFSWIGNYLLVPQVISPTALGSGVMDMRLHVSDVLSSRYDGAFTMRFDGVGGIRTTTDFIYAIDPQGLRMEYVPETSLDGIIVVRRASSPVVIYFFRNDFQDDSSSLFPQDYEGEDSDSEFLFELMN

SEQ ID NO: 32221 - DNA, 831 bp, Unknown
  Obtained from environmental sample
  misc_feature (1)..(831): n is a, c, g, or t
atggcctttgtccagttttccagggtctgccttgcttttgctgatcgtgacatacttaaagacgtaagcctcaatcttgcttctggttcccgtgcggctctggcaggggctaacggggcgggcaaatctactttaatgaaggtcattgccggaaaactccctgctgattcaggcgagcgttcggtgcagaaaggttgccgcgtctcttacctgccgcaatcgggtattgtacaccagggcaaaaccctaagggaagaagctgaaaccgcttacgaaagtatcttgctgctcattgcgcgggtggaagaattgggcagggagcttgaaaaaaccacaggggactcaggccgcacccgcacgcttctggaagagcatcaccgtctattgaacgaagttgaaaattcaggctattaccgccgggatgcggttatctctcaggttctttcggggttgggattttccgaaagtgacgtggagagggaaaccggagaattttcaggcggttggcagatgcgcattgcccttgcaaaaattcttttggaaaatcctgacatcatgcttttggacgagccgaccaattacctggacatagaagcccgcacctggcttgaatcatggctggaatctttttcaggtggctgccttcttgtttcccatgaccgttattttcttgacgttaccgtaaatgaggtctatgaaatctttcaggggaacctaaagcgttatgtgggtaattacagtacctacgagaagatccgcgccgctgaactggaaagcctgngtaagcgctatgagcttcacaggaggaaattgaaaaaaccgaagcgttga

SEQ ID NO: 32222 - protein, 276 aa, Unknown
  Obtained from environmental sample
  DOMAIN (29)...(237): ABC transporter
  misc_feature (1)..(276): Xaa is any amino acid
MAFVQFSRVCLAFADRDILKDVSLNLASGSRAALAGANGAGKSTLMKVIAGKLPADSGERSVQKGCRVSYLPQSGIVHQGKTLREEAETAYESILLLIARVEELGRELEKTTGDSGRTRTLLEEHHRLLNEVENSGYYRRDAVISQVLSGLGFSESDVERETGEFSGGWQMRIALAKILLENPDIMLLDEPTNYLDIEARTWLESWLESFSGGCLLVSHDRYFLDVTVNEVYEIFQGNLKRYVGNYSTYEKIRAAELESLXKRYELHRRKLKKPKR

SEQ ID NO: 32223 - DNA, 945 bp, Unknown
  Obtained from environmental sample
  misc_feature (1)..(945): n is a, c, g, or t
atgagtgacgaggaaaattacgaagaagacataaattctcttgaagacaacccgcaagaagagcctatagacggcgggtcgattataaccggagaagatctatcatcgttgacccaggatacgccggtataccgccttcgccttgtatattcccgggaaacttttcaggcagcatgggccggcgaaacccttgagccgggaaccagggtgcttgtaccgacccgttacggcagggatctggccgaggttatttattcaatccaatgcgaagccgggcaaattccccaggccgttaccaggattgaaaggatcgcaggagatgacgatatatccagggccactgcgcataagcagcaggaaaaagaagcctttgatgtatgcaagaaaaaaatcgaaatacataaactggatatgaagctggtttctgtccattacattctggaagaaccgaaaattctttttttcttcactgcggaaagccgggttgacttcagggaactggtaaaagatctggtaaatatttttaagaccagaatagaattacgccaaatcggagtccgggacgaatcgcgggtattgggtggtcttggcgtttgcggaagatgctactgctgccacgctgtttctgacaaactaaagcctgtttccataaaaatggcaaaagatcaaaacctgtccctgaattccacaaaaatatccgggccttgcggacgccttctctgctgtctggcctatgaacacctgttttacggtgaacagcgcaggcttatcccctgtgagggaacaagaatcttctgggacggctccaactggaaggttgcggaaataaacgttgtagtaggcaagctaagactcagcaccgacgacggccgagtggtccaactgccccttgaggcgtttgaaaaaaacgaaggccgctggacaatcaacgctcagtcaaaataa

SEQ ID NO: 32224 - protein, 314 aa, Unknown
  Obtained from environmental sample
  DOMAIN (97)...(184): PSP1 C-terminal conserved region
  misc_feature (1)..(314): Xaa is any amino acid
MSDEENYEEDINSLEDNPQEEPIDGGSIITGEDLSSLTQDTPVYRLRLVYSRETFQAAWAGETLEPGTRVLVPTRYGRDLAEVIYSIQCEAGQIPQAVTRIERIAGDDDISRATAHKQQEKEAFDVCKKKIEIHKLDMKLVSVHYILEEPKILFFFTAESRVDFRELVKDLVNIFKTRIELRQIGVRDESRVLGGLGVCGRCYCCHAVSDKLKPVSIKMAKDQNLSLNSTKISGPCGRLLCCLAYEHLFYGEQRRLIPCEGTRIFWDGSNWKVAEINVVVGKLRLSTDDGRVVQLPLEAFEKNEGRWTINAQSK

SEQ ID NO: 32225 - DNA, 372 bp, Unknown
  Obtained from environmental sample
  misc_feature (1)..(372): n is a, c, g, or t
atgactcntgatctgcctcaaaaatttaaaaaattgggctattcatttaaccgtgtagctacttacaaattgncggaagacgtctacgcccaaattgacgctatgcttgaaaacggagaacaggcggttgcggtagaagtaaaaacaacattacggcaatcggacatagacgaacaccttgtacgcatggaaaagatacggaaatacgccgatgaacataaggacaaaagacaattcatgggagcagtagccgctacaattaccgacaaatcaaccagagaatatgctttgaaaaaggggctttttgtcattgaaccaaacggagaaaatgtcaaagttataaagcctctggaagaaccgcggatttggtga

SEQ ID NO: 32226 - protein, 123 aa, Unknown
  Obtained from environmental sample
  misc_feature (1)..(123): Xaa is any amino acid
MTXDLPQKFKKLGYSFNRVATYKLXEDVYAQIDAMLENGEQAVAVEVKTTLRQSDIDEHLVRMEKIRKYADEHKDKRQFMGAVAATITDKSTREYALKKGLFVIEPNGENVKVIKPLEEPRIW

SEQ ID NO: 32227 - DNA, 1017 bp, Unknown
  Obtained from environmental sample
  misc_feature (1)..(1017): n is a, c, g, or t
ttgaatatgaggctgcgccttctcctgttattaatatgttcacactgtgtttttacccaaaacaataataaaatacaactgtccgagtatctttggcggcaggcggcaggcggcgtggtgttggggacgccttccgcgaggccgcagtccgttgttgtagcgttggacagcggggtcgtaaaagcctactccggctcaggggatctgttatggagttatggggtacgcggcaggttatgcccctatgtaacgcgatcgcgcgagggaataacatttatctgctctacggacggaatccttatagcggttaacagcatagggagggaactctggatggcaaacgcgggcggggcgctgtccggccccatagtcacgggctgggacggaaggatttttgtcccaaccggaaaaaaaatttcatgttatacgtcttccgggacccttctttggttaaacgaaccgggaagcggaatcgccgccggcccctttctcgatcaaagcggctgcgtactgctggctctggaagacagccggcttattcgcataacgcctttcggggtcgtcagttcctggaaactgccctctgtccccgccgttctggtcccgctggataattacatccttgccctgtacgccaacggcaatgtccagcgcgtcgattcttctacggaaggttccgcccccctcccctttcccggccttaccgccaggcccctggcggcggccgtaagggacggcagggcggctgtttttcttgccacgggcagatactgctgctttccggcagcgacgggaaagttctctggaccgccggcagttttatccggcctgtgtcggagcaaaaggcggatcttattttcgacgagaggggaatctacgcgttatgcgacggaggagtcgcaagtatttcagctaacggcagactgctttggtacgcaaaccttgagaacgcatcaggcgttccggcgctcagcgacgacggggttttgtactcctgcgggaaagactgggtattaa

SEQ ID NO: 32228 - protein, 338 aa, Unknown
  Obtained from environmental sample
  SIGNAL (1)...(19)
  misc_feature (1)..(338): Xaa is any amino acid
MNMRLRLLLLLICSHCVFTQNNNKIQLSEYLWRQAAGGVVLGTPSARPQSVVVALDSGVVKAYSGSGDLLWSYGVRGRLCPYVTRSREGITFICSTDGILIAVNSIGRELWMANAGGALSGPIVTGWDGRIFVPTGKKISCYTSSGTLLWLNEPGSGIAAGPFLDQSGCVLLALEDSRLIRITPFGVVSSWKLPSVPAVLVPLDNYILALYANGNVQRVDSSTEGSAPLPFPGLTARPLAAAVRDGRAAVFLATGRYCCFPAATGKFSGPPAVLSGLCRSKRRILFSTRGESTRYATEESQVFQLTADCFGTQTLRTHQAFRRSATTGFCTPAGKTGY

SEQ ID NO: 32229 - DNA, 318 bp, Unknown
  Obtained from environmental sample
  misc_feature (1)..(318): n is a, c, g, or t
ttgccaccccaagcgttaatcctagtattaatcccaatattagtacagatgcgaatgttgccgctaatccaaatattagcgttaacgccgctgtcaatcgcagtgtcgatccagctattaattccaacattaatatcgctgtcaatcccgattccaaccccaatcccggtgttaatcccagtgttaatccggttgtcaatcccggtgtcggtaccaatgttaatgcggttgatgctaatacgaatatcaatcccaacgcagacgtcaatcccgccccaagcgctacggacagtcgtcccgacgattttttacagatag

SEQ ID NO: 32230 - protein, 105 aa, Unknown
  Obtained from environmental sample
  misc_feature (1)..(105): Xaa is any amino acid
MPPQALILVLIPILVQMRMLPLIQILALTPLSIAVSIQLLIPTLISLSIPIPTPIPVLIPVLIRLSIPVSVPMLMRLMLIRISIPTQTSIPPQALRTVVPTIFYR

SEQ ID NO: 32231 - DNA, 765 bp, Unknown
  Obtained from environmental sample
  misc_feature (1)..(765): n is a, c, g, or t
gtgggcggcgttcgtccacggcatagaccgccccgcgttcctcgacagcacgaaggtaggcgtggtgctgaaagactctccggcgtggatcgccggctttatggccggcgacagcatcgtctcaataaacggcacgccggtctcgacttgggagcaggtggatatgcacctgtcgcagcaattgggcagcggctacaatattgcgttgttacgggcgggaaatcccttggaactcagcttacacgtggaacggacgggcgctcatctgccgaagatgctttcgggcggactgatgccggcccgctacccgccggtcatcggcggggtgaaacccaaaagcggcgcggagggtctgctggaggtcggcgacaccctcctcgccctcaaaggcgtcccggtcgccaccttcgaccacttcgcaatgctgatgcgggattacgacccggacgcagacggcgaaccggcagcctctatcaacatcaaacgcggctcggaactcatgcacgtcttcgtcatccccacatacgactccacggaacaccgctacctgctcggcatagagccgacgccggagccgacgcggatcgtccgctacggggctatgacggcgctaggcccaacaataaacaaaacgtgggagtactccgcgatgatcttcgacgtgctgggcaaactgaccagcggaaaagtccccgcgagccaactcgccggcccgctcaacatcatccccgtctccggcatgatggccttccaaggcctgtctag

SEQ ID NO: 32232 - protein, 254 aa, Unknown
  Obtained from environmental sample
  misc_feature (1)..(254): Xaa is any amino acid
MGGVRPRHRPPRVPRQHEGRRGAERLSGVDRRLYGRRQHRLNKRHAGLDLGAGGYAPVAAIGQRLQYCVVTGGKSLGTQLTRGTDGRSSAEDAFGRTDAGPLPAGHRRGETQKRRGGSAGGRRHPPRPQRRPGRHLRPLRNADAGLRPGRRRRTGSLYQHQTRLGTHARLRHPHIRLHGTPLPARHRADAGADADRPLRGYDGARPNNKQNVGVLRDDLRRAGQTDQRKSPREPTRRPAQHHPRLRHDGLPRPV

SEQ ID NO: 32233 - DNA, 936 bp, Unknown
  Obtained from environmental sample
  misc_feature (1)..(936): n is a, c, g, or t
ttggacggacgtttgcgtatgttgccttcaggggggcagagctggaatttcaaggagttagccggaagcagggtcgatatgtattttcgaacgcttttcggcgagacggttagggggtgccgtagagcgtggaaaggcggcgagaataggacgaaaatttttattaacatgagtattgataaggatttaggtattaacgccgggattgatagcgacgaaatttaccgtttgaccgttacgcctgacggggtggatatgcgctcgccgtcgcagcgggggttgttccgtgcgacggctacgttggtgcagatgacgatcaatgatcctgacggcataccctgcgtcgacatcctagattggcccgacttccccgtccgcgggttctatcacgacgtgacgcgcgggcggatgcctactttggagagtctcaagcggttggccgatactttggctttttacaaactcaaccaactgcaactctacgtggagcacaccttcgctttctccatgataccggagttctccacgccctactcgcatctaatgcggcttaccgcccacgagatccgtgaacttgacagttactgcgccgaccggtgcgtagatctcgtgccgtcgctctccacattcggccatctatacgaactgctgcgtctgccgcgtttcgagcatttaaacgaactcgatataaaggcgtcggaaacgccgcgcgatctgtgggacaggatggcccactatacgctcgacgtcagcaaccctgagagcttcgagttggtcaagggcatgattgaggagtacgcgccgcttttctcatccccgtggttcaacatctgctgcgacgagaccttcgacttgggcaagggcaagaacgccgagcgggcggaaccgcgagggggtggggcgtctatatgtcgaaattcgtcaacaagaatatag

SEQ ID NO: 32234 - protein, 311 aa, Unknown
  Obtained from environmental sample
  DOMAIN (123)...(311): Glycosyl hydrolase family 20, catalytic domain
  misc_feature (1)..(311): Xaa is any amino acid
MDGRLRMLPSGGQSWNFKELAGSRVDMYFRTLFGETVRGCRRAWKGGENRTKIFINMSIDKDLGINAGIDSDEIYRLTVTPDGVDMRSPSQRGLFRATATLVQMTINDPDGIPCVDILDWPDFPVRGFYHDVTRGRMPTLESLKRLADTLAFYKLNQLQLYVEHTFAFSMIPEFSTPYSHLMRLTAHEIRELDSYCADRCVDLVPSLSTFGHLYELLRLPRFEHLNELDIKASETPRDLWDRMAHYTLDVSNPESFELVKGMIEEYAPLFSSPWFNICCDETFDLGKGKNAERAEPRGGGASICRNSSTRI

SEQ ID NO: 32235 - DNA, 429 bp, Unknown
  Obtained from environmental sample
  misc_feature (1)..(429): n is a, c, g, or t
ttggaaaaagcgcaagctattgccgccgatccgcaattgggcgctgaggaaaaattgttatcagtgattatggcgcaaagactgaaaaaaccgataaagaaaaatattttaccgattattcataaacctgcaaatgcgttacttcaccagaaaattatttccgaatatgtccttagacttagtcccattctaactgatattgttcaagaggggatcgccaaaaaagattttaatactccatatcccaaagaaattaccgagatacttttgactgccggtttggttattttcgataccgcctacttccgctggacacaggaagaacagacgcggcgtatttccgcctttatttatactatggaacggctaacgggagcaaaaccgggaagtatggcgcaattatccggtatgtttaaaacaaaccactaa

SEQ ID NO: 32236 - protein, 142 aa, Unknown
  Obtained from environmental sample
  misc_feature (1)..(142): Xaa is any amino acid
MEKAQAIAADPQLGAEEKLLSVIMAQRLKKPIKKNILPIIHKPANALLHQKIISEYVLRLSPILTDIVQEGIAKKDFNTPYPKEITEILLTAGLVIFDTAYFRWTQEEQTRRISAFIYTMERLTGAKPGSMAQLSGMFKTNH

SEQ ID NO: 32237 - DNA, 888 bp, Unknown
  Obtained from environmental sample
  misc_feature (1)..(888): n is a, c, g, or t
atgcagggccactgcgacaatatacttgtagcccttgaagtgaatgatgtagtgcgtgtcgaggataacggccgtggtattcctgttgatatacattcaggcgaaggagtaagcgccctggaactggtaatgacgcggctccatgctggcggcaagttcgataaaaagtcgtataaagtgtccggcggccttcacggcgttggcgtatccgtggttaacgccctttcccagtggtgcgaagtttttgttcatgtggacggccgcgttcacacccagagttataaaaccggaattgccgacgggccggcccatgaaatctcgattgataagctcccctacccggctgacgccaatcgtcagggtactgtagtgcgctggaaggcggacgcttctatttttgagaccacaacccacaatttcgacgctctaagcaaccgtctgcgggaactggcctttcttaacaagggccttaaaatcacgattcgggatgaacgtctttccacccccaaagtccacgagtttaagtttgaaggcggggtaaaaagctttgtagaatacttgaacgaaaacaaaaccgtactgtacaaggagcctatttttattgatggtgtccgggacgacggattaggaggcagtgtagagattgagtgcgccattcagtacaacgacggtttcaacgagataatgtattcctttgtgaatgacatcaacacccgcgagggcggcacacaccttgttggttttaagtccgcccttacaagaacgctcaacgaatacctgaaaaaatccaaacacgccaaanaactggacgaaagcctttccggtgacgatgtgcgcgagggtctgaccgcagtgctttcggtgaaggtgggcgagccccagttttga

SEQ ID NO: 32238 - protein, 295 aa, Unknown
  Obtained from environmental sample
  DOMAIN (3)...(131): Histidine kinase-, DNA gyrase B-, and HSP90-like ATPase
  misc_feature (1)..(295): Xaa is any amino acid
MQGHCDNILVALEVNDVVRVEDNGRGIPVDIHSGEGVSALELVMTRLHAGGKFDKKSYKVSGGLHGVGVSVVNALSQWCEVFVHVDGRVHTQSYKTGIADGPAHEISIDKLPYPADANRQGTVVRWKADASIFETTTHNFDALSNRLRELAFLNKGLKITIRDERLSTPKVHEFKFEGGVKSFVEYLNENKTVLYKEPIFIDGVRDDGLGGSVEIECAIQYNDGFNEIMYSFVNDINTREGGTHLVGFKSALTRTLNEYLKKSKHAKXLDESLSGDDVREGLTAVLSVKVGEPQF

SEQ ID NO: 32239 - DNA, 486 bp, Unknown
  Obtained from environmental sample
  misc_feature (1)..(486): n is a, c, g, or t
ttggttaaaaacggcgatagctcgtttgatattaaggatattgtacgcaagcctttctttgttcccgaatcaaaacgcatcgacgacctcctgcgggaactgcgtcggcgcaaagtgcatatcgcggttgtcgtggacgagtacggcggggtttccggcattgtctgcatggaaaatattttggaagaaatcattggggatatacaggatgagttcgataatgaaaatgaggatgttttggatcttggcggcggggcctggctctgcgaaacaagggtcaatctggacgatctttccgggcgcatcgggattaaattccccgtggaaaagttcgatacccttgggggctttgtctttgaccttttcgggaagatacctgtaaaatacgagaaggccgtttgggaaggccatgattttattatacaggatatggaaggccacaagataaattcagtcaagatcattcttaacgagaaagaggaataa

SEQ ID NO: 32240 - protein, 161 aa, Unknown
  Obtained from environmental sample
  DOMAIN (80)...(158): Transporter associated domain
  misc_feature (1)..(161): Xaa is any amino acid
MVKNGDSSFDIKDIVRKPFFVPESKRIDDLLRELRRRKVHIAVVVDEYGGVSGIVCMENILEEIIGDIQDEFDNENEDVLDLGGGAWLCETRVNLDDLSGRIGIKFPVEKFDTLGGFVFDLFGKIPVKYEKAVWEGHDFIIQDMEGHKINSVKIILNEKEE

SEQ ID NO: 32241 - DNA, 321 bp, Unknown
  Obtained from environmental sample
  misc_feature (1)..(321): n is a, c, g, or t
atgaggctcgatcaattcctgaaagctacacatctggtcaagcgcagggagctggcaaaggaactgtgcgatgatggctgcgtccgcataaatggctcgccacgcaagcccagtgccgaagtgttgctaggcgatgtcttggacctccctgtctacaaccgcatactgaaagtcagggtgctggacatccccaagggcaacacgcccaagggcagccagtgggccttcatcgaagtcttggaggagaaacgtttccccgttgacgatggctccgcctccgacttccctggcagccaagtaaagccgccgacgtaccactga

SEQ ID NO: 32242 - protein, 106 aa, Unknown
  Obtained from environmental sample
  DOMAIN (1)...(47): S4 domain
  misc_feature (1)..(106): Xaa is any amino acid
MRLDQFLKATHLVKRRELAKELCDDGCVRINGSPRKPSAEVLLGDVLDLPVYNRILKVRVLDIPKGNTPKGSQWAFIEVLEEKRFPVDDGSASDFPGSQVKPPTYH

SEQ ID NO: 32243 - DNA, 453 bp, Unknown
  Obtained from environmental sample
  misc_feature (1)..(453): n is a, c, g, or t
atggggctggataagaacataaaaaaaacaatggtcataggttccggccctattgttatagggcaggctgcggagtttgactacgccggaacgcaggcctgccgcatgctgcgcgaagacgggattgagattgtccttgtcaattccaaccccgcgactataatgaccgataataacatcgccgacaaaatatacattgagcctctgacccttccaaccgttaagcgcataatagaaaaggaaaagccggacagcatattatccggactcggcggacagacagggcttacgctgtgcatgcagcttgcccgcgacggctttcttgataaaatgaacgtgcgtcttttaggttcctcgcccgaaactatcgacaaggcgggaagaccggaaaatattcaaggaaaccatgcagggcataggacagccctgcgttccctcggtaatcgcgcatga

SEQ ID NO: 32244 - protein, 150 aa, Unknown
  Obtained from environmental sample
  DOMAIN (6)...(126): Carbamoyl-phosphate synthase L chain, N-terminal domain
  misc_feature (1)..(150): Xaa is any amino acid
MGLDKNIKKTMVIGSGPIVIGQAAEFDYAGTQACRMLREDGIEIVLVNSNPATIMTDNNIADKIYIEPLTLPTVKRIIEKEKPDSILSGLGGQTGLTLCMQLARDGFLDKMNVRLLGSSPETIDKAGRPENIQGNHAGHRTALRSLGNRA

SEQ ID NO: 32245 - DNA, 411 bp, Unknown
  Obtained from environmental sample
  misc_feature (1)..(411): n is a, c, g, or t
gtgataaaccaaaaatataaagataaaaccatgctgttgctgggcccgggcagatgggggacgactacgccgtcattgggagttccggtacatttcagcgaactttgcaacatggcggccatgtgtgaagtgtcgtatccaaaagctggcgtagtgccggatctgtctttcggcagccattttttccaggacatcgtggaatcggacgtcttttacgcggcgatttttcaaggggagccggacgtcgtattttgtccggagcaaattctggagagggaaaacctgtacggcaaacttcttgcaggagagaagaaactggattcgattatacatatcgccgaaacgcccggtctgatcttacattcagatattacaaaccagaaactgttgatttactgggaacaggtatag

SEQ ID NO: 32246 - protein, 136 aa, Unknown
  Obtained from environmental sample
  misc_feature (1)..(136): Xaa is any amino acid
MINQKYKDKTMLLLGPGRWGTTTPSLGVPVHFSELCNMAAMCEVSYPKAGVVPDLSFGSHFFQDIVESDVFYAAIFQGEPDVVFCPEQILERENLYGKLLAGEKKLDSIIHIAETPGLILHSDITNQKLLIYWEQV

SEQ ID NO: 32247 - DNA, 1158 bp, Unknown
  Obtained from environmental sample
  misc_feature (1)..(1158): n is a, c, g, or t
atgggagatttttttaaaagattttnggggcatattaaaaacctttggggcaaatggtcaatattccagaaactgctccttgtcgggattgtcatcgtgcttattgccggcgtcgtcgctttgttcggcgtttcatccaggcccagctttgtgccggtttttagcacgccgataaacgatccggcagcgcttgacaacattgtgcggaggatcgaagaggaaggtgtaaaaaccattgtcacttccggagttgtccaggtagccgatgaaaacaccgcgcggcgtatgaggggtatacttatccgtgaagaccttgtccccaagggcacagacccctgggctcttttcgacaaggaacgctggaccgcgactgattttacgaataacgtaaatttccgccgcgcccagacccagatgataaccgaccacatcaaggcccttgatgatgttgataacgccaatgtcaccgttgtagtccccgagaaagagttgttccgatccgaccagaacccggtatcggcaagcgtgatcatcacccccaggccgggaagcgacattaccacaaaccgcaaaaaagtagaaggcatacagaaactgcttaagttcgccattgaagggctgagagacgaaaacatcgttattaccgaccaaaacggcctcgtattaaacgactttaccggaatggcggccatggatcgtttgaatatcagtgaaagggaacaaaaactgatacagcagttggaagccaaataccgcgccgacattttaagggccctgcaggccactttttccgctgaccgcatccgcgaccttaacatcaaaatagaaatggatatgtcgaagaaggctattcaaacaacggaattccttcctacgattataaagccacgaacccccggatccgcctatgacgattcggtaatagtcgaatccattacccgttcgagcagcgtatccaccaccggatggaaaggcacgggttttaaccccgaaggaccctccggcgttgagggccaggtccctccggctatgaaggatatgtcaaacctctacggccagatggagcagaaaaccgatgtcaataaccaggagatcggcgaaaagaagacacagatagacagcagtccccagatgaccgcgaacgtttcggtaacatga

SEQ ID NO: 32248 - protein, 385 aa, Unknown
  Obtained from environmental sample
  DOMAIN (31)...(230): Secretory protein of YscJ/FliF family
  misc_feature (1)..(385): Xaa is any amino acid
MGDFFKRFXGHIKNLWGKWSIFQKLLLVGIVIVLIAGVVALFGVSSRPSFVPVFSTPINDPAALDNIVRRIEEEGVKTIVTSGVVQVADENTARRMRGILIREDLVPKGTDPWALFDKERWTATDFTNNVNFRRAQTQMITDHIKALDDVDNANVTVVVPEKELFRSDQNPVSASVIITPRPGSDITTNRKKVEGIQKLLKFAIEGLRDENIVITDQNGLVLNDFTGMAAMDRLNISEREQKLIQQLEAKYRADILRALQATFSADRIRDLNIKIEMDMSKKAIQTTEFLPTIIKPRTPGSAYDDSVIVESITRSSSVSTTGWKGTGFNPEGPSGVEGQVPPAMKDMSNLYGQMEQKTDVNNQEIGEKKTQIDSSPQMTANVSVT

SEQ ID NO: 32249 - DNA, 693 bp, Unknown
  Obtained from environmental sample
  misc_feature (1)..(693): n is a, c, g, or t
atgggacggtcatacaagagaaaaacaacacttagaaaagatcacttaaaaaagaatgaggaaacgcttgacattgccgagttattgggnaaaacgcattttgaaatcatcatggctttttctgaagcgttggaagccagagacgagtatacagccggacattcgcgccgtgttatggaatattccaaaggcatagggcagcgcatgaaactggataaagaggatattgaagaccttaaacgatccgctttattacatgacatcggaaaaataggaatacccgacacgattcttaaaaaggaaacaaaactgaccgatgaggaatacgccgtaattaaatcacattccgaaacaggagccggtatccttaaatatataaagtctttcaaacatttagtaccggctgtatatcatcaccatgaacgatttgacggcgaaggttatcctgatggcgttaagggcacggcaatacccctgcacgcgcggataattgccatcgcggatacctttgacgcaatgacatcaagcagatcgtacaggaaaaaagcgctttctctcagggcggcgttatccgaacttgaacggagtaaagggacgcaattcgatcctgacattgctgaaatttttattgaaatattggaggaatcgcccttttattttacgcggttcagagagcctgaatatcatttgtaa

SEQ ID NO: 32250 - protein, 230 aa, Unknown
  Obtained from environmental sample
  DOMAIN (51)...(173): HD domain
  misc_feature (1)..(230): Xaa is any amino acid
MGRSYKRKTTLRKDHLKKNEETLDIAELLGKTHFEIIMAFSEALEARDEYTAGHSRRVMEYSKGIGQRMKLDKEDIEDLKRSALLHDIGKIGIPDTILKKETKLTDEEYAVIKSHSETGAGILKYIKSFKHLVPAVYHHHERFDGEGYPDGVKGTAIPLHARIIAIADTFDAMTSSRSYRKKALSLRAALSELERSKGTQFDPDIAEIFIEILEESPFYFTRFREPEYHL

SEQ ID NO: 32251 - DNA, 390 bp, Unknown
  Obtained from environmental sample
  misc_feature (1)..(390): n is a, c, g, or t
atgaccgattttgacaacattcgctcgtttcgggatgacgaagtgcctcatgcaatccgtgagtttattaaagatcccgcttatcctcaattagcaggatctgttttccctgataaatcgttagatgccattacaaatgaattgctttcaattaaaagtattcatgagtttcaagaaaaattttcgtatcaaattgttcatcgggtagtcgatcctactgttaaggacataaaaatacatggtgtagaaaatatagataagcaaacgccatatctgcttatatcaaatcatcgtgatattgtgttggacgccgcgatattgaatgttgtgatccttgatgcgggtattccaatgacggaaattgctatcgggacctcgtgccgattctga

SEQ ID NO: 32252 - protein, 129 aa, Unknown
  Obtained from environmental sample
  misc_feature (1)..(129): Xaa is any amino acid
MTDFDNIRSFRDDEVPHAIREFIKDPAYPQLAGSVFPDKSLDAITNELLSIKSIHEFQEKFSYQIVHRVVDPTVKDIKIHGVENIDKQTPYLLISNHRDIVLDAAILNVVILDAGIPMTEIAIGTSCRF

SEQ ID NO: 32253 - DNA, 486 bp, Unknown
  Obtained from environmental sample
  misc_feature (1)..(486): n is a, c, g, or t
atgcctttcgactttattgtaagcgtactgacttctttggaaaaaaaggaatattcatgctacctcctgggagggagaaataaggttcttcacaaaacagaaaaaaatatcagacagacttttccgaaactgcgtgttgtagggcgtttccccggttattataaacggcaggaagaagcgactatcattcaggctataaaaaaagcgtctccatctattctgcttgtaggcaagggtatacggggtaaagagcggtggctctcgagaaacaacgcttctgtcggaaagggcatgagactctggtgcagcgatatttttgatgttttcgcggagaagaaaaaacatccttcacgggccgcttttaataaagggctggaatggataggttattgtttccagaaaccatataagtttttcaggatatttccctatctttactacaaaatacttttgctggtttacaagattaaatcaagaaaaaaataa

SEQ ID NO: 32254 - protein, 161 aa, Unknown
  Obtained from environmental sample
  DOMAIN (1)...(141): Glycosyl transferase WecB/TagA/CpsF family
  misc_feature (1)..(161): Xaa is any amino acid
MPFDFIVSVLTSLEKKEYSCYLLGGRNKVLHKTEKNIRQTFPKLRVVGRFPGYYKRQEEATIIQAIKKASPSILLVGKGIRGKERWLSRNNASVGKGMRLWCSDIFDVFAEKKKHPSRAAFNKGLEWIGYCFQKPYKFFRIFPYLYYKILLLVYKIKSRKK

SEQ ID NO: 32255 - DNA, 672 bp, Unknown
  Obtained from environmental sample
  misc_feature (1)..(672): n is a, c, g, or t
atgctgaccgctcttgccgccgagtacgaagccgtaagcggcggacgaaaaattaaaaaagcgttttaccttatctacgggactgtctggccggaaggtgaaatcgggataatgagaagcgatacgttaatgccgtatattgagtacggtttaaaaaacgatattctggtttttatcgatcatcagataggtcgttatgatccgatagattctcttaaaagaattttaccatggcttcggtatcctaatgttcatcttgcccttgatcctgaatggcgtactacaaaaccgatggtagaaatcggccatgttactgcggaggaactgaataccgcccagcaggttatggaaaattacattatcgaaaataatattcccggtgaacgcttactggttattcatcagtttaattaccagatgattaaaaaccgcgccgatgtaagaacagattttaacagagtaagatttgttcactgcgccgacggtttcggcccgccttccatgaaacgcgattcttatgcttttaatgccgcagcggtcaatatgccgattaaagggtttaaattattttataacttcggaatacccggcgcgggctacgacaatccgttaatgactcccaaacaggtgtacgagcttaatccgcgcccccttgtgattatgtaccagtaa

SEQ ID NO: 32256 - protein, 223 aa, Unknown
  Obtained from environmental sample
  misc_feature (1)..(223): Xaa is any amino acid
MLTALAAEYEAVSGGRKIKKAFYLIYGTVWPEGEIGIMRSDTLMPYIEYGLKNDILVFIDHQIGRYDPIDSLKRILPWLRYPNVHLALDPEWRTTKPMVEIGHVTAEELNTAQQVMENYIIENNIPGERLLVIHQFNYQMIKNRADVRTDFNRVRFVHCADGFGPPSMKRDSYAFNAAAVNMPIKGFKLFYNFGIPGAGYDNPLMTPKQVYELNPRPLVIMYQ

SEQ ID NO: 32257 - DNA, 1023 bp, Unknown
  Obtained from environmental sample
  misc_feature (1)..(1023): n is a, c, g, or t
atgaatatagtaagtgacatttgcgtttactatattatccagtctatgaaatttactgctaaaaagtcaattcttgcgccggcactttctgctgccaagctggttgtgccagcaaagccagcaattacaatagctgggtgttttttgctccgtttaaaagggaacgatcttgaaatcacggcaaatgatgtaacgggtcttgggctttgtctcaatatagaggtaaatggagaaaaaaatggagagatagccgtttctgccaccgattttaccgatacagtagccaatgccccagatgtagagttagtcatttccacagatggcttgaacctcactgtttcttggggcgaagaacgcgattcagaccttgggggcaaaaatcccgaagattttataaaaacaccagatgtagaaccagatagccaagtttcgcttaaagttccggctttgaattttctgctttcaaaggttggttttgccgcaagcaaaaacagcgataaccgcccttccttaactggcattttgctagaagcagaagattccaaattggtttctgttggcacagatagccaccgcctttcaagggtctatgttcaaccagaggcagaagaggcattctctctctctcgttcttcaatagttccgcctcgcgcaattcaggctttgctttcggctgccgctgccgttggagattcggaggctacggtttatatgggtttcacggaaacgcatttgaatttcaaaacgcccaaagcatcggtcaccgcaaaacttttggaaggtccgtatccatcttggcgacctgttatcccaacaaacttgcccatttcaattaaattcaacacagcagaaatgctggatgttttgcagagggtaaatgtttcggcagacaaaacaacccacaatgcaaggctctctattcaagactcaataataaaaatttctgccgtgggttctcgccgcacaagggaaaaaatagcttgtgcttgcgaaggcataaaagacagcgagtgcaatcgctaa

SEQ ID NO: 32258 - protein, 340 aa, Unknown
  Obtained from environmental sample
  DOMAIN (16)...(135): DNA polymerase III beta subunit, N-terminal domain
  misc_feature (1)..(340): Xaa is any amino acid
MNIVSDICVYYIIQSMKFTAKKSILAPALSAAKLVVPAKPAITIAGCFLLRLKGNDLEITANDVTGLGLCLNIEVNGEKNGEIAVSATDFTDTVANAPDVELVISTDGLNLTVSWGEERDSDLGGKNPEDFIKTPDVEPDSQVSLKVPALNFLLSKVGFAASKNSDNRPSLTGILLEAEDSKLVSVGTDSHRLSRVYVQPEAEEAFSLSRSSIVPPRAIQALLSAAAAVGDSEATVYMGFTETHLNFKTPKASVTAKLLEGPYPSWRPVIPTNLPISIKFNTAEMLDVLQRVNVSADKTTHNARLSIQDSIIKISAVGSRRTREKIACACEGIKDSECNR

SEQ ID NO: 32259 - DNA, 615 bp, Unknown
  Obtained from environmental sample
  misc_feature (1)..(615): n is a, c, g, or t
ttgatcagatcggccgagggctttatcggcggcgtgccgggcgctctgataaccaggtttgaagtaggctatgtgcagggcgtattgtccgtgatccccaacgcccagattgttgactactatgttaacagttggggcgagccggccctcgcgaaaacccaggcgaagaactggtacgactccggcgtgtacgcgatttactccgcggcgggcggcagcggcaacgggactatcgcccaggccaaagaataccggatggcgggcaaggatgtctgggccatcggcgttgactccgaccagcacgaagagggcctgtacaacgacaaagattccgcggtgctgacctcgatgctgaagctggttgaaaccagcctggtttacgcgttgaattcgattaagaataatacttaccagggcgagataatcacctttgacctcgcgaaggacggcgtcggttattcaaccaccaatgccgcgctcagcgcttccgtaagagccgaacttgaaacaatcaagcaaaagatcataaagggcgaaattaaaattgctccctctaacgcggaagcgaaaaagctccccggtttcccgcagaatttgaaagctgtagacgattag

SEQ ID NO: 32260 - protein, 204 aa, Unknown
  Obtained from environmental sample
  misc_feature (1)..(204): Xaa is any amino acid
MIRSAEGFIGGVPGALITRFEVGYVQGVLSVIPNAQIVDYYVNSWGEPALAKTQAKNWYDSGVYAIYSAAGGSGNGTIAQAKEYRMAGKDVWAIGVDSDQHEEGLYNDKDSAVLTSMLKLVETSLVYALNSIKNNTYQGEIITFDLAKDGVGYSTTNAALSASVRAELETIKQKIIKGEIKIAPSNAEAKKLPGFPQNLKAVDD

SEQ ID NO: 32261 - DNA, 759 bp, Unknown
  Obtained from environmental sample
  misc_feature (1)..(759): n is a, c, g, or t
gtgaaagaggatttaagcaaatatgatttttccgcactcaggcattgcacggttgctggcgagcctcttaaccctgagatttacgagcagttcaaaaatgccacgggtctctctttaaaagaagcttatgggcaaacagagctaactataattatgggcaattgggattggtttgaaccaaaacctggctccatgggaaaacccgctccgggctatgacatagacatagttcacgatgatggctcctcttgcggcgtgggcgagaaaggggaaatagttgtccgcaccgataagcgaacacccgcaggcatgtttgatgggtattacagggatgatgaattaacaaaaaatgtttggaacaataacatttactacacaggcgacgtggcttggcgagacgaagacggctactattggtttgtgggaagagcagacgacgttataaaaagctctggttatagaataggcccatttgaagtggagagtgcccttcttgaacaccccgccgttttggaatgtgcggtgactggggtccccgaccccaagcgcggaacggtggtcaaagctaccatagtcctagcaaaaaactggaaggcgagcgaagagttgaaaaaagagcttcaaatccacgtaaaaacggtatctaccccatacaaatatccgagaataattgaatttgtaagcgaactccccaaaaccataagcggcaaaatccgccgcgtgcagattagggaagaagacggacaaaaaaaggcgtag

SEQ ID NO: 32262 - protein, 252 aa, Unknown
  Obtained from environmental sample
  DOMAIN (2)...(175): AMP-binding enzyme
  misc_feature (1)..(252): Xaa is any amino acid
MKEDLSKYDFSALRHCTVAGEPLNPEIYEQFKNATGLSLKEAYGQTELTIIMGNWDWFEPKPGSMGKPAPGYDIDIVHDDGSSCGVGEKGEIVVRTDKRTPAGMFDGYYRDDELTKNVWNNNIYYTGDVAWRDEDGYYWFVGRADDVIKSSGYRIGPFEVESALLEHPAVLECAVTGVPDPKRGTVVKATIVLAKNWKASEELKKELQIHVKTVSTPYKYPRIIEFVSELPKTISGKIRRVQIREEDGQKKA

SEQ ID NO: 32263 - DNA, 489 bp, Unknown
  Obtained from environmental sample
  misc_feature (1)..(489): n is a, c, g, or t
atgcagggcaagtcggcggttgtacccaagcatgaaaaacatgttgtatggtctgacagatattcaatgggaattaaagtaatagacgatcaacacaaagggcttctggattttgttaatgatttattcaatcatgccagcggagacgaatatgaagaaagggaatatttcaagaaagtaatccagcaggcggtaaattacataaaagtgcattttgaaacggaagaaaaattgatgacggcgaccaaattccccggatacgcggagcataaaaaagttcatgatgaatttacgatgacagtgcttaaaaccgtaaaggactttgaatccggaaagcggctggttcttgagaaattcgcctattttctcaagaattgggttttaggccatgtcgccgtaatggatgtgaaatacgcggagtatttcagaaaaatcgccacccgtaaccaggatggcaaactgacaattacacacgtaaatataggctag

SEQ ID NO: 32264 - protein, 162 aa, Unknown
  Obtained from environmental sample
  DOMAIN (86)...(141): Hemerythrin HHE cation binding domain
  misc_feature (1)..(162): Xaa is any amino acid
MQGKSAVVPKHEKHVVWSDRYSMGIKVIDDQHKGLLDFVNDLFNHASGDEYEEREYFKKVIQQAVNYIKVHFETEEKLMTATKFPGYAEHKKVHDEFTMTVLKTVKDFESGKRLVLEKFAYFLKNWVLGHVAVMDVKYAEYFRKIATRNQDGKLTITHVNIG

SEQ ID NO: 32265 - DNA, 354 bp, Unknown
  Obtained from environmental sample
  misc_feature (1)..(354): n is a, c, g, or t
ttgccgtcctgcgtcgtgaccgttatttccgctgtgccaaggctgactcctttgactaggccgcttgcggacaccgtcgctatggtgctgttgctgctggcccacgtggcgtttctgtttgttgcgttgctcggtttgaatatcggggatagctgctcctggctgcctatgagcacttgcgagtcttccaggcccacgcccgttgttgcgacaggcaccactgtgaccgcgcatttcgccttatggttgccgtcttgcgttatcactgttatttccgccgttccaacactcacccctgttacaaggccgttgcttgaaactgtcgctatgctgctgtcgctgctcatccaatag

SEQ ID NO: 32266 - protein, 117 aa, Unknown
  Obtained from environmental sample
  misc_feature (1)..(117): Xaa is any amino acid
MPSCVVTVISAVPRLTPLTRPLADTVAMVLLLLAHVAFLFVALLGLNIGDSCSWLPMSTCESSRPTPVVATGTTVTAHFALWLPSCVITVISAVPTLTPVTRPLLETVAMLLSLLIQ

SEQ ID NO: 32267 - DNA, 705 bp, Unknown
  Obtained from environmental sample
  misc_feature (1)..(705): n is a, c, g, or t
ttgttcagactcacgcccgccacctcgcccgttgtcaccgtgaccgtgcatgccgccgtcttgccgccgtccttggtggttaccgttatggtcgccgtgcccgcgccgacgcccttgaccaggccgctggcggaaacagttgccacggtgctgtcgctgctggcccatgtcacggcctggtttgtggcgtggcttggctggaccgtcgcggtgagcgtctcttggccgtttatcaccagtaacatcgttttcttcaggctgacgccgctcactgagatggccggcgtcaccgtgaccgtgcataccgccgtcttgccaccgtccttggtggttaccgttatggtcgccgcgcccgcgccgacacccttgaccaggccgctggcggaaacagttgccacggcgctgtcgctgctggcccatgtcacggccttgttcgtggcgctgcttggctggaccgtcgcggacaacagcatttggttccccactgccagatccgccgttaatctgttcaggctcacgcccgtcaccgcgattggcgtcaccgtgacagtgcatgttgccgtaaaattgccgtcctgtgtcgtgactgttatcacagccttgccggaacccaaggatcggacccagccgtctgcttctactgtcgcaacagtctcatcgctgctagaccatgtgacagttctgtttgtcgcgttgcttggctga

SEQ ID NO: 32268 - protein, 234 aa, Unknown
  Obtained from environmental sample
  SIGNAL (1)...(18)
  misc_feature (1)..(234): Xaa is any amino acid
MFRLTPATSPVVTVTVHAAVLPPSLVVTVMVAVPAPTPLTRPLAETVATVLSLLAHVTAWFVAWLGWTVAVSVSWPFITSNIVFFRLTPLTEMAGVTVTVHTAVLPPSLVVTVMVAAPAPTPLTRPLAETVATALSLLAHVTALFVALLGWTVADNSIWFPTARSAVNLFRLTPVTAIGVTVTVHVAVKLPSCVVTVITALPEPKDRTQPSASTVATVSSLLDHVTVLFVALLG

SEQ ID NO: 32269 - DNA, 747 bp, Unknown
  Obtained from environmental sample
  misc_feature (1)..(747): n is a, c, g, or t
atgcactgtcacggtgacgccaatcgcggtgacgggcgtgagcctgaacagattaacggcggatctggcagtggggaaccaaatgctgttgtccgcgacggtccagccaagcagcgccacgaacaaggccgtgacatgggccagcagcgacagcgccgtggcaactgtttccgccagcggcctggtcaagggtgtcggcgcgggcgcggcgaccataacggtaaccaccaaggacggtggcaagacggcggtatgcacggtcacggtgacgccggccatctcagtgagcggcgtcagcctgaagaaaacgatgttactggtgataaacggccaagagacgctcaccgcgacggtccagccaagccacgccacaaaccaggccgtgacatgggccagcagcgacagcaccgtggcaactgtttccgccagcggcctggtcaagggcgtcggcgcgggcacggcgaccataacggtaaccaccaaggacggcggcaagacggcggcatgcacggtcacggtgacaacgggcgaggtggcgggcgtgagtctgaacaagtcggcgacggcactggccttgggttacaaagagcagcttacggctacagtccagcccagcaacgcaaaaaacaagaccgtcatctggtcgagcagcgacgagaaaatagcagcggtttcaaccagcggcctcgtcacgggcgtgggcgcgggaacagcggtgataactgcgaccacgcaggacggcggtaa

SEQ ID NO: 32270 - protein, 248 aa, Unknown
  Obtained from environmental sample
  misc_feature (1)..(248): Xaa is any amino acid
MHCHGDANRGDGREPEQINGGSGSGEPNAVVRDGPAKQRHEQGRDMGQQRQRRGNCFRQRPGQGCRRGRGDHNGNHQGRWQDGGMHGHGDAGHLSERRQPEENDVTGDKRPRDAHRDGPAKPRHKPGRDMGQQRQHRGNCFRQRPGQGRRRGHGDHNGNHQGRRQDGGMHGHGDNGRGGGRESEQVGDGTGLGLQRAAYGYSPAQQRKKQDRHLVEQRRENSSGFNQRPRHGRGRGNSGDNCDHAGRR

SEQ ID NO: 32271 - DNA, 492 bp, Unknown
  Obtained from environmental sample
  misc_feature (1)..(492): n is a, c, g, or t
atggcggtgagggtggagacggcagtggcaaggagcagggggataaaaacatctgtggggttggcagcgcctgcggtggcgcgcaacgccatgatagcgacagggatgagcgtgagccctgatgtgttgagcgcaaggaacatgatttgggcgttggaggcggtgtctttcgttgggttgagttcttggaggctttgcatggctttgagtcccaaaggggtggcggcgttatcaagcccgagcatgttggcggagaagttcatcaggagttgcccgtgtacggggtggttcttgggtatttcggggaagagtttggagaaaaagggaccaatgatgcgggcgaggagtttggtggcgccggcgcgttcgccgacattcatcaagccgagccaaagggtcataacgcccgcgaggggcagtgcgatgttcatgactgccagtttggacatgtcgaaggtgcttgcgataatgcgctcgagactgctcgcataa

SEQ ID NO: 32272 - protein, 163 aa, Unknown
  Obtained from environmental sample
  misc_feature (1)..(163): Xaa is any amino acid
MAVRVETAVARSRGIKTSVGLAAPAVARNAMIATGMSVSPDVLSARNMIWALEAVSFVGLSSWRLCMALSPKGVAALSSPSMLAEKFIRSCPCTGWFLGISGKSLEKKGPMMRARSLVAPARSPTFIKPSQRVITPARGSAMFMTASLDMSKVLAIMRSRLLA

SEQ ID NO: 32273 - DNA, 360 bp, Unknown
  Obtained from environmental sample
  misc_feature (1)..(360): n is a, c, g, or t
ttgataacgccgccacccctttgggactcaaagccatgcaaagcctccaagaactcaacccaacgaaagacaccgcctccaacgcccaaatcatgttccttgcgctcaacacatcagggctcacgctcatccctgtcgctatcatggcgttgcgcgccaccgcaggcgctgccaaccccacagatgtttttatccccctgctccttgccactgccgtctccaccctcaccgccatcgtctacgtctccctgcgccagcgcatacggctctggaacagcaccatcatcctttggctcgcgggcatcctcctcgccctcgccctcatcgtctacggcttcgggcaacttacgccacagatga

SEQ ID NO: 32274 - protein, 119 aa, Unknown
  Obtained from environmental sample
  misc_feature (1)..(119): Xaa is any amino acid
MITPPPLWDSKPCKASKNSTQRKTPPPTPKSCSLRSTHQGSRSSLSLSWRCAPPQALPTPQMFLSPCSLPLPSPPSPPSSTSPCASAYGSGTAPSSFGSRASSSPSPSSSTASGNLRHR

SEQ ID NO: 32275 - DNA, 606 bp, Unknown
  Obtained from environmental sample
  misc_feature (1)..(606): n is a, c, g, or t
gtggcgcccgtattttgtcatcgtctcgaccatcatggctttggcgccgctgccgctgagtggctgatgaaggcgggtgggcagcgcgtctacgaagcgggtgtcgaggtgcagcagggcgatggcctctgcaatgccccgcgtaagcaagtccatcgcgccgcaggcacggaagacgccgatgccgaccagcatggcgaccatgaagggaatgattttgacggtggtttcaaagcctgttttggcgccatcgatgaaggcttcgtagacgtttacctttttgtagagggcggcggcaatgaaggcgatgatgatgatgaagaggatggcgttgccaataatggcggggagggtggtcttcatctgtggcgtaagttgcccgaagccgtagacgatgagggcgagggcgaggaggatgcccgcgagccaaaggatgatggtgctgttccagagccgtatgcgctggcgcagggagacgtagacgatggcggtgagggtggagacggcagtggcaaggagcagggggataaaaacatctgtggggttggcagcgcctgcggtggcgcgcaacgccatgatagcgacagggatgagcgtgagccctga

SEQ ID NO: 32276 - protein, 201 aa, Unknown
  Obtained from environmental sample
  misc_feature (1)..(201): Xaa is any amino acid
MAPVFCHRLDHHGFGAAAAEWLMKAGGQRVYEAGVEVQQGDGLCNAPRKQVHRAAGTEDADADQHGDHEGNDFDGGFKACFGAIDEGFVDVYLFVEGGGNEGDDDDEEDGVANNGGEGGLHLWRKLPEAVDDEGEGEEDAREPKDDGAVPEPYALAQGDVDDGGEGGDGSGKEQGDKNICGVGSACGGAQRHDSDRDEREP

SEQ ID NO: 32277 - DNA, 522 bp, Unknown
  Obtained from environmental sample
  misc_feature (1)..(522): n is a, c, g, or t
atgagccaagaagaaatagattcaacgcaaaattcagtcatgcaaatgtgcacatttcgcatggcaaaccgtttgttcggcgttaacatccttgatgtaaaggaagttaacgagaataccaatgttacaccaatttaccacgctcctccggatatttgtggatatataaatatccgtggacagattctccttgtggttaatttacgtgaaacctttggttttgaccatgggcataaaactaacgttggcgcgggtggtaaagttgtggtgtttaagccaagtgttgatgaaccattcggtattttggttgacgaagtttgcgatgtggtttctgttgaacagaatcgcattgtagatagacgcgctggagaaacgaattcaagcgaagcagctagagacctccgcagagccaaagatggtattgtttttggagtttgccctttagaaaaagaattgctcttggttttgaatgcccgttatattttagcgaagcagacggtaaaatcatcagaaatgaaataa

SEQ ID NO: 32278 - protein, 173 aa, Unknown
  Obtained from environmental sample
  DOMAIN (15)...(166): CheW-like domain
  misc_feature (1)..(173): Xaa is any amino acid
MSQEEIDSTQNSVMQMCTFRMANRLFGVNILDVKEVNENTNVTPIYHAPPDICGYINIRGQILLVVNLRETFGFDHGHKTNVGAGGKVVVFKPSVDEPFGILVDEVCDVVSVEQNRIVDRRAGETNSSEAARDLRRAKDGIVFGVCPLEKELLLVLNARYILAKQTVKSSEMK

SEQ ID NO: 32279 - DNA, 882 bp, Unknown
  Obtained from environmental sample
  misc_feature (1)..(882): n is a, c, g, or t
atgcacggctgcaacaatttctgctcatactgcgttgtcccctatgtgcggggcagggaaatctccagggatccaaaactgataatggaagagctccgtctggtcggcgaacgcggggttcgggaagttaccctgctcgggcagaatgtcaacacctacaactggaataacggtggcgcgcttaatagcgcgattgattttgcaggccttctgcgccttgtcgccgccgaatctgaaaaaagcggggtaaagtggctgcgcttcctttccgccaacccaagggatttttcacaggagacgatacgggtaatggcggagcacagggttttttgcagacatctgcacctctgtgtccagcacggatcaaaccgcatccttcaggcgatgaaccggggctatacccgcgaacactaccttgcgctggtcagggagattcgatccgccatgcctgagataagcctttccacggatattctggtaggctttcccggggaaaaagaagaagacattgaagcgaccctggggcttatggaagaagtgcggttcctctacgcctatatgtaccattataaccccatggaagggacggctgcatacaatctgccggacagggtaaacgaggaaacaaagcgggaaaggctgtccagggttatcgccctgcagaaaaagcacactcaggcgctgttgaaaaaacgcataggcgcgcgggaatttgttttggtggaggggatttcccggaaaaatgccgatgaattagtaacgcgtactgaacgggatgaaatggttgttgcccccggccctgcttctatgataggatcatacatgtggctcaccctctcaagcctgagaggaaatacttttagagcaaagggagaattgtga

SEQ ID NO: 32280 - protein, 293 aa, Unknown
  Obtained from environmental sample
  DOMAIN (1)...(177): Radical SAM superfamily
  misc_feature (1)..(293): Xaa is any amino acid
MHGCNNFCSYCVVPYVRGREISRDPKLIMEELRLVGERGVREVTLLGQNVNTYNWNNGGALNSAIDFAGLLRLVAAESEKSGVKWLRFLSANPRDFSQETIRVMAEHRVFCRHLHLCVQHGSNRILQAMNRGYTREHYLALVREIRSAMPEISLSTDILVGFPGEKEEDIEATLGLMEEVRFLYAYMYHYNPMEGTAAYNLPDRVNEETKRERLSRVIALQKKHTQALLKKRIGAREFVLVEGISRKNADELVTRTERDEMVVAPGPASMIGSYMWLTLSSLRGNTFRAKGEL

SEQ ID NO: 32281 - DNA, 459 bp, Unknown
  Obtained from environmental sample
  misc_feature (1)..(459): n is a, c, g, or t
ttgtgttggttcgtggtaaaattcttctgtattaattttatgaaatattattttgaaacatacggctgtcaaatgaacagtgcggaatccgcggcgctggctctcgcgtgcaaggaacgtaactggcaggaagccgaaaacagcgaagtcgccgaccttgttctgctcaacacctgttctgtacggctgactgcggaaaaacgcgctcttgggcgtatcgctcattatgccgggcttaaaaagaaacacggccgccgctttactcttgttgtcgcgggctgtatggcgcaaaggttgggcgagaaactaaaagaaaaatatcccgctgtggattatgtgatgggcacttttgcccgctccctctttccgctgatactccaagccgtggaaaaaggcgaaaaaaccgcgctcgacttaactgaaaacgccgttttctccttttcaaatacccacctttga

SEQ ID NO: 32282 - protein, 152 aa, Unknown
  Obtained from environmental sample
  DOMAIN (15)...(115): Uncharacterized protein family UPF0004
  misc_feature (1)..(152): Xaa is any amino acid
MCWFVVKFFCINFMKYYFETYGCQMNSAESAALALACKERNWQEAENSEVADLVLLNTCSVRLTAEKRALGRIAHYAGLKKKHGRRFTLVVAGCMAQRLGEKLKEKYPAVDYVMGTFARSLFPLILQAVEKGEKTALDLTENAVFSFSNTHL

SEQ ID NO: 32283 - DNA, 741 bp, Unknown
  Obtained from environmental sample
  misc_feature (1)..(741): n is a, c, g, or t
atgtctggacacagtaaatgggctaccataaagcatgcaaaaggcgccgctgacgcaaaacgcggtcaaatgtttacaaagctgataaaagaaatctccattgcggcgcggatgggcggggggagcgttgacggaaacccgcgcctaaggaccgccgtgctgaaagccagggcggccaatatgcccaaggacaatattgaccgggctatcaagaagggaaccggagagcttgaaggcgttacctatgaagagcttgcatatgaagcgtttgcgcccggcggcgtggccctgcttatagaagtattgacggacaacaaaaaccgggctgccgcggatgtgcggaacatccttacccgcgcgggaggccaactcgctacagccggatcggtgtcacggctcttcaaacgccaggggattatcagcctggatggggaaaagtacacggaagatcaggtgatggaagcggctattgaaggcggagccgaagacgtgtccctttcagacggtgtaatttcggtaactaccgcgcctgaggattttgaaaccgtcgtgaacgccttaaccgaaaagaaatttgaaaccataagcgcggaaatcagcatggttccggaagccgacgtgagtctggacaatgacgctaccgcaaaagtattaaagttaattgacaagctggaagaaaacgacgacgttcaaaacgtttactccaacataaatattccagacgggtttgaatctgagtga

SEQ ID NO: 32284 - protein, 246 aa, Unknown
  Obtained from environmental sample
  DOMAIN (5)...(238): Domain of unknown function DUF28
  misc_feature (1)..(246): Xaa is any amino acid
MSGHSKWATIKHAKGAADAKRGQMFTKLIKEISIAARMGGGSVDGNPRLRTAVLKARAANMPKDNIDRAIKKGTGELEGVTYEELAYEAFAPGGVALLIEVLTDNKNRAAADVRNILTRAGGQLATAGSVSRLFKRQGIISLDGEKYTEDQVMEAAIEGGAEDVSLSDGVISVTTAPEDFETVVNALTEKKFETISAEISMVPEADVSLDNDATAKVLKLIDKLEENDDVQNVYSNINIPDGFESE

SEQ ID NO: 32285 - DNA, 510 bp, Unknown
  Obtained from environmental sample
  misc_feature (1)..(510): n is a, c, g, or t
ttgaatctgagtgacacgctcagaataattggcgttgaccccggtctggcatccaccggctggggtgtagtggaattttcgcaaaatcatctgttatatattgcccacggctgcatagaaacgagcgcggaagatcccaaaggcaagcgtctttacctcatccatagttcttttttaaagatactaaaggcttacaagccccgcggggccgcaatagaaaacctctattttggcaagaatatttccagcgccatgtctgttgccgaagccaggggcgttttgtttttagcgcttacaagccagggactcccagttcgggagctggctcccaatgccataaaaaaagccgtggtangggtaagcagggccgataagggccaaattcaggaaatggtacgccttatccttggattaaaggaaataccanagccggatcacgccgcagatgctttaggcgcggcgatctgtgccgcccatatgtctacgcagcgtcaggaatcggggagataa

SEQ ID NO: 32286 - protein, 169 aa, Unknown
  Obtained from environmental sample
  DOMAIN (9)...(159): Crossover junction endodeoxyribonuclease RuvC
  misc_feature (1)..(169): Xaa is any amino acid
MNLSDTLRIIGVDPGLASTGWGVVEFSQNHLLYIAHGCIETSAEDPKGKRLYLIHSSFLKILKAYKPRGAAIENLYFGKNISSAMSVAEARGVLFLALTSQGLPVRELAPNAIKKAVVXVSRADKGQIQEMVRLILGLKEIPXPDHAADALGAAICAAHMSTQRQESGR

SEQ ID NO: 32287 - DNA, 639 bp, Unknown
  Obtained from environmental sample
  misc_feature (1)..(639): n is a, c, g, or t
gtgataaatatgaaatacgtcataataggaaattccgccgcagggatcggcgctgtggagggcatacggcaagtcgataaagagggtgagatcaccatcatcgcaaacgaaccgcaccacacgtactcccgtccgcttatatcgtacctgttgctcggcaaggtcacggaagagaagatgaagtaccgcagcgacggtttttactcggagaaccgcgtcagcatgctccacgccgtcgttacgggcgttgacaccggcaaacagcaggtgattctgtcgaacgacgaccgtataccctacaacaaactgttggtcgccacggggtcgcagccattcgtgccgccgtttgagggactcgactccgttgcggaaaaggttacgtttatgagcctcgacgacgctcggaagttgggcggcatgatcaacaagaacaaacgggtattgattatcggcgcgggtcttatcggtttaaagtgcgcggaggggatttccggcaaggccgcgcttatcacggtgctcgacctcgccccgaggatcttgtcgagcatcctcgacgacgacggggcgaagacggttcagacgcatctcgaaagcaaggggatcaagttcaggctcgcccgcgagcaccaagaagtttga

SEQ ID NO: 32288 - protein, 212 aa, Unknown
  Obtained from environmental sample
  DOMAIN (146)...(212): Pyridine nucleotide-disulphide oxidoreductase
  misc_feature (1)..(212): Xaa is any amino acid
MINMKYVIIGNSAAGIGAVEGIRQVDKEGEITIIANEPHHTYSRPLISYLLLGKVTEEKMKYRSDGFYSENRVSMLHAVVTGVDTGKQQVILSNDDRIPYNKLLVATGSQPFVPPFEGLDSVAEKVTFMSLDDARKLGGMINKNKRVLIIGAGLIGLKCAEGISGKAALITVLDLAPRILSSILDDDGAKTVQTHLESKGIKFRLAREHQEV

SEQ ID NO: 32289 - DNA, 546 bp, Unknown
  Obtained from environmental sample
  misc_feature (1)..(546): n is a, c, g, or t
gtgctcgccgtgggggtgcgccccaacacggcgcttctgaaggacatagcgaagatagagcgcgggatagttgtggacgagaaatcgcgaacgaccgcgccggacatctacgccgcgggcgactgcacgcagacgcttgacgtgtcgagcggccagagcaagatcatggcgcttctgccgaacgcctacatgcagggcgagtgcgcggggatcaacatggcgggcggcgagaaggcgttcgacaaggcgataccgatgaatgctatcgggttcttcgggttgcacatcgtcacggcgggaaattacgtcggcgaggtttattccgggggcggaaaaggcgattacaagaaactgttttacagcgacaataagctgaacggctacattctcatcggcaatgtcgagaaggcgggaatttatacgagtctgatccgcgagcgcacgccgctcgactccatagatttcgcgcttgtctgcgagaagccggggcttatggcattcactaaggaagagagaaagattaaactgggaggcatagcgtcatga

SEQ ID NO: 32290 - protein, 181 aa, Unknown
  Obtained from environmental sample
  misc_feature (1)..(181): Xaa is any amino acid
MLAVGVRPNTALLKDIAKIERGIVVDEKSRTTAPDIYAAGDCTQTLDVSSGQSKIMALLPNAYMQGECAGINMAGGEKAFDKAIPMNAIGFFGLHIVTAGNYVGEVYSGGGKGDYKKLFYSDNKLNGYILIGNVEKAGIYTSLIRERTPLDSIDFALVCEKPGLMAFTKEERKIKLGGIAS

SEQ ID NO: 32291 - DNA, 432 bp, Unknown
  Obtained from environmental sample
  misc_feature (1)..(432): n is a, c, g, or t
atgcggggcggcagcatttttgtgcagggcaacgccgggtacagaaccggcatacacatgaaagagtacaaggacaaaaaaccggtnatcgtcataggcggcagggtgggcagctttttgggcgagtacctcgccggcgggcttatagtagtgctcggcatagattgcgacgccgtcccggtaggcaatttcaccggaaccggtatgcacggcggtaagatttttatccgtacaagcaaggagctgtcaaactttccggagcaggtggccgcggagaaagcctcaggcgaggatttgaaagagatcgagccgtacgtctcagagttcgccgattgcttcgggataaaagccgcgccgattctgaaagacaatttttacgtgctgaggccgaacgcgaagaatccgtataagcagttgtatacggcgaattaa

SEQ ID NO: 32292 - protein, 143 aa, Unknown
  Obtained from environmental sample
  DOMAIN (1)...(115): GXGXG motif
  misc_feature (1)..(143): Xaa is any amino acid
MRGGSIFVQGNAGYRTGIHMKEYKDKKPVIVIGGRVGSFLGEYLAGGLIVVLGIDCDAVPVGNFTGTGMHGGKIFIRTSKELSNFPEQVAAEKASGEDLKEIEPYVSEFADCFGIKAAPILKDNFYVLRPNAKNPYKQLYTAN

SEQ ID NO: 32293 - DNA, 378 bp, Unknown
  Obtained from environmental sample
  misc_feature (1)..(378): n is a, c, g, or t
ttgtctttcagaatcggcgcggcttttatcccgaagcaatcggcgaactctgagacgtacggctcgatctctttcaaatcctcgcctgaggctttctccgcggccacctgctccggaaagtttgacagctccttgcttgtacggataaaaatcttaccgccgtgcataccggttccggtgaaattgcctaccgggacggcgtcgcaatctatgccgagcactactataagcccgccggcgaggtactcgcccaaaaagctgcccaccctgccgcctatgacgatnaccggttttttgtccttgtactctttcatgtgtatgccggttctgtacccggcgttgccctgcacaaaaatgctgccgccccgcatggcgtag

SEQ ID NO: 32294 - protein, 125 aa, Unknown
  Obtained from environmental sample
  misc_feature (1)..(125): Xaa is any amino acid
MSFRIGAAFIPKQSANSETYGSISFKSSPEAFSAATCSGKFDSSLLVRIKILPPCIPVPVKLPTGTASQSMPSTTISPPARYSPKKLPTLPPMTXTGFLSLYSFMCMPVLYPALPCTKMLPPRMA

SEQ ID NO: 32295 - DNA, 507 bp, Unknown
  Obtained from environmental sample
  misc_feature (1)..(507): n is a, c, g, or t
atgacgaacatatcggcaaaagatttgggccacaaggagcttaaccaactgattagaaacgccggggaagacatttgcatagatgaatgttttgggcagaggtttatcgggagcggtatgaacggaaaaaatataacgataaacggaacgccggggaacgcaatgggcgcttattttaacggcggaacaatccttgtaaacggaaacgcgcaggacgctgtcggcgatacaatgaacgacggcaagatcatcatccacgggcaacgcgggcgacgcgcttggctacgccatgcggggcggcagcatttttgtgcagggcaacgccgggtacagaaccggcatacacatgaaagagtacaaggacaaaaaaccggtnatcgtcataggcggcagggtgggcagctttttgggcgagtacctcgccggcgggcttatagtagtgctcggcatagattgcgacgccgtcccggtaggcaatttcaccggaaccggtatgcacggcggtaa

SEQ ID NO: 32296 - protein, 168 aa, Unknown
  Obtained from environmental sample
  misc_feature (1)..(168): Xaa is any amino acid
MTNISAKDLGHKELNQLIRNAGEDICIDECFGQRFIGSGMNGKNITINGTPGNAMGAYFNGGTILVNGNAQDAVGDTMNDGKIIIHGQRGRRAWLRHAGRQHFCAGQRRVQNRHTHERVQGQKTGXRHRRQGGQLFGRVPRRRAYSSARHRLRRRPGRQFHRNRYARR

SEQ ID NO: 32297 - DNA, 786 bp, Unknown
  Obtained from environmental sample
  misc_feature (1)..(786): n is a, c, g, or t
ttgttgggcataatcgcttatatactaattcaagccatgggaatgtcagcggcggcggatcattccgacggcggggccgtcaaggccgagcttttcaggatacaaagcctggtcccaatgattgtgtctaccgcctggacggttgtagtgtcactggtcatagccctgccggtcggggtcatgaccgccgtttatttgcgggaatacgcggctaaatcctccataagccggtttcttgggcttgccattgatacattagcggggattccttctattatatacgggcttttcgggcttttattcttttgccgcttcatgaatttgggacagtccattatcgcgggcgggcttaccttaagcatcatgattcttccggtaattatcagaaccacggaagaggcccttaaaacagtgcccgtttctttccgcgagggatcattgtccctgggggcgactaaattccagacaatagttcatgtggttctgcccccggccctgcccggcatccttaccgcggctatcctggccgtaggccgggtggtcggcgagtccgccccggttctccttaccgtggggcttgcccgcaaccttcccaaaactatttttgagcctggacgcaccctgacaatacatctctattaccttaccaaagaggcaattgaagctgacgattttgcccaggcgtttaccgccgccgcggtgttgattgttgtggtactattaataaatacagtagtaaaaatcatgggcagaagctttggcggaagcgcctctgtggaggaataa

SEQ ID NO: 32298 - protein, 261 aa, Unknown
  Obtained from environmental sample
  DOMAIN (41)...(259): Binding-protein-dependent transport system inner membrane component
  misc_feature (1)..(261): Xaa is any amino acid
MLGIIAYILIQAMGMSAAADHSDGGAVKAELFRIQSLVPMIVSTAWTVVVSLVIALPVGVMTAVYLREYAAKSSISRFLGLAIDTLAGIPSIIYGLFGLLFFCRFMNLGQSIIAGGLTLSIMILPVIIRTTEEALKTVPVSFREGSLSLGATKFQTIVHVVLPPALPGILTAAILAVGRVVGESAPVLLTVGLARNLPKTIFEPGRTLTIHLYYLTKEAIEADDFAQAFTAAAVLIVVVLLINTVVKIMGRSFGGSASVEE

SEQ ID NO: 32299 - DNA, 396 bp, Unknown
  Obtained from environmental sample
  misc_feature (1)..(396): n is a, c, g, or t
atggccgagaggcggtatcgcggtatctcaagggaacccggttctgggacaaggggcgcttttgaggaactgctcaagtttcaggatcaactggtcaagggagcgatcgagtttgacggtaccggcgcgatcaaagccgaggtatcccgcaacgccgacgcgatcggctatatctcgcttggctctctggatagtaccattaagcccttgaacgtcggcgacattgccccgaataataccaatgtggtagctggtacctacaaaatcgcacgtcccttcatactggtaaccagaaaaggcgttcccctcaacgcggaaaccaaagcctttattgactggatcatgggaagcgccggtcaaagcattgtcaagaaaagctggattcctgtaaagtaa

SEQ ID NO: 32300 - protein, 131 aa, Unknown
  Obtained from environmental sample
  misc_feature (1)..(131): Xaa is any amino acid
MAERRYRGISREPGSGTRGAFEELLKFQDQLVKGAIEFDGTGAIKAEVSRNADAIGYISLGSLDSTIKPLNVGDIAPNNTNVVAGTYKIARPFILVTRKGVPLNAETKAFIDWIMGSAGQSIVKKSWIPVK

SEQ ID NO: 32301 - DNA, 792 bp, Unknown
  Obtained from environmental sample
  misc_feature (1)..(792): n is a, c, g, or t
ttgtctgaaatgtttgaaaaaactgatttagataaaatttgtattaaggatataattctgccgtataatgcaatgtatttatattttgaatctaatgaagaattaattcttgatggaaggcgatataaatttgaaggttgctacataactaaaacagaaccaaatcatgataatgatcgtgaaattgacattaataatacttttttacatttttatttaactacttcttgtaataatatagaatatgaagatattgattttgcttcatatctttcaaatgaaaaaatattggattttataatgtgtttagaagatcaaggagattataccatagaagaatatttgaatgagatggaaaataatatttctttaacaaaaaataggctggaagtatatctcaatgatgaaatcaaaaagtggaaaccatatctgtcaaaagtattcgcttacataataaatgcattattttttatttgttatcaggaagataatgattatgaagaaattaaaataaaaccgacaaaaattaaaaaaggaaaatttaacaaaaatgatttagaaaaagaatatacaatttttatatgtggtaataaattaaaagaaagatataaatcaaataatattacgggtaatatcttgagcgcacactcaagaagggggcattggaggaatcaagcatacggtaaaaaatattcacagcataaaaagatttggatacaaccaacattaatacacaaaaatgaagaaattaaaataaatcatatttatcaaatttcagataatgaagaataa

SEQ ID NO: 32302 - protein, 263 aa, Unknown
  Obtained from environmental sample
  misc_feature (1)..(263): Xaa is any amino acid
MSEMFEKTDLDKICIKDIILPYNAMYLYFESNEELILDGRRYKFEGCYITKTEPNHDNDREIDINNTFLHFYLTTSCNNIEYEDIDFASYLSNEKILDFIMCLEDQGDYTIEEYLNEMENNISLTKNRLEVYLNDEIKKWKPYLSKVFAYIINALFFICYQEDNDYEEIKIKPTKIKKGKFNKNDLEKEYTIFICGNKLKERYKSNNITGNILSAHSRRGHWRNQAYGKKYSQHKKIWIQPTLIHKNEEIKINHIYQISDNEE

SEQ ID NO: 32303 - DNA, 429 bp, Unknown
  Obtained from environmental sample
  misc_feature (1)..(429): n is a, c, g, or t
gtgtttacatacacagatactataatggcaagtgctgcctatgggataggtgcctgtgcagataaaatttatgcagcaccaagtgcgctcgtgggcgcagtcggttcttattccgaatggctggacttttcaaaaaaatgggagaaagatggaatagagtatatgctattccgcgccggcgaagataaagctaggataggttttgacgggcagatgcgagatagcgataaggcagaaatccaagctgatgttgaggaaaatcatttgcagtttaaaaaatgcgttcttgagcatagaaagatagaggaagaatatttgcaaggcaaactattcagtggcgaaaaggctttgaagctcaattttatagatggtttttctgattcaatatatgatttttcagacttgcttaaaaacggaggtatatcgtga

SEQ ID NO: 32304 - protein, 142 aa, Unknown
  Obtained from environmental sample
  DOMAIN (4)...(140): Peptidase family S49
  misc_feature (1)..(142): Xaa is any amino acid
MFTYTDTIMASAAYGIGACADKIYAAPSALVGAVGSYSEWLDFSKKWEKDGIEYMLFRAGEDKARIGFDGQMRDSDKAEIQADVEENHLQFKKCVLEHRKIEEEYLQGKLFSGEKALKLNFIDGFSDSIYDFSDLLKNGGIS

SEQ ID NO: 32305 - DNA, 324 bp, Unknown
  Obtained from environmental sample
  misc_feature (1)..(324): n is a, c, g, or t
ttgggaagcggtaaaacatatcttgttaaaggtatcgcaaatggtttaggcgtaacagaaaccataacaagccccacttacacaataataagcgaatacaattcctctcccgctctttaccatattgacgcataccgcctttcaggcgacgatgattttgaaaacttaggaggccgcgaaacaattaactcagacgggatttctttaattgaatggagcgagcgcattccaaaatcaataccaaaaaacgcgattacggttataataaaaataacaggcccttgttccagattaattcaaataaaaggattggaaaaaatatga

SEQ ID NO: 32306 - protein, 107 aa, Unknown
  Obtained from environmental sample
  DOMAIN (1)...(99): Uncharacterised P-loop hydrolase UPF0079
  misc_feature (1)..(107): Xaa is any amino acid
MGSGKTYLVKGIANGLGVTETITSPTYTIISEYNSSPALYHIDAYRLSGDDDFENLGGRETINSDGISLIEWSERIPKSIPKNAITVIIKITGPCSRLIQIKGLEKI

SEQ ID NO: 32307 - DNA, 327 bp, Unknown
  Obtained from environmental sample
  misc_feature (1)..(327): n is a, c, g, or t
atgggtcagaattcggcacnaggaantattccaatgaataaaatgtatatacggatggaacaaatgaaagtaatctcaattaaagacgcaataagaaaagacgtcccgatttattaccgtaaactctacacaggcattgccgtaattgaaatggcaaaaggcccacaggattaccgtattgatttttccattgaatataagccgacaggccaaaaagatattgccataacttttatagacgctattgattaccctcttgtgccggtaaacaaagaaataaaaaaatatatagacgaaatggactcgggcggattgcttcctgtttga

SEQ ID NO: 32308 - protein, 108 aa, Unknown
  Obtained from environmental sample
  misc_feature (1)..(108): Xaa is any amino acid
MGQNSAXGXIPMNKMYIRMEQMKVISIKDAIRKDVPIYYRKLYTGIAVIEMAKGPQDYRIDFSIEYKPTGQKDIAITFIDAIDYPLVPVNKEIKKYIDEMDSGGLLPV

SEQ ID NO: 32309 - DNA, 867 bp, Unknown
  Obtained from environmental sample
  misc_feature (1)..(867): n is a, c, g, or t
atggctgaccgcacgttaatttcgtttgattatgcggtgaagtacctactgcgcgaacaagaaggctatgtgatacttagcggtttcctgaccgaactcatgggcaggaagatcgacgttatcggtcttatccccgaagagaccatcaaatccgatcccgacgaaaagactaaccgcgttgacctgaaagcgcagatagacggcggcgaattcgccgtatttgaaatacaattccatcaagaatatgactttttcggcagggtgctctacggtgtcagccacgccataacagaccaagtccgcagtggaaaactgtacaatgtaaagaaagtctactcaataaacatagcgtattacaacctgaccgcaaaacgcgagtacctattttttgggaaattcagcggttttcaaggcattcactttcatgaggaatcgatcccgtttgcccaaacagcgaccaaagactcaaaagaactccttgatattcatcccgaatactatttgattttgccgaatatgtttgacgagacattgcgcggcaagtttgatgaatggatttacatcctaaaaaactccaaagtccgtgacgatttcaccgccgccggaataaaagaagccacagaaaaactaaacgaactgaccctgccgcccgacaaattagcggcatatcataagtacatggaaaatatcagaagcgtcaacagtcaggctatagcggcagaaataaaaggcaaagcggaaggcaaagcggaaggcaaagaagaaaacctaaaggaaattgttttaaatatgcgcgaagcaggttttagtattgcggacattgtaaaggctaccaaactctcggaacaaaaaatcaacgatatttga

SEQ ID NO: 32310 - protein, 288 aa, Unknown
  Obtained from environmental sample
  misc_feature (1)..(288): Xaa is any amino acid
MADRTLISFDYAVKYLLREQEGYVILSGFLTELMGRKIDVIGLIPEETIKSDPDEKTNRVDLKAQIDGGEFAVFEIQFHQEYDFFGRVLYGVSHAITDQVRSGKLYNVKKVYSINIAYYNLTAKREYLFFGKFSGFQGIHFHEESIPFAQTATKDSKELLDIHPEYYLILPNMFDETLRGKFDEWIYILKNSKVRDDFTAAGIKEATEKLNELTLPPDKLAAYHKYMENIRSVNSQAIAAEIKGKAEGKAEGKEENLKEIVLNMREAGFSIADIVKATKLSEQKINDI

SEQ ID NO: 32311 - DNA, 981 bp, Unknown
  Obtained from environmental sample
  misc_feature (1)..(981): n is a, c, g, or t
gtgcgggaagcggcgaaggcggagaggggctatatacacacaatctcggcctccggctttccggcggtgcgcaggattttggagggctttgaccccgccgcgctggatgaaccggtgttcttagaactcttagcctgtcccagcggctgcgtcaccggccccggcatgtccggcgcggtgcccggcgtcatccgccatacccgcctatgggattacgcccgctccgccgacgataccctcgacgccgacacgctctcccgcctgccgctcgtagacgccgattatcctacgtccatactgatggacgccccgcatacggaacaagagatatccgaggcgcttttgggcgtggggaaatacagcctcgccggacggctcaactgctcaagctgcggttacgacacctgccgcgatttcgccataggactgctcgacggtcgggcggagaaatcgatgtgcgcctcgtatatgcgcgaactcgccaacaaaaccgccaacgggcttatcaaggcgatccccaacggtgtagtcatcgttgaccgcgacttgaaaatcatcgattgcaacatacaattcgcccgccttatggggagcgaaatcgaggagctgttcgccatatcgccgggattggagggcgccgacctcagaaaagtatcgcctttcccgcagtattttcaaactatcatcgacctgtcggggccggaactcgctcaagccgacgtgcgggagggcagcaaaatattccacctaacggtcttcgccgtggaaaaaggcgttacggcggctggagtggtggaagacatcaccgcgccgcgcgtgcggatcgaaacgacggtcgagcgggcgcgggaactcatcaaaaaaaatgtttctactgttcagcaaatagcttttttgctgggagaaagcgcggcggaatccgaggctatcctcaattccattatcgagtcctatacggtagaagaagaaaaagatgcctga

SEQ ID NO: 32312 - protein, 326 aa, Unknown
  Obtained from environmental sample
  DOMAIN (125)...(156): Putative Fe-S cluster
  misc_feature (1)..(326): Xaa is any amino acid
MREAAKAERGYIHTISASGFPAVRRILEGFDPAALDEPVFLELLACPSGCVTGPGMSGAVPGVIRHTRLWDYARSADDTLDADTLSRLPLVDADYPTSILMDAPHTEQEISEALLGVGKYSLAGRLNCSSCGYDTCRDFAIGLLDGRAEKSMCASYMRELANKTANGLIKAIPNGVVIVDRDLKIIDCNIQFARLMGSEIEELFAISPGLEGADLRKVSPFPQYFQTIIDLSGPELAQADVREGSKIFHLTVFAVEKGVTAAGVVEDITAPRVRIETTVERARELIKKNVSTVQQIAFLLGESAAESEAILNSIIESYTVEEEKDA

SEQ ID NO: 32313 - DNA, 588 bp, Unknown
  Obtained from environmental sample
  misc_feature (1)..(588): n is a, c, g, or t
gtggagaaacggtgcagttttatgaatatcgcggtagaaggggacagccgcatcgcgaaactcgagaaggaaattattgaaagtatatgcgcaaaatacaaagccgaggacatgggaagtgaatacggtgaaaaatggtacgagaaccggatcacttttttttacccaggccacattatgaataacccgcagatgttcgggacaatggatacggtttccgattattcacatattgataaaatatactgggctatgaaaaacgcggtggaaagtaattttccgggagtacgtttcatcgcccactgttcgcattggtacgaatggggtgtaatgctttacgaccgctttatcatggatgaaccgcctgatgaaagcgaggaagcgttacggctccacaaccggatttggaacgccggggtaagggccgctatggctaacggcggggtgataaacgatcatcacggcatcgggcttaaactttcccggctgatgaaagagcagtacggttctgccatgcaggtgatgcaggctttgaaaaagcagcttgatcccaacgggatcatgaatccgtataagctgggactgtaa

SEQ ID NO: 32314 - protein, 195 aa, Unknown
  Obtained from environmental sample
  DOMAIN (1)...(193): FAD linked oxidases, C-terminal domain
  misc_feature (1)..(195): Xaa is any amino acid
MEKRCSFMNIAVEGDSRIAKLEKEIIESICAKYKAEDMGSEYGEKWYENRITFFYPGHIMNNPQMFGTMDTVSDYSHIDKIYWAMKNAVESNFPGVRFIAHCSHWYEWGVMLYDRFIMDEPPDESEEALRLHNRIWNAGVRAAMANGGVINDHHGIGLKLSRLMKEQYGSAMQVMQALKKQLDPNGIMNPYKLGL

SEQ ID NO: 32315 - DNA, 477 bp, Unknown
  Obtained from environmental sample
  misc_feature (1)..(477): n is a, c, g, or t
ttgatgtttcatccctatctacagggggagcttactccctacaacgacccgaaactaagagccagttttaccggaatttcttcaagtcataataggggacattttacaagggcagtacttgaaggagttgctttttcgcttcgggactgtatggcgacactggaagaacagaacatggtgatgaaacgtacccgcatcataggcggcggcgcaaagagcattttatggcggcagattattgcggatgtacttggcctaaacatggaaaaagccacggtagatgattcatctttcggcagcgccatgcttgccgggactggtttgggatggttcagttcttttaaagaagcggcctctcaatgcgtcaaagtggattctatcgtagaagcggacatggaaaatcacaggcgctattcagaactgtttaccaaatacaaaagagttcatgacgccttggcgcaggtttatagcgcataa

SEQ ID NO: 32316 - protein, 158 aa, Unknown
  Obtained from environmental sample
  DOMAIN (1)...(139): FGGY family of carbohydrate kinases, C-terminal domain
  misc_feature (1)..(158): Xaa is any amino acid
MMFHPYLQGELTPYNDPKLRASFTGISSSHNRGHFTRAVLEGVAFSLRDCMATLEEQNMVMKRTRIIGGGAKSILWRQIIADVLGLNMEKATVDDSSFGSAMLAGTGLGWFSSFKEAASQCVKVDSIVEADMENHRRYSELFTKYKRVHDALAQVYSA

SEQ ID NO: 32317 - DNA, 924 bp, Unknown
  Obtained from environmental sample
  misc_feature (1)..(924): n is a, c, g, or t
atgagtctgcgcgtagaagattcgcgcaagctacttgtatatatagttggaaccgaaaagggaatcacccaacagagccttgtccaaaaatttcgtgcgttcctgctgacccgcataaagaaccacctagcggccttcatcaaagccgaaaaaatcaacatcttcgagattgacgagaaattgttgaacatctctgaggccctgcacaagacgttcaagcccgattttcgggattacggcatcgccttagagagatttttcgtcaccaccatagtcaagccggaggaggacagggcctaccagaggttcaaagagctccactttcgccagtatgcggatgtagccgaggcaaagctgcgccagcagacaggtttgattgaccaagaaacacaggccaagcgcatggtcatagaggcgcaggggatagctcaaaagcgggcagtggaaggctattcataccaagacgagcgcggcttcgatgtggccgagaaagtcgcttccaaccaagccatcggccagatgagcaaccttggcatcggcctcggcatgatgactggagtaggcagtgctgtagggccagtggtgggcggcgtagtggccggggctatgggcgcgatggcatcaacgaacctgaaccagccaaaagaagaacaaaccccagcccctgcccaaaactgccccaagtgccagaagcccctgccgccaaacgccaagttctgcttggagtgcggcgaaaaggttgtagctcttaaagaaaacgaaacaacctgcccatcctgcggaaagacagtcgcaaagggcaagttctgcgccgaatgcggggcggctctggttcccaagtgtccgcactgcggggcggaagccacgcccagcggcaagttctgcttggagtgcggcaagccattgaaagaacaggaggcataa

SEQ ID NO: 32318 - protein, 307 aa, Unknown
  Obtained from environmental sample
  misc_feature (1)..(307): Xaa is any amino acid
MSLRVEDSRKLLVYIVGTEKGITQQSLVQKFRAFLLTRIKNHLAAFIKAEKINIFEIDEKLLNISEALHKTFKPDFRDYGIALERFFVTTIVKPEEDRAYQRFKELHFRQYADVAEAKLRQQTGLIDQETQAKRMVIEAQGIAQKRAVEGYSYQDERGFDVAEKVASNQAIGQMSNLGIGLGMMTGVGSAVGPVVGGVVAGAMGAMASTNLNQPKEEQTPAPAQNCPKCQKPLPPNAKFCLECGEKVVALKENETTCPSCGKTVAKGKFCAECGAALVPKCPHCGAEATPSGKFCLECGKPLKEQEA

SEQ ID NO: 32319 - DNA, 648 bp, Unknown
  Obtained from environmental sample
  misc_feature (1)..(648): n is a, c, g, or t
atggccgccgaagggcagaaagtgcgcgtaatcgcgccgcgctgtatcgacaaaacgcgcctttcaactggcggcatctgcgacgcgattataaacgactgttccgcggaaacgccgaagcggacgcttgaggccaaggcgcggcaagtggaacggattttaacaaactccagccgcgccggatggagccacgtccttatgatcgaggaagcgcatgatttgaacatcaacacgctcaagtacctgaaacggttttgggaactggaagacggctataaaaaactgctttcaatcgttttaatcggtcagatcgaaatgaagatgaaacttgacgaatccaaaaactgggaagctcgggaagttatccggcgcatggaagttctggaactggaaccgctgggaagcggcgaagagatcgcaaaatatcttgacatcaaattcgcgaggctcggcaaaaaccgtcttgacattatcaatgattcaggctgtaccgcgctcgccgccaaactaaggcggcagacccgaacacagcaaatatattcggtcgcctatccgctgttgattaacaactggtgcatgaaggcgatgaattcagcctgcgaacttggcgcgaaatgcgttgacgccgaagtggtgaacgctttgtaa

SEQ ID NO: 32320 - protein, 215 aa, Unknown
  Obtained from environmental sample
  misc_feature (1)..(215): Xaa is any amino acid
MAAEGQKVRVIAPRCIDKTRLSTGGICDAIINDCSAETPKRTLEAKARQVERILTNSSRAGWSHVLMIEEAHDLNINTLKYLKRFWELEDGYKKLLSIVLIGQIEMKMKLDESKNWEAREVIRRMEVLELEPLGSGEEIAKYLDIKFARLGKNRLDIINDSGCTALAAKLRRQTRTQQIYSVAYPLLINNWCMKAMNSACELGAKCVDAEVVNAL

SEQ ID NO: 32321 - DNA, 588 bp, Unknown
  Obtained from environmental sample
  misc_feature (1)..(588): n is a, c, g, or t
atgatacgctcggctatactcctgtgcgcgaacactgttatacgcgccgacatggagcgtgaaatagcctatgctaacgaatttaaccgctcaatcattgacacttcgcctgtaggctttaccgtttttgacgaaaacgccaatattattgactgcagcgatgttactttgagaacattggggactacaagggaatactataaggaacatttccgtgaatttttacctgaataccaaagtgacggggtaaaatccatagataaggcggctgatttagttaggcgggtgctgaacggcgaaaagttggtgttggagtggaataattgtacaacttcgggagagattattccttttgaagttacaatggtgcgtgtgatgtataaagggaatcgtatgatattggggtatcaatacgacctgcgaaaaataagaaagatgaccgaaagcatacgcgaacagggagaacagctaaaaaccaagctggaacagcaggaattaatttcagagctttcaagaggatttatttcttccggtgattcgcaaacgctggtacaagaagccgtcgccaagttgggactttacccataa

SEQ ID NO: 32322 - protein, 195 aa, Unknown
  Obtained from environmental sample
  misc_feature (1)..(195): Xaa is any amino acid
MIRSAILLCANTVIRADMEREIAYANEFNRSIIDTSPVGFTVFDENANIIDCSDVTLRTLGTTREYYKEHFREFLPEYQSDGVKSIDKAADLVRRVLNGEKLVLEWNNCTTSGEIIPFEVTMVRVMYKGNRMILGYQYDLRKIRKMTESIREQGEQLKTKLEQQELISELSRGFISSGDSQTLVQEAVAKLGLYP

SEQ ID NO: 32323 - DNA, 1011 bp, Unknown
  Obtained from environmental sample
  misc_feature (1)..(1011): n is a, c, g, or t
gtgattcgcaaacgctggtacaagaagccgtcgccaagttgggactttacccataaagtgtcattagtgttcgtttttgctattgattatgaccgtaaagatactcgtcttgcctatcattggtgtgcagacggcgcgccgccccggatggctattgccaatctgtatgaatatttaattgaccttttcccggaaaatctgcccgacagcaccacagtaccgatagttgtctgcgacgataccgccaccagccacgaggcggtttttcaggcgctacatgacattgatgtaatggcggttataggcgccccgctttatgttgacggtcacttatggggggtaatgtgcgtagaacagagccttacgccgcgcaagtggacgcaaaatgaaaaaagatttgtcgccattacggcaagtaccatcgcaggcgttatcatgcgcgacatctataccgtaaaacttaaagaagcgcttagtaaggcgatggaagcgagcaaggcaaaaagcgatttcctttccaacatgagccatgaaatacgcactcccctgaacgcgataaccggaatgacaacaatcggcaagaacgctaaagatatggaacgcaaagactacgcgctggacaagatagaaggcgcgtcaacacaccttctcggcgttataaacgatgtactggatatgtctaaaatcgaggcgaatatgctggagttgtcgccctgcgaatttaattttgaaaagatgttgcaaaaagtagtctcggtaatcaatttccgcgtggaggaaaagcggcaaaaactcgcggtacatcttgacagcaaaattcccaaaaccctgatagccgatgaccagcgtctggcccaggtagttaccaatcttttgagcaacgcggttaaattcacgcctgaagaaggatccattattctaaacgcgatctttattgaggagaaaaaaggtctctgtacaatacaggtttcagtaaccgacanggggctcggccgatctgatacttggtag

SEQ ID NO: 32324 - protein, 336 aa, Unknown
  Obtained from environmental sample
  DOMAIN (34)...(145): GAF domain
  misc_feature (1)..(336): Xaa is any amino acid
MIRKRWYKKPSPSWDFTHKVSLVFVFAIDYDRKDTRLAYHWCADGAPPRMAIANLYEYLIDLFPENLPDSTTVPIVVCDDTATSHEAVFQALHDIDVMAVIGAPLYVDGHLWGVMCVEQSLTPRKWTQNEKRFVAITASTIAGVIMRDIYTVKLKEALSKAMEASKAKSDFLSNMSHEIRTPLNAITGMTTIGKNAKDMERKDYALDKIEGASTHLLGVINDVLDMSKIEANMLELSPCEFNFEKMLQKVVSVINFRVEEKRQKLAVHLDSKIPKTLIADDQRLAQVVTNLLSNAVKFTPEEGSIILNAIFIEEKKGLCTIQVSVTDXGLGRSDTW

SEQ ID NO: 32325 - DNA, 1308 bp, Unknown
  Obtained from environmental sample
  misc_feature (1)..(1308): n is a, c, g, or t
atgtcgtcaacttccgtgtggacgaaaaacagcaaaaactcacagcgcacattgataaagaaattccccaaatcctcgtcgaccgaagaccagcggctggctcaggtcattatcaaccttctgggaaacgccgtcaaattcacgccggaaaacggttctatcagccttgatgcgcgttttttgggggaagaaaacggcctttgtaccatacaggttggcgtaaccgatacgggaatcggaataagcgacgaacagcaaaaaaacctgttcaactcttttcagcaggccgagtccagcacaacgcgcaaatacggcggcacagggctgggactggcgatttccaaaaacattgtggaattgatgggcgggtcgatagggattcaatccgagctgggaaaaggctcaacctttacctttacggttcaggcagagcgcggcgctgaaagaaggcggagacttttagccacagatgtgaatttgagcaatatccgtatcatggtggtagatgatgaccctgatattttgacatatttccatgatattgcacagggatttggcatatcatgcgaaactgccgtaagcggaaaagatgcgcttgcnttagtggacnagaaaggcgactgtcatatttattttattgactggaagatgccaggtatggacggcatacaactggcgcgtgaacttaaagtgcgtgcatccgaaaattctgtggtaataatgatttccgccgccgaatggagcgcggttgccgaagaagcaaaaaaggcgggagttaataaattcatgtccaaacctctgtttccctctactattgctgaaattatcaatgaatgtttaggtacaggcaaccgtcagaaagaagaggtgaagacggatattactggtctttataaaggacattgtatacttctggctgaagatgtggagattaaccgcgagattgtgctaaccttgcttgaaccggcgcagttggagatagaatgtgcggaaaacggagctgaagctgtcagtatgtttaccgaagcgccggaaaaatatgaaatgatttttatggacgtacagatgccggaaatggacggttacgaagcaacacggcgtataaggactgtcgaagcggaaatgcattcctcatcggcagcttcctatgatggagaatcgcacaggcaagttcccattattgcaatgactgcgaatgtgtttaaagaggatattgaaaaatgccttgaggcaggaatgaacggacatatcggaaagccgcttgattttaatgaggttctggaaaaattaagtaaatatttgtcctga

SEQ ID NO: 32326 - protein, 435 aa, Unknown
  Obtained from environmental sample
  DOMAIN (28)...(144): Histidine kinase-, DNA gyrase B-, and HSP90-like ATPase
  misc_feature (1)..(435): Xaa is any amino acid
MSSTSVWTKNSKNSQRTLIKKFPKSSSTEDQRLAQVIINLLGNAVKFTPENGSISLDARFLGEENGLCTIQVGVTDTGIGISDEQQKNLFNSFQQAESSTTRKYGGTGLGLAISKNIVELMGGSIGIQSELGKGSTFTFTVQAERGAERRRRLLATDVNLSNIRIMVVDDDPDILTYFHDIAQGFGISCETAVSGKDALALVDXKGDCHIYFIDWKMPGMDGIQLARELKVRASENSVVIMISAAEWSAVAEEAKKAGVNKFMSKPLFPSTIAEIINECLGTGNRQKEEVKTDITGLYKGHCILLAEDVEINREIVLTLLEPAQLEIECAENGAEAVSMFTEAPEKYEMIFMDVQMPEMDGYEATRRIRTVEAEMHSSSAASYDGESHRQVPIIAMTANVFKEDIEKCLEAGMNGHIGKPLDFNEVLEKLSKYLS

SEQ ID NO: 32327 - DNA, 495 bp, Unknown
  Obtained from environmental sample
  misc_feature (1)..(495): n is a, c, g, or t
ttggccgagaggatattccaactggaacagatgacaaaacagcaggcggaggcggaagccgccgttcgcgcaaaatcgacttttctggctaccatgagccacgagatgcgtacgccgctcaacgccattatcggcatgaccacgataggaaagtcagccgccgatcttgagcgcaaggattactgttttgccaagattgaagacgcttcccagcatctgttgggcgtaattaacgacattctggatatgtccaaaattgaagccggcaaatttgagctttcgcccgaggaatttagttttgaaaagatgattcagcgggttgtaaatgtcgtcaacttccgtgtggacgaaaaacagcaaaaactcacagcgcacattgataaagaaattccccaaatcctcgtcgaccgaagaccagcggctggctcaggtcattatcaaccttctgggaaacgccgtcaaattcacgccggaaaacggttctatcagccttga

SEQ ID NO: 32328 - protein, 164 aa, Unknown
  Obtained from environmental sample
  DOMAIN (24)...(89): His Kinase A (phosphoacceptor) domain
  misc_feature (1)..(164): Xaa is any amino acid
MAERIFQLEQMTKQQAEAEAAVRAKSTFLATMSHEMRTPLNAIIGMTTIGKSAADLERKDYCFAKIEDASQHLLGVINDILDMSKIEAGKFELSPEEFSFEKMIQRVVNVVNFRVDEKQQKLTAHIDKEIPQILVDRRPAAGSGHYQPSGKRRQIHAGKRFYQP

SEQ ID NO: 32329 - DNA, 744 bp, Unknown
  Obtained from environmental sample
  misc_feature (1)..(744): n is a, c, g, or t
atggcgagagcgaatccggacgcccgcattgtataccttgctgaccgcttgcattttccttacggcaagtttgagaaaacggagcttgccgaaatcctaaaaaaacttgtggggcgtcttattgatattattgaccccaaaatcgtggtgcttgcctgcaatacggcaaccatcgccgctctcgccgagctgcgggaaagttttcctgccctgccttttgtgggtacggttccggcaataaagcccgcggctctcgcgtcaaaaaccgggaaaatcggcgtgcttggcacggagttgaccatcaagcagccgtacatcagggagcttgcctccaggttcggcaacggagaaatctgcggtattgcagccccggagcttgtggaatttgtcgaaggccggttctattcagcttcgcctgatgaaaagaaggatattgtgacgacctggctgaaccgtttccgcgccgccggcgttgacaccctggtgctgggctgtacgcactttctctttctgttagacgaattccagcgggaagccgcccctgacattaccgtgtttgattcggtaaccggaatttcgcatcgcattgaatcattgatgggagagcaaaaggaaaaaagcggcgatgaaacatcccgccaacaaaacaggattctgcttactggcccctctgctcccgagccttcatgggtttctctggcggaacgactcggtttcagcctgtcgctgctggacgaatcatga

SEQ ID NO: 32330 - protein, 247 aa, Unknown
  Obtained from environmental sample
  DOMAIN (1)...(201): Asp/Glu/Hydantoin racemase
  misc_feature (1)..(247): Xaa is any amino acid
MARANPDARIVYLADRLHFPYGKFEKTELAEILKKLVGRLIDIIDPKIVVLACNTATIAALAELRESFPALPFVGTVPAIKPAALASKTGKIGVLGTELTIKQPYIRELASRFGNGEICGIAAPELVEFVEGRFYSASPDEKKDIVTTWLNRFRAAGVDTLVLGCTHFLFLLDEFQREAAPDITVFDSVTGISHRIESLMGEQKEKSGDETSRQQNRILLTGPSAPEPSWVSLAERLGFSLSLLDES

SEQ ID NO: 32331 - DNA, 762 bp, Unknown
  Obtained from environmental sample
  misc_feature (1)..(762): n is a, c, g, or t
atgatagtgggtcttgaagaacggaaaaattttttcagccgctttaaccagaagggcaactgcccccagcttcttgccgcgaatgtagacatggttctctgcatgacaagccgccagtcgccgccgttcaggccgcgttttcttgaccgcgttctgctgcaggccgactccgctgggattcaggcagccatagtctgcaataaaatcgatcttgacggcgatgactacaccgacgacaggctggacgccgacgagcgactggaagatttcacgcgtatcggttttgaagtcgcttttatttccacaaaaacgggggagggcttagacgatctgcgccatcgccttgagggaaagcgttccgttttgattgggcagtcgggagtgggaaagtcgagtcttattaacgcgctgatgccggaaataaaccttagaaccggaacgattaacgagaaatacgaccgcggcaaccacacaaccacgttatctgccatggtggagattgacagcggtacatggataattgatacgccgggcatacgccgttttattccaaacggagtcggcgccgatgaactgatcctgaacatgagggaatttgccccgcttgccggaaagtgcagttacggcctttcctgttcccaccgcagcgaaccgggatgcaagataatggaagcagttagtgcaggcgtaatccacgaggatcgctacaacagcttcctgcgtatccatgacgaactgtcangcaagaacgatgcagactga

SEQ ID NO: 32332 - protein, 253 aa, Unknown
  Obtained from environmental sample
  DOMAIN (118)...(224): GTPase of unknown function
  misc_feature (1)..(253): Xaa is any amino acid
MIVGLEERKNFFSRFNQKGNCPQLLAANVDMVLCMTSRQSPPFRPRFLDRVLLQADSAGIQAAIVCNKIDLDGDDYTDDRLDADERLEDFTRIGFEVAFISTKTGEGLDDLRHRLEGKRSVLIGQSGVGKSSLINALMPEINLRTGTINEKYDRGNHTTTLSAMVEIDSGTWIIDTPGIRRFIPNGVGADELILNMREFAPLAGKCSYGLSCSHRSEPGCKIMEAVSAGVIHEDRYNSFLRIHDELSXKNDAD

SEQ ID NO: 32333 - DNA, 1710 bp, Unknown
  Obtained from environmental sample
  misc_feature (1)..(1710): n is a, c, g, or t
atgagggccgagactagntatacacaatgcggtatgcccaccgtttgcggggaactggccgcggcgattttccgggtgatcgacaaagagggaaacctccgcgatctgccggaacttaaggagataaagcggcggataagcgggcttaaagccgcgctggataccgcagttgcccgctgtctttccgatgaagaaaccaggcacatgctgcaatcaacactgccttcgcagagggacggcaggacggtgctggcggtaaaggccaattttcgcggacgcgtcaagggcatagtccacgaggtttcttctaccgggcagacggtttttatagaacctgaaaatgtcgtggaaaaaaacaatgacattcttgtggaaaccagaaaccttgaagcggaaataaaaaaaatattgttaaatttaacaaaacaaatatcaggacacggagaagaaattaaatcatttcatctaacggtattaagaatggaagcgctgatgacaaaagcgaggtactcgctggaaacagcggggtattttaccccgggattcttcacctcctcggccgggtcaggctttacgcttgtgcaggcaaggcaccccctgctggaaaacgccgtacccatagatctttccatgggcagtgaaggcacgcgcgccctgataatcaccgggccgaacacgggaggcaaaaccgtcgtgcttaaaaccgcgggccttctcgccatgatgaaccagatcggcctggccattcccgcggcccaaggcagcgagctcccggtattcgacggcgttttcgccgacatcggcgacgagcagtcgatcagccagtcgctttccactttttccgcccacataaccaatgtcgccgccatcatcgcccattccaccgcaaattccctcgcgcttcttgacgagcttggctccggcaccgacccccaggagggcggcgctatcgcgatggcggtgcttgatcgcctgattgagaaaaagacacgcctcttaatcactacccaccacggcgtcctgaaaaactacggttacaccagggcggaagttgaaaacgcctcagtggaatttgattcccgcaccctctcgcccacatacaggatcattacgggcatacccggcgagagccgcgcccttgaaattgcggggcgtaacggtctgccgcaggaaatcatcgaaagggcgaaaagctatcttaacgacgggcgctctgatatttcagagatgataaggggcttgaaagaaaagcgccgcgagcttgatacgcttgaacaaaagatgaggcttgaggaggaccgtttaagggacgagcggcggaaatccgatcttaaagaactgcggctcaggcaaaaagaaatagaactaaaagccggcctagcgggaaaactccgcctgctgttagacgaaagccgcaagaccctggaaaaccttgtgcgcgaactcaaggagggcgcgtcttctcaggaaggcgtttcgtcaccgcaagacacgttgtcccgcgagaaaacactcaaagtaaaggaatttttaaatgagcttgcccggacagtcgaagcggagaacgccgccctggagcaagaagaacgcgccatagccaaagaacgccgccgcgccgataacgccggagaggctgcggcaaatttcactcccggcatggaggtccttgcgggcgagtcaaaacggcgcggggtctgtctcttgatctga

SEQ ID NO: 32334 - protein, 569 aa, Unknown
  Obtained from environmental sample
  DOMAIN (177)...(406): MutS domain V
  misc_feature (1)..(569): Xaa is any amino acid
MRAETXYTQCGMPTVCGELAAAIFRVIDKEGNLRDLPELKEIKRRISGLKAALDTAVARCLSDEETRHMLQSTLPSQRDGRTVLAVKANFRGRVKGIVHEVSSTGQTVFIEPENVVEKNNDILVETRNLEAEIKKILLNLTKQISGHGEEIKSFHLTVLRMEALMTKARYSLETAGYFTPGFFTSSAGSGFTLVQARHPLLENAVPIDLSMGSEGTRALIITGPNTGGKTVVLKTAGLLAMMNQIGLAIPAAQGSELPVFDGVFADIGDEQSISQSLSTFSAHITNVAAIIAHSTANSLALLDELGSGTDPQEGGAIAMAVLDRLIEKKTRLLITTHHGVLKNYGYTRAEVENASVEFDSRTLSPTYRIITGIPGESRALEIAGRNGLPQEIIERAKSYLNDGRSDISEMIRGLKEKRRELDTLEQKMRLEEDRLRDERRKSDLKELRLRQKEIELKAGLAGKLRLLLDESRKTLENLVRELKEGASSQEGVSSPQDTLSREKTLKVKEFLNELARTVEAENAALEQEERAIAKERRRADNAGEAAANFTPGMEVLAGESKRRGVCLLI

SEQ ID NO: 32335 - DNA, 648 bp, Unknown
  Obtained from environmental sample
  misc_feature (1)..(648): n is a, c, g, or t
gtgctgatcaccgtaatttcattcgccctgggggtgtatttttccacaaaggcgggaaccaaaaccgatctcgcggttacatttatcgcgcttgcccttcacgcctttcccggccttctgcttttgatactcttgcagttattcgcctcggtgacaggtctttttccggtaaccgcctatccgcccttccctttctcacaggctccggtgaaattcgtcttttcctacgcccaccatatttttctgccgcttctttccgctttcctcggcggcataggcggcaccctgcgcatgatacgcgccacaatgctcgaccagctcggccagccctacatcatagccttaaggtcgcggggcatttccgaattcagggtttatttttcccacgcccttcgcaatacccttaacccctatatcaccggcagcgcgaacctccttgccggccttttttcaggctcgctgatacttgaaataatttttgcctatccgggtatcggcaggctaatgtacgaggccgttatacaacaggacataaacctcgtgcttgcgaatatcatgtttatttcgtttttagttctggtgggcatggcattagccgacattttgcttgcctttgtcgatccgaggattcgctatggaaaggaataa

SEQ ID NO: 32336 - protein, 215 aa, Unknown
  Obtained from environmental sample
  SIGNAL (1)...(18)
  DOMAIN (1)...(212): Binding-protein-dependent transport system inner membrane component
  misc_feature (1)..(215): Xaa is any amino acid
MLITVISFALGVYFSTKAGTKTDLAVTFIALALHAFPGLLLLILLQLFASVTGLFPVTAYPPFPFSQAPVKFVFSYAHHIFLPLLSAFLGGIGGTLRMIRATMLDQLGQPYIIALRSRGISEFRVYFSHALRNTLNPYITGSANLLAGLFSGSLILEIIFAYPGIGRLMYEAVIQQDINLVLANIMFISFLVLVGMALADILLAFVDPRIRYGKE

SEQ ID NO: 32337 - DNA, 387 bp, Unknown
  Obtained from environmental sample
  misc_feature (1)..(387): n is a, c, g, or t
atgctaaaacttattctcagatgcctgtcacgcctaaaacaacggttcccgcttgccatgtatatcaccaaccggcttgtaacaatggcggtcatgctgttcctgctggggcttgcggttttcgcgcttatggcgcttgccccgggcgatattgtagaccagataatgctgcagcagcttatgggaagctccgagggaaagggcggcagggacaacaaaaatttcagcgcggaacagttggccgcttaccgcgccgaattcggcctggacaagcccttttacgttcaatatttccgctggcttaacagggttatcgtccacggcgatctcggggtcagccttatatcgcgcgcgcctgtttcctttttatctcgtcgcgcctgttaa

SEQ ID NO: 32338 - protein, 128 aa, Unknown
  Obtained from environmental sample
  misc_feature (1)..(128): Xaa is any amino acid
MLKLILRCLSRLKQRFPLAMYITNRLVTMAVMLFLLGLAVFALMALAPGDIVDQIMLQQLMGSSEGKGGRDNKNFSAEQLAAYRAEFGLDKPFYVQYFRWLNRVIVHGDLGVSLISRAPVSFLSRRAC

SEQ ID NO: 32339 - DNA, 645 bp, Unknown
  Obtained from environmental sample
  misc_feature (1)..(645): n is a, c, g, or t
atgagggaggatcagaaggacatctactacataacggcggagaaccgcggcgtagcggagaaaagcccgcacttggagatattcaaggcgaagagcatagaggtgctttacctcgtagacccgattgacgagtggatagtcggcatgggcggcataggcgaatacggcgggaagcagctcaagtccgtcacgacgggcgaccttgatttaggggatttgggcaaggaggaggcggagaagcgtaaggcagcgcaggcggagttcgcggggctttccggccgcataaaagagatattggccgactcggttgaagaggtgcgcgttacaagcaggctgaaggacagtccggcgtgtttagtcgccggagcgtatgccgttggggcgcaccttgagaagatgatgaaggccatgggtcaggaggtaccggtttcgaaacgggttctcgagataaacgccgagcatcccatcatcaaaaacataaacgcgcgttacggcgaagcgccggacgatccggagtttgcggactgggtgcgtctgctctacgacggggcgctaatcgcggagggacggcctgcggccgaccctgcagcctacctgaagcgggtgaacgccatgcttgagaaggccagcgcgcggcaaggatag

SEQ ID NO: 32340 - protein, 214 aa, Unknown
  Obtained from environmental sample
  DOMAIN (1)...(212): Hsp90 protein
  misc_feature (1)..(214): Xaa is any amino acid
MREDQKDIYYITAENRGVAEKSPHLEIFKAKSIEVLYLVDPIDEWIVGMGGIGEYGGKQLKSVTTGDLDLGDLGKEEAEKRKAAQAEFAGLSGRIKEILADSVEEVRVTSRLKDSPACLVAGAYAVGAHLEKMMKAMGQEVPVSKRVLEINAEHPIIKNINARYGEAPDDPEFADWVRLLYDGALIAEGRPAADPAAYLKRVNAMLEKASARQG

SEQ ID NO: 32341 - DNA, 780 bp, Unknown
  Obtained from environmental sample
  misc_feature (1)..(780): n is a, c, g, or t
atgaaaactatcgctctaatcaccgatttcggcaccgaggactggtttgccggcgagctaaaagggactatcctatcgctcaacccgctcgcagtccccgtagaccttacgcatgccgtccagcggggttacatacgggaggccgcgtttattctcttggcctcctaccgcagcttcccggagaacaccgtgttcatgtcggcggtggactacggcagcacgcgcacgcgggcgatctgcgctcggacggcgtcgcatatttttttggccccggataacggcctgctgtcgtgggtgctgcggcgcgagacggcggcggacgtgcgcgaagttaacatcgaggagtaccttctgccgtcgggctgttcgactttcccggcccgcgacttgcttgcgccgttagccgccgggctctcggattggctggagttcgagaagtgcggcgaagagactaaggagtacgtaacgctgcattggccggagccgaatttgggcaagggcactgcggaggcggcggtgatatacatagaccgcttcggaaacgctataacatccataagcccgcgcgaagtcgtattctcgtgcggcgacgctccggagtgcatactggagaacgacaggcgcgtgccgctcggcaaccactacagcgacgttcccttatggaacgcggtggcgtatccggggtcggcggggttgatggagataggggtgaacggggggaacgcggcggagatattggggttggatgtggggagtaacgtttgttttacggcgcattga

SEQ ID NO: 32342 - protein, 259 aa, Unknown
  Obtained from environmental sample
  DOMAIN (3)...(258): Protein of unknown function DUF62
  misc_feature (1)..(259): Xaa is any amino acid
MKTIALITDFGTEDWFAGELKGTILSLNPLAVPVDLTHAVQRGYIREAAFILLASYRSFPENTVFMSAVDYGSTRTRAICARTASHIFLAPDNGLLSWVLRRETAADVREVNIEEYLLPSGCSTFPARDLLAPLAAGLSDWLEFEKCGEETKEYVTLHWPEPNLGKGTAEAAVIYIDRFGNAITSISPREVVFSCGDAPECILENDRRVPLGNHYSDVPLWNAVAYPGSAGLMEIGVNGGNAAEILGLDVGSNVCFTAH

SEQ ID NO: 32343 - DNA, 915 bp, Unknown
  Obtained from environmental sample
  misc_feature (1)..(915): n is a, c, g, or t
gtgggcgaggaacttacggataacatgaatcaaacatccaaggtggttacagagattacaggcaatatcaagaaaatcaaaggccaagtcgtaacccagtccgaggtggcaaccgagacaactgccaccatgggacaggtggttgaaaacatcagccgccttaataccagcgtggaagtccagaccgaaagcgtggcccaatcgtcttccgcggtggaggaaatgctcgccaacataaagagcgtaaccagtacacttatgcagaacgccgagaacgtaaagcacctcaccagcgcctcggaacttgggaggaccagtcttgaggaagtctcccaggacatccagggcattgcaaaagagtctgaggggcttcttgagatcaattcggtcatgcagaacattgcaagccagaccaaccttctttccatgaacgcggccatagaagcggcccatgcgggggaatcagggaaagggttcgccgtagtagcggatgaaatccgcaaactcgccgaatcatccagcgtacagtccaagaccatttccacggtgttaaaaaagataaagtcttccatcgacaagattaacaagtctaccaccacggttctggaccagttccaggacatcgacaaggaagtgcggacagtttcagacctggaagcgaatataagaaacgccatggaagagcaaagcgagggaagcaagcagatattgcaagccataagccatctgcaagacacaaccagagaagtcaaagacggctccgagaaaatgctccaggacagccatgaagtcatcaaggaaagccaaagccttgcggaagcccacaaagagataagcgagggagtcaacgaaatagccaccggcgccgactatattaactccgcagtcgagcgggttcacgtcatctccaaatga

SEQ ID NO: 32344 - protein, 304 aa, Unknown
  Obtained from environmental sample
  DOMAIN (59)...(302): Methyl-accepting chemotaxis protein (MCP) signaling domain
  misc_feature (1)..(304): Xaa is any amino acid
MGEELTDNMNQTSKVVTEITGNIKKIKGQVVTQSEVATETTATMGQVVENISRLNTSVEVQTESVAQSSSAVEEMLANIKSVTSTLMQNAENVKHLTSASELGRTSLEEVSQDIQGIAKESEGLLEINSVMQNIASQTNLLSMNAAIEAAHAGESGKGFAVVADEIRKLAESSSVQSKTISTVLKKIKSSIDKINKSTTTVLDQFQDIDKEVRTVSDLEANIRNAMEEQSEGSKQILQAISHLQDTTREVKDGSEKMLQDSHEVIKESQSLAEAHKEISEGVNEIATGADYINSAVERVHVISK

SEQ ID NO: 32345 - DNA, 831 bp, Unknown
  Obtained from environmental sample
  misc_feature (1)..(831): n is a, c, g, or t
gtggctatttcgttgactccctcgcttatctctttgtgggcttccgcaaggctttggctttccttgatgacttcatggctgtcctggagcattttctcggagccgtctttgacttctctggttgtgtcttgcagatggcttatggcttgcaatatctgcttgcttccctcgctttgctcttccatggcgtttcttatattcgcttccaggtctgaaactgtccgcacttccttgtcgatgtcctggaactggtccagaaccgtggtggtagacttgttaatcttgtcgatggaagactttatcttttttaacaccgtggaaatggtcttggactgtacgctggatgattcggcgagtttgcggatttcatccgctactacggcgaaccctttccctgattcccccgcatgggccgcttctatggccgcgttcatggaaagaaggttggtctggcttgcaatgttctgcatgaccgaattgatctcaagaagcccctcagactcttttgcaatgccctggatgtcctgggagacttcctcaagactggtcctcccaagttccgaggcgctggtgaggtgctttacgttctcggcgttctgcataagtgtactggttacgctctttatgttggcgagcatttcctccaccgcggaagacgattgggccacgctttcggtctggacttccacgctggtattaaggcggctgatgttttcaaccacctgtcccatggtggcagttgtctcggttgccacctcggactgggttacgacttggcctttgattttcttgatattgcctgtaatctctgtaaccaccttggatgtttga

SEQ ID NO: 32346 - protein, 276 aa, Unknown
  Obtained from environmental sample
  misc_feature (1)..(276): Xaa is any amino acid
MAISLTPSLISLWASARLWLSLMTSWLSWSIFSEPSLTSLVVSCRWLMACNICLLPSLCSSMAFLIFASRSETVRTSLSMSWNWSRTVVVDLLILSMEDFIFFNTVEMVLDCTLDDSASLRISSATTANPFPDSPAWAASMAAFMERRLVWLAMFCMTELISRSPSDSFAMPWMSWETSSRLVLPSSEALVRCFTFSAFCISVLVTLFMLASISSTAEDDWATLSVWTSTLVLRRLMFSTTCPMVAVVSVATSDWVTTWPLIFLILPVISVTTLDV

SEQ ID NO: 32347 - DNA, 1059 bp, Unknown
  Obtained from environmental sample
  misc_feature (1)..(1059): n is a, c, g, or t
ttgtccccgcaatgcggggacttaaagcagccagccgcttacgaggcttataaaggagttaatatgtcaagaccggttactattttttcaggacaatgggcagatttgccctttgaacaattctgcgaaaaagttcattcgtttggctatgacggcattgaaattgcctgttggggcgatcatattgatttgaaaaaagcagccgaggatactgcctatgttgaggaacgcaaggccattttgaaaaaacacaatcttaaaacctgggcgattgggacccatctggttggccagtgcgtcggtgacttatgggaccagcggctggacggttttgccccgccggcgctggcgggaaagcccgaagaaatccgccaatgggctgttcaagagatgaagcatgcggcacatgcggctaagaacatgggcgtaaaagtcgttaccggctttatgggaagcccgatctggaagtactggtactccttcccgcaaactacggaaaaaatgattgatgacgcttttcaggagattgtcagcctgtggattcctatacttgacgaattccagcgactcggcatgaagtttgcattagaagtgcatcccaccgaaatagcctttgatattgcttcggcagaaagggctttacaagcggtaaactatcatcctgcatttgggttcaactacgacccgagccatttcggctatcagggcgtagattacatagaatttatatacaaatttgccgatcgtattttccacgtacacatgaaagacgtcgcttggagtcaatatccaactcaggcaggcgttttcggcggacatttaccatttggcgaccgtcgtcgttattgggacttccgcagtgttggacgcggaaacattgaatttgaagaaataattcgtgcattaaaccgcatcaattattacggtccgctttcagtagaatgggaagacagcggaatggacagagaaaatggtgccgctgaatcgtgcgaatacgtaaaaggaattgatttcacaccctctaacatcgctttcgactccgcttttgaaagacaataa

SEQ ID NO: 32348 - protein, 352 aa, Unknown
  Obtained from environmental sample
  DOMAIN (294)...(348): AP endonuclease family 2 C terminus
  misc_feature (1)..(352): Xaa is any amino acid
MSPQCGDLKQPAAYEAYKGVNMSRPVTIFSGQWADLPFEQFCEKVHSFGYDGIEIACWGDHIDLKKAAEDTAYVEERKAILKKHNLKTWAIGTHLVGQCVGDLWDQRLDGFAPPALAGKPEEIRQWAVQEMKHAAHAAKNMGVKVVTGFMGSPIWKYWYSFPQTTEKMIDDAFQEIVSLWIPILDEFQRLGMKFALEVHPTEIAFDIASAERALQAVNYHPAFGFNYDPSHFGYQGVDYIEFIYKFADRIFHVHMKDVAWSQYPTQAGVFGGHLPFGDRRRYWDFRSVGRGNIEFEEIIRALNRINYYGPLSVEWEDSGMDRENGAAESCEYVKGIDFTPSNIAFDSAFERQ

SEQ ID NO: 32349 - DNA, 525 bp, Unknown
  Obtained from environmental sample
  misc_feature (1)..(525): n is a, c, g, or t
atgaagacggtaattgcgggctacgaattcgctcaccgcgacgattacgaggggaggagcattatatcggagattaaagaagacgcggacaacaagaatatcgaaagcattgtcgttacgccggataataaattttaccgcgaggtgtatacacaaaagcaaatcgaagatctgcgaaaagaaattgagattgacacctacgacggcatgattcctgaaatgagtaaaggcgacgtggtggtagacgattacaatcactatgaaaccgacgtgcttatcaaatcaatgaagccggatatattcctttcgggtatcaaggataaatattcaattcaaaaagagggtgtgtcttcgcggcagattcactcttatgactattccggtccttatgccgggttcaacggcgcggtaaatttcggacgcgacgttacgatggcgctgtacacaaacgcatggaaactggttacgccgccgtggaaacacgacccattattatttggaaaggtaggtggtgaaaatgcttga

SEQ ID NO: 32350 - protein, 174 aa, Unknown
  Obtained from environmental sample
  misc_feature (1)..(174): Xaa is any amino acid
MKTVIAGYEFAHRDDYEGRSIISEIKEDADNKNIESIVVTPDNKFYREVYTQKQIEDLRKEIEIDTYDGMIPEMSKGDVVVDDYNHYETDVLIKSMKPDIFLSGIKDKYSIQKEGVSSRQIHSYDYSGPYAGFNGAVNFGRDVTMALYTNAWKLVTPPWKHDPLLFGKVGGENA

SEQ ID NO: 32351 - DNA, 966 bp, Unknown
  Obtained from environmental sample
  misc_feature (1)..(966): n is a, c, g, or t
gtggtgaaaatgcttgacttaactacaaaggaaataaaagaaagaagcgcgctgaggattaacccctgcaaaatctgccagcctgtcggggcgatgtacgccgcgttaggcgtaaaaaaatgtatgcctcattcacatggttcacagggctgttgttcctatcacaggacggttctttcccgccattttaaggaaccggcgattgcgtccagttcgtcgttcacggaaggggccagcgtgttcggcggaaagagcaatataaccaccgcgtcaaaaaacatttttgatatgtacgacccggatattatcgcggtgcataccacttgtttatcggaaaccatcggcgacgatttaggctcattcattacggatttggaagttcccgaaggaaaactcgtggtgcattccaacacgccaagctatgtaggctcccacattaacggtttcttcaatatgatgatggggtttatgaactacctgacccaaaagaccggagcgcccaacggaaaaacggcgatatttccgggttgggtaaaccccggtgacattcgggagttaaaacgccttgcgaaacttttaggcgtaaaggcgacttttttccctgaccaaagcggagtgctggacgctccgatgacgggcaagtatgaaatgtaccccgacggcggcacaacaattgaggaaattcgcggtttgggagacagcagcggattaatagcgcttggcgaaattatcagcgttgaacctgctgaactgttgaacagaaagtggaaagtggactttactctgcttccgctgcctgtgggagttgcgtataccgatcaatatcttatcgcgctgcgtaaacaggctaataccgtagttccccccgaactggatcatgaacgcggacaattggtagacttgcttttggattccaccagtacacatatcaaaagaaggttgcccatatcggcgatccggacgtag

SEQ ID NO: 32352 - protein, 321 aa, Unknown
  Obtained from environmental sample
  DOMAIN (18)...(321): Nitrogenase component 1 type Oxidoreductase
  misc_feature (1)..(321): Xaa is any amino acid
MVKMLDLTTKEIKERSALRINPCKICQPVGAMYAALGVKKCMPHSHGSQGCCSYHRTVLSRHFKEPAIASSSSFTEGASVFGGKSNITTASKNIFDMYDPDIIAVHTTCLSETIGDDLGSFITDLEVPEGKLVVHSNTPSYVGSHINGFFNMMMGFMNYLTQKTGAPNGKTAIFPGWVNPGDIRELKRLAKLLGVKATFFPDQSGVLDAPMTGKYEMYPDGGTTIEEIRGLGDSSGLIALGEIISVEPAELLNRKWKVDFTLLPLPVGVAYTDQYLIALRKQANTVVPPELDHERGQLVDLLLDSTSTHIKRRLPISAIRT

SEQ ID NO: 32353 - DNA, 1374 bp, Unknown
  Obtained from environmental sample
  misc_feature (1)..(1374): n is a, c, g, or t
atgggtcagcctgaactgcttgaaaccgcccgccgcactcttacggataaagaacgcggctacggaaaatggaatatcagttttgaagaaggagcgttagaacacatagtggaagtagcgggcggagacgcaaggagtcttcttaacgctatagaactcgccgtagaaacaagcgttacgccgtggccccccaaagaaggaacggagattcacatttccatggaagcggcggaagaaagcatacagaggcgcgccctcctctacgaccgagacggcgactaccattttgacactatcagcgcgtttataaaaagcgttaggggaagcgaccccgatgccgctctgtactggcttgcgaaaatggtgcgcgccggagaggacccgaaatttattttcagacgaatgattatcctagcgagcgaagacgtggggcttgcagaccctaacgcgctctccgtcgttatctcctgcgctcaggcttttgagcgaatcggcttccccgaaggtaactttccgctttcccacgcctgcctttatctttccaccgctcccaaatcaaacacaaccatgtcttactttgacgcgctcaaagccgtggaaagcgaggacgccgaagtccccaatcatttacgagacgcaagcagagacgctgaaagtttcgggcatggagagggatatgtctatcctcacgcgtaccgcgatcattgggcggctcagcagtacctgccgaattcattgcgcggaagaactttttacattccgtcgtcgtcgggttatgaaggaaaaataaaagaagatgttttaagaaaacgagaattgcaggcggcgattgtactgggttcgcaaaacgcggatgccgacggagaatttttaacatggtcggcggcggcaaaaggacgcgaaggctggttcaaacgccttgaatcgggaaggagcagactgctgttaaacgacagaaacgctgttttttcatcggcttgcgtctcgcggcaggatcgggtgttaattcccctcgctaacgacgggcttcttctttgggaaagcctgcgcaaatgcccagaaggtcttacagccgcgcttgtaaacaatacgccggcaaaagacgctctttatcaatacgcatccgtgttagacgaaaccgaaaaaccgttaatcgccgtaaccgaagaaattatcccagatcccaaagagtgcgaagaatggttttcctgctctgaatttgaacatattttgatccgcgccgtcagattaacagtcaaccccaaaattctcgcttcccgcgctaaagctattcttacaaaaaaaggaaacacggtattactctgtccccgccccgtctcggcgagcgtctttcacgcatctcggccgatctga

SEQ ID NO: 32354 - protein, 457 aa, Unknown
  Obtained from environmental sample
  misc_feature (1)..(457): Xaa is any amino acid
MGQPELLETARRTLTDKERGYGKWNISFEEGALEHIVEVAGGDARSLLNAIELAVETSVTPWPPKEGTEIHISMEAAEESIQRRALLYDRDGDYHFDTISAFIKSVRGSDPDAALYWLAKMVRAGEDPKFIFRRMIILASEDVGLADPNALSVVISCAQAFERIGFPEGNFPLSHACLYLSTAPKSNTTMSYFDALKAVESEDAEVPNHLRDASRDAESFGHGEGYVYPHAYRDHWAAQQYLPNSLRGRTFYIPSSSGYEGKIKEDVLRKRELQAAIVLGSQNADADGEFLTWSAAAKGREGWFKRLESGRSRLLLNDRNAVFSSACVSRQDRVLIPLANDGLLLWESLRKCPEGLTAALVNNTPAKDALYQYASVLDETEKPLIAVTEEIIPDPKECEEWFSCSEFEHILIRAVRLTVNPKILASRAKAILTKKGNTVLLCPRPVSASVFHASRPI

SEQ ID NO: 32355 - DNA, 459 bp, Unknown
  Obtained from environmental sample
  misc_feature (1)..(459): n is a, c, g, or t
gtggccctgcttatcgaagtattgacggacaacaaaaaccgggccgctgcggacgtgcggaatatccttacccgcgccgggggccagcttgccacagccggatcggtatcgcggcttttcaagcgcctggggatcatcactttggacggggagaaatacaccgaagaccaggtgatggaagcggccattgagggaggagccgaggacgtggccctttcgggcggcgtcattgaggtaaccacagcgcctgaggattttgaaaccgtagtgaacgctttaaccgaaaagagttttgaaaccatgagcgcggaaatcagcatggttccggaagctgacgtgagtctggataatgacgctaccgccaaagtgctgaagctaatcgataagctggaagaaaacgacgacgttcaaaacgtctactccaacataaacgtccccgacgggtttgaaactgagtga

SEQ ID NO: 32356 - protein, 152 aa, Unknown
  Obtained from environmental sample
  DOMAIN (2)...(144): Domain of unknown function DUF28
  misc_feature (1)..(152): Xaa is any amino acid
MALLIEVLTDNKNRAAADVRNILTRAGGQLATAGSVSRLFKRLGIITLDGEKYTEDQVMEAAIEGGAEDVALSGGVIEVTTAPEDFETVVNALTEKSFETMSAEISMVPEADVSLDNDATAKVLKLIDKLEENDDVQNVYSNINVPDGFETE

SEQ ID NO: 32357 - DNA, 1386 bp, Unknown
  Obtained from environmental sample
  misc_feature (1)..(1386): n is a, c, g, or t
ttgcccaggtcaagtagggttgattctattaaaccagcggtcactaaaaccgttgtaaaagcggattcccctgccttaaaaaagtttaagagtgccgccgaagcgggtaaaatgggcaattaccacctggcggcaaagatactgggagaactcatctcagagacagacgccccaacggaagcctggcttcttttggggcgttcttttcatgccatcaaggattattcccgcgccctggccacctttaacgattacatccggcaaagaccgcgctcgggagagggttacttttttgccggccgtacttacctggcagtcggaatgccctacaaggccgtccctttactacgcaaggccctggaaaacctgcccggaaaatcctcggatctccaggccgcagagttcaaatccaaaaccaaggccctgcttggaaccgcttacttaaaatccaaacactcccaggcggcagtagacattctggaaagtgctgtcgaagaagcccctgaagacaagcgtatctaccgcgcttatcttaattccctgatggtcaggggaatacgcctttgcagaatgggcgagtacgaaagcggccttcaaatgctgcgttttgtccaggataaccgcggcgaagcgggaatgggcgaaagcccgcttttaaggctggaacttggcagagccgccagagaaaccggagatctacaggaagccctggagcattttactgcggccctgaaaatagcgggcggcaaaggaatcggcgatcgcaggatacgctggtcaagagcttcaattttaatggccctgggaaaaaccaaagaagcaataaaggaaatcgaaataatccgctccaacgatacggcagtgcccgatcttccctggaacagcgaactggtcgatctttttatgattaaagccttccttgaaaacggcgaatggcagcgcgccgctgagtcttgcaaagaatggcttaaactgcgcgaggataagccgattatccatgctctttacgcggaagccctgagaaacctgggcaattataaaaaagcccacaaccatctgcagagagccctgaagattgatccgaatgcgctggaattttggtatgccgacatcctcgtttcatgggagggcaaagactacaaagctgtaaagaaagcgcttaaaagggcaaaatccattggcggagacagcgatcttttaacgcgctttgacatactctgccgggccagaacttcaaatgacacccaaagtatcattacattactgcaaaacgctatacgctcattgggccccgaaccggaactaatgtacgctttggcagaagcgtatctgaaagtgggcctcctggaggaggccttaaactggttaaaaagaccgccgccctaa

SEQ ID NO: 32358 - protein, 461 aa, Unknown
  Obtained from environmental sample
  DOMAIN (330)...(363): Tetratricopeptide repeat
  misc_feature (1)..(461): Xaa is any amino acid
MPRSSRVDSIKPAVTKTVVKADSPALKKFKSAAEAGKMGNYHLAAKILGELISETDAPTEAWLLLGRSFHAIKDYSRALATFNDYIRQRPRSGEGYFFAGRTYLAVGMPYKAVPLLRKALENLPGKSSDLQAAEFKSKTKALLGTAYLKSKHSQAAVDILESAVEEAPEDKRIYRAYLNSLMVRGIRLCRMGEYESGLQMLRFVQDNRGEAGMGESPLLRLELGRAARETGDLQEALEHFTAALKIAGGKGIGDRRIRWSRASILMALGKTKEAIKEIEIIRSNDTAVPDLPWNSELVDLFMIKAFLENGEWQRAAESCKEWLKLREDKPIIHALYAEALRNLGNYKKAHNHLQRALKIDPNALEFWYADILVSWEGKDYKAVKKALKRAKSIGGDSDLLTRFDILCRARTSNDTQSIITLLQNAIRSLGPEPELMYALAEAYLKVGLLEEALNWLKRPPP

SEQ ID NO: 32359 - DNA, 1011 bp, Unknown
  Obtained from environmental sample
  misc_feature (1)..(1011): n is a, c, g, or t
atgttggcggttttcatcgaaaccattggtacgggggccgaagttgttttcggcaaaaagatggtaagcgcggtcatgctcaaggagctcaaagaaggcaagataaccatgcttttaggggtaccaatgctcttcaacaaactcctggacggcatactgcgcggcattaaggccaagggccccatagtttacggaattattagcttcctgatggttatttccggcctcataaaaaaaacctttaaggtaaatcccgggaaaaaaatctttcattctatccttgaaaaagcctctttaagcacaataaggatctgtatcgccggcgggggcccccttgcgtcttcagttttccgtaaatacaaccaaatgggcattgattttgtccagggctacgggctcaccgaaacaagcccaataattaacctgaatcccgttgagcattataaagaagaaagcgtaggcaagattgttccccaggcggatatgaagatcctgaatccgggagaaaggggcatcggcgaagtcatcgttaagggcccgatggtaacgcagggttattatgaaaggcctgaactgaccgccgaatctttcacggaggacggttacttcaagaccggcgacctgggctacctggacagcgagggctacctctacctcaccggcagggccaaaaacgtgatcgtaaccgagggcggaaaaaatgtattccccgaggaaattgaaaacaaattccagttgtacgggcaaatcgatcaaattttggtccgcggctacctcatagatcaaaaaatgaaaaaggaaggcattgaagccctcatataccccaatccggaactgaaaaaggaagacggtcagccttattcccaggaagaactcaaaacaatgatggataacataatcgcagaggtgaaccagggcctgcacctttaccagaaaattggcagggttgtcatactggacaaacctatggagatgtcttctaccaaaaaaataaagcgctttacggtttaa

SEQ ID NO: 32360 - protein, 336 aa, Unknown
  Obtained from environmental sample
  DOMAIN (2)...(255): AMP-binding enzyme
  misc_feature (1)..(336): Xaa is any amino acid
MLAVFIETIGTGAEVVFGKKMVSAVMLKELKEGKITMLLGVPMLFNKLLDGILRGIKAKGPIVYGIISFLMVISGLIKKTFKVNPGKKIFHSILEKASLSTIRICIAGGGPLASSVFRKYNQMGIDFVQGYGLTETSPIINLNPVEHYKEESVGKIVPQADMKILNPGERGIGEVIVKGPMVTQGYYERPELTAESFTEDGYFKTGDLGYLDSEGYLYLTGRAKNVIVTEGGKNVFPEEIENKFQLYGQIDQILVRGYLIDQKMKKEGIEALIYPNPELKKEDGQPYSQEELKTMMDNIIAEVNQGLHLYQKIGRVVILDKPMEMSSTKKIKRFTV

SEQ ID NO: 32361 - DNA, 885 bp, Unknown
  Obtained from environmental sample
  misc_feature (1)..(885): n is a, c, g, or t
atggtgcgggctttctcggtttttccgcgtatgggtacacccgcgcaactccgctggacggaggacgaaaagcctgaacaggctgcaccgcctgtgatgtccccatacgcggcctggatgatcgccgacatactctcggacaggtcaagccgcttcgtaggtttcggccctgccccggcgcttgctacgccttttgagtcgatgttcaaaacaggaacggcaaatcagttccagcacatctgggcgttaggtgctacaaagcgctttaccgttggtgtctggatgggaaatttttcgggggaaaccgtcatcggcagcacgggtagctctatacctgccaggattgcggcaaaacttcttggcgctttagaggactcggctgggcaagagaaaaggttagtatctaaccgggtaaccgataacctggctggctccttgccgctgggaacaaccgaagtgcgaatctgtgcgctttctggaatggccgccggcccctattgcaccgggctcaccagggaattcatacgcaacgagaaaattcccgccgtctgtaactggcacacacaggcgggactattctaccccagcgaataccgcccgtggctaagcgagaggttccgttcaggcggcgtcaggcaggaaggttccgggcgtatcaggacgccggtctcaggcgcggtgttttaccttgacccatctctgcccgccgaagcccaagcgctacgggtggaaacatcgggctttagctccggcgcgcttttattttctgatggagagcttctcggcagccttaaccacgccggggtttatgcccttccgctttcacgcggccgccacagcgtcaccgtttcaattctgaaggcagtccgcatcggtagattttga

SEQ ID NO: 32362 - protein, 294 aa, Unknown
  Obtained from environmental sample
  misc_feature (1)..(294): Xaa is any amino acid
MVRAFSVFPRMGTPAQLRWTEDEKPEQAAPPVMSPYAAWMIADILSDRSSRFVGFGPAPALATPFESMFKTGTANQFQHIWALGATKRFTVGVWMGNFSGETVIGSTGSSIPARIAAKLLGALEDSAGQEKRLVSNRVTDNLAGSLPLGTTEVRICALSGMAAGPYCTGLTREFIRNEKIPAVCNWHTQAGLFYPSEYRPWLSERFRSGGVRQEGSGRIRTPVSGAVFYLDPSLPAEAQALRVETSGFSSGALLFSDGELLGSLNHAGVYALPLSRGRHSVTVSILKAVRIGRF

SEQ ID NO: 32363 - DNA, 339 bp, Unknown
  Obtained from environmental sample
  misc_feature (1)..(339): n is a, c, g, or t
ttgcggcgaaatgaaataagaccttatggttttatatattttttgttaaggaaggtagaaaagatgaatatgaaaaggtacatcatcttacctgtggtttcggcggtgttgttttccgcctcggtattgggctgcggcaaaaagcagcagctctttatttacaactggacctattacaccccgcaatcggtcatcgagaaatttgaaaaagagtacaaagttaccgtactctatgacgaatttgcctcaaacgaggatatgtacgcgaaaatcaaggccggggggtccggttatgacatcgtattcccctcaggggactatggtcatcctcggccataa

SEQ ID NO: 32364 - protein, 112 aa, Unknown
  Obtained from environmental sample
  misc_feature (1)..(112): Xaa is any amino acid
MRRNEIRPYGFIYFLLRKVEKMNMKRYIILPVVSAVLFSASVLGCGKKQQLFIYNWTYYTPQSVIEKFEKEYKVTVLYDEFASNEDMYAKIKAGGSGYDIVFPSGDYGHPRP

SEQ ID NO: 32365 - DNA, 870 bp, Unknown
  Obtained from environmental sample
  misc_feature (1)..(870): n is a, c, g, or t
atgaattttaaaaacatggtccgcaaaacaattacctcgctctggccgataaagcagggagaagccgcccgtcatgcccggcgcgcgatccggcgccaattttctttttcccagtctgtttttgccattaccatagtattcctgtttttgccccttttggtgcttatcctttattcgtttaacgattcctccggcatgaactggacgggcttttcgctgcgctggtacagacggctagttgaatcgcgggaattgtggcgggcttttacaaatagtattatcgtggctgtttcttccgccataaccgcaaccgtgctgggaaccgtcggcgctgtcggggtaaactggtaccgtttcaggctgcgctcatatgtgcagaccatttcttttctgcccatgattctgcccgaaataataatcggcgtatcgctctcgatttttttcgccggcataggaatacctctgggactgttcacaatcttcgtcgcccacacaacctttaacctgccctttgtcttccttatggtaatggcaaggctggatgaatttgatttttcaattatcgaggcggcacacgacctgggagccagcgagaggcagaccatgttccgggtgataataccgatatgtatgcccggtatactgtcaggtatgttaaccgctattaccctgtcgcttgaagattttgtgattactttttttgtcgccggtccgggttcgtcaaccctgccgatatttatatattccgccattacgcgccgaggcggcgtcacccccgtgatcagcgccctctcggtagtgatgattctgggaaccgttctgttatgcgtaacgctcaggaaattcctgaaatacattgcggcgaaatga

SEQ ID NO: 32366 - protein, 289 aa, Unknown
  Obtained from environmental sample
  DOMAIN (85)...(285): Binding-protein-dependent transport system inner membrane component
  misc_feature (1)..(289): Xaa is any amino acid
MNFKNMVRKTITSLWPIKQGEAARHARRAIRRQFSFSQSVFAITIVFLFLPLLVLILYSFNDSSGMNWTGFSLRWYRRLVESRELWRAFTNSIIVAVSSAITATVLGTVGAVGVNWYRFRLRSYVQTISFLPMILPEIIIGVSLSIFFAGIGIPLGLFTIFVAHTTFNLPFVFLMVMARLDEFDFSIIEAAHDLGASERQTMFRVIIPICMPGILSGMLTAITLSLEDFVITFFVAGPGSSTLPIFIYSAITRRGGVTPVISALSVVMILGTVLLCVTLRKFLKYIAAK

SEQ ID NO: 32367 - DNA, 360 bp, Unknown
  Obtained from environmental sample
  misc_feature (1)..(360): n is a, c, g, or t
atgccgagcacaagacaattcgatttttcattgctggaagccgcgcgcgatctgggggcgggcaagctcaccgctatgatcaaggtgatgttgcctaatatacggggcgggattttcacggcggtgctgtttacgtttattcccatctttggcgcttacgccgtgccgctgttggtggggggtaaggactcctatatgctggggaatatcatcgccgaccagttgtccaagtcgcgcaactggccccgtgccgcggcgatttcgatggtgcttactgtggtgacaacagtgggcgtattgctgatgatgaatgtccagaggcgggacgcttccaggctggcggaggcgaaaaaatcatga

SEQ ID NO: 32368 - protein, 119 aa, Unknown
  Obtained from environmental sample
  misc_feature (1)..(119): Xaa is any amino acid
MPSTRQFDFSLLEAARDLGAGKLTAMIKVMLPNIRGGIFTAVLFTFIPIFGAYAVPLLVGGKDSYMLGNIIADQLSKSRNWPRAAAISMVLTVVTTVGVLLMMNVQRRDASRLAEAKKS

SEQ ID NO: 32369 - DNA, 924 bp, Unknown
  Obtained from environmental sample
  misc_feature (1)..(924): n is a, c, g, or t
ttgttcacaggaggcgtaattccgcgggcggagaccctggaatcaggcaaaaccaccagcgattcatcgccggaggaaatcgagcgcaagatatccatttactcggcaatggggcatgtcgagcgcgacgggacgaaaatcaactttttcgatactcccggttcgtccgactttataggcggcgttatttcaagcctccgcgcttcggaaatggcgattttaaccgtggacggaaaatccggcgtccaaatcgaaactgtcaaactgtggcggaatctggacgaaagaaaaaaacccagaggcgtcttcataacaaagctggacaatgatcaggccgatttcaacaagacgcttgccgacataaaagaaaaattcaaggttgatgcggtgccgatttccataccgatgggaagcggcggcggattgaagggcgtcatcgacgttctgcacgaaaaagcgtatttaataggcggcgaggcggtcgaaaaagaaaccgccattcccgacgagttcaaggcggcggcggcggcggcgcgcgaaaaattaatcgaggcggcggcggacggcgacgaaagtttgatggaacagtatctcgaaaaaagcactctttctcccgaagaaatgaagaaggggcttattctgggtttggcgcagaacaagtatgttccggcctttgcgggatcagccttaaagaacgcgggtctcattccgcttttggatttcgccgccgatgttgcgcctaacccaagaaccgcgaaagacatattgatcgatgccgagaagaatgagacggaaatttctatcgatccggacaagactatggccgctcttgttatcaagacaaactacgatcaattttccggcaagcttacggggctcaaagttattacaggaaaacttgcctcccgattcccaagcctttaa

SEQ ID NO: 32370 - protein, 307 aa, Unknown
  Obtained from environmental sample
  DOMAIN (1)...(250): Elongation factor Tu GTP binding domain
  misc_feature (1)..(307): Xaa is any amino acid
MFTGGVIPRAETLESGKTTSDSSPEEIERKISIYSAMGHVERDGTKINFFDTPGSSDFIGGVISSLRASEMAILTVDGKSGVQIETVKLWRNLDERKKPRGVFITKLDNDQADFNKTLADIKEKFKVDAVPISIPMGSGGGLKGVIDVLHEKAYLIGGEAVEKETAIPDEFKAAAAAAREKLIEAAADGDESLMEQYLEKSTLSPEEMKKGLILGLAQNKYVPAFAGSALKNAGLIPLLDFAADVAPNPRTAKDILIDAEKNETEISIDPDKTMAALVIKTNYDQFSGKLTGLKVITGKLASRFPSL

SEQ ID NO: 32371 - DNA, 984 bp, Unknown
  Obtained from environmental sample
  misc_feature (1)..(984): n is a, c, g, or t
gtgggaattatacaaaatccgcncacgctgaaaaccaacgataccttagctgctattgatacaggcaaaacatttttgcctctgcgcctgcctgaacctgttcactctgtcgcggtcagcgcggcggcgaaaaaagacgatgacaaactcggcgaatttcttgtacgcgccgcagaagaagataaaactttcaactaccactacaataccgaaaccagagagactgttatttccggcatgggcgaacttcagatcaacattattctggaaagaatcaaggcgaaccagaagatcgaagtagaaacccgcgttccaaaagtcgcctaccgcgaaacaatcaccaaaaaggcgggcgccgagtacacgcacaaaaagcagagcggcggccacggtcagtacggcaaagtggtacttgaaatcgcgcctcttccgcgcggcgaaaagtatcagtttgttaacgccattttcggcggcgctatccccaagaactacatccccggcgttgaaaagggcgtagttgaaggaatggcgcacggcactatggcgagttatcccgtcgtagacgtggaagtaaaagtcgtggacggtaaataccacccggtagattcaaacgaattgtccttcaaacttgccgcgcgcaacgctttccgcgaatctatgaagcaggcgaatcccaccctgctcgaaccgattatgaatttgacggtctttgtcgaggaaaaatacctcggcgacgtaatgagcgacctttccggcaagcgcggcaaaatcctcggtcaggattccgcgggcggcatcgcggaaatacgcgccgaagttcctcaggtggaacttttgcgttactcgatagatttgcgctcgattacatcgggaacgggctctttcagcgtggcgtttagtcattatgcgcctatatcgggtaggatagcggatgaagttattaaggcgagagaatcgtttaaggtgcaagaagcggacgagtag

SEQ ID NO: 32372 - protein, 327 aa, Unknown
  Obtained from environmental sample
  DOMAIN (226)...(313): Elongation factor G C-terminus
  misc_feature (1)..(327): Xaa is any amino acid
MGIIQNPXTLKTNDTLAAIDTGKTFLPLRLPEPVHSVAVSAAAKKDDDKLGEFLVRAAEEDKTFNYHYNTETRETVISGMGELQINIILERIKANQKIEVETRVPKVAYRETITKKAGAEYTHKKQSGGHGQYGKVVLEIAPLPRGEKYQFVNAIFGGAIPKNYIPGVEKGVVEGMAHGTMASYPVVDVEVKVVDGKYHPVDSNELSFKLAARNAFRESMKQANPTLLEPIMNLTVFVEEKYLGDVMSDLSGKRGKILGQDSAGGIAEIRAEVPQVELLRYSIDLRSITSGTGSFSVAFSHYAPISGRIADEVIKARESFKVQEADE

SEQ ID NO: 32373 - DNA, 363 bp, Unknown
  Obtained from environmental sample
  misc_feature (1)..(363): n is a, c, g, or t
ttgcaccttaaacgattctctcgccttaataacttcatccgctatcctacccgatataggcgcataatgactaaacgccacgctgaaagagcccgttcccgatgtaatcgagcgcaaatctatcgagtaacgcaaaagttccacctgaggaacttcggcgcgtatttccgcgatgccgcccgcggaatcctgaccgaggattttgccgcgcttgccggaaaggtcgctcattacgtcgccgaggtatttttcctcgacaaagaccgtcaaattcataatcggttcgagcagggtgggattcgcctgcttcatagattcgcggaaagcgttgcgcgcggcaagtttgaaggacaattcgtttga

SEQ ID NO: 32374 - protein, 120 aa, Unknown
  Obtained from environmental sample
  misc_feature (1)..(120): Xaa is any amino acid
MHLKRFSRLNNFIRYPTRYRRIMTKRHAERARSRCNRAQIYRVTQKFHLRNFGAYFRDAARGILTEDFAALAGKVAHYVAEVFFLDKDRQIHNRFEQGGIRLLHRFAESVARGKFEGQFV

SEQ ID NO: 32375 - DNA, 552 bp, Unknown
  Obtained from environmental sample
  misc_feature (1)..(552): n is a, c, g, or t
gtggtatttaccgtccacgacttttacttccacgtctacgacgggataactcgccatagtgccgtgcgccattccttcaactacgcccttttcaacgccggggatgtagttcttggggatagcgccgccgaaaatggcgttaacaaactgatacttttcgccgcgcggaagaggcgcgatttcaagtaccactttgccgtactgaccgtggccgccgctctgctttttgtgcgtgtactcggcgcccgcctttttggtgattgtttcgcggtaggcgacttttggaacgcgggtttctacttcgatcttctggttcgccttgattctttccagaataatgttgatctgaagttcgcccatgccggaaataacagtctctctggtttcggtattgtagtggtagttgaaagttttatcttcttctgcggcgcgtacaagaaattcgccgagtttgtcatcgtcttttttcgccgccgcgctgaccgcgacagagtgaacaggttcaggcaggcgcagaggcaaaaatgttttgcctgtatcaatagcagctaa

SEQ ID NO: 32376 - protein, 183 aa, Unknown
  Obtained from environmental sample
  misc_feature (1)..(183): Xaa is any amino acid
MVFTVHDFYFHVYDGITRHSAVRHSFNYALFNAGDVVLGDSAAENGVNKLILFAARKRRDFKYHFAVLTVAAALLFVRVLGARLFGDCFAVGDFWNAGFYFDLLVRLDSFQNNVDLKFAHAGNNSLSGFGIVVVVESFIFFCGAYKKFAEFVIVFFRRRADRDRVNRFRQAQRQKCFACINSS

SEQ ID NO: 32377 - DNA, 1152 bp, Unknown
  Obtained from environmental sample
  misc_feature (1)..(1152): n is a, c, g, or t
atgtatatcgcccagttcaagggcgcaaatgattcggacgggatgcggcaggcttttcgttttaaggtaatttttgccattactgccgccgtcctgtatttcgtcctctcctggacaataccccataaaatgttgggcatgatgactatgggcaacgcccaacaggaagaaattgtcagactgggaagcgattatataaaactgatttcgtggacatttgttccgatggcaatttcattttccataggaaccagctttcgtgagattgcccgccctaaggttcctctgtgtatttccgccgcggccaccctgattaataccgcgggtaactggcttctgatatacggcaatctgggcgcgccgcgcctggaagttaagggcgcggcctacgcgacaatcatagcccgtgtttttgagcttgtggtttttctggtttacgccggaaaggtcaaagctccgttctataccctgaagctttttaatatacattggaaattttttgccggtgttgtatttaagtcaggaatgatatttatctccgaattgtcctgggtcagctctgaaacaataatgacagccatgtataaccggcgcggtggcgcggaagttgtcgccggtatggcggcgggttttacaattgcgaatattttctttatgctttttggcgggatatggaccgcttcgggggtacttgtaggaggggcgctcggcgccggcaaacttgacgaagcccgcagccgcgccgcctggttaaaatccggcgccgttgccgcaggtgtcatcatcgcgctctttggggcggtcttctcagccctgcttgtccccatcgttttttcaaacctcagctccgcggcgcgttttaactgtatgggccttgtttatgtgatccttgcatatttgcctttatggggctttctcaatttacagtttgccatttcccgcgccggcggcgacgccgcgacgggaatgtataccgatctgtcggtcaactctctgttggttgtccccggagcgatactcctttcgtattttacgtcattgccgcccgtgcccatgttcgccctgataaagctttcagacttcgccaaagtgttcatcgccaggcatttcctgaagaaagaacgctgggtgaagaatttaactaaaccataa

SEQ ID NO: 32378 - protein, 383 aa, Unknown
  Obtained from environmental sample
  DOMAIN (175)...(340): MatE
  misc_feature (1)..(383): Xaa is any amino acid
MYIAQFKGANDSDGMRQAFRFKVIFAITAAVLYFVLSWTIPHKMLGMMTMGNAQQEEIVRLGSDYIKLISWTFVPMAISFSIGTSFREIARPKVPLCISAAATLINTAGNWLLIYGNLGAPRLEVKGAAYATIIARVFELVVFLVYAGKVKAPFYTLKLFNIHWKFFAGVVFKSGMIFISELSWVSSETIMTAMYNRRGGAEVVAGMAAGFTIANIFFMLFGGIWTASGVLVGGALGAGKLDEARSRAAWLKSGAVAAGVIIALFGAVFSALLVPIVFSNLSSAARFNCMGLVYVILAYLPLWGFLNLQFAISRAGGDAATGMYTDLSVNSLLVVPGAILLSYFTSLPPVPMFALIKLSDFAKVFIARHFLKKERWVKNLTKP

SEQ ID NO: 32379 - DNA, 801 bp, Unknown
  Obtained from environmental sample
  misc_feature (1)..(801): n is a, c, g, or t
atggtggcaataatggcgcccatgaaaatttcatcatttgaactgcttgacggcagggactgtcaagatcaatgtttacccttgctttcaatcccaacggagggaacggacgcttttacggcaacggatttttttcttaccgtagatccacgcaacaaattaataaaatccatttcatccccgcataatttatttgcgtcaataataatagacagtaatttaataactatactttcagataacaatgcgccttcatatatttttgatggtttattttcggcggtagaggtttattgctccgcaagggcaaattttctctccgacacattactggaaaaatctgttacttttttcgcgaaattactaaaaaaaaccgcaggcggcataaacgttgaaaccttcgcacaggcctgtctgctcttatcagtcggctcttccgtaagttctcccggcataggcgccgcgctctctgctgcaataaacgcgcgctgcggtattccaaaacatcagtgttctgcggcgctttttccagtcatagcggagaagcttgtcggcgcacgccccgaaaaaatggcgcgggttgcctctttacttggagcggcaaaagcggcttccgcggcggaggcggcaaattccgcggtagaagccatccgcaactccatgactgcactcaatgtaccgcttgatttaaaagaaaaccgtattccgctagacagaatggcagcccctaccgatgccgcccgtaaattggaaatgactgccaattcccccgtggacggtttcggaagaggaagtttttaa

SEQ ID NO: 32380 - protein, 266 aa, Unknown
  Obtained from environmental sample
  misc_feature (1)..(266): Xaa is any amino acid
MVAIMAPMKISSFELLDGRDCQDQCLPLLSIPTEGTDAFTATDFFLTVDPRNKLIKSISSPHNLFASIIIDSNLITILSDNNAPSYIFDGLFSAVEVYCSARANFLSDTLLEKSVTFFAKLLKKTAGGINVETFAQACLLLSVGSSVSSPGIGAALSAAINARCGIPKHQCSAALFPVIAEKLVGARPEKMARVASLLGAAKAASAAEAANSAVEAIRNSMTALNVPLDLKENRIPLDRMAAPTDAARKLEMTANSPVDGFGRGSF

SEQ ID NO: 32381 - DNA, 432 bp, Unknown
  Obtained from environmental sample
  misc_feature (1)..(432): n is a, c, g, or t
atgaatctttccgctagaactgctgcagcccaaaaatggatagactcacgaaatataactggaatatccgaatgggacgatgttcttttgccgtggcttggcactccatacaagtatggcgggaacaccaaacgcggtaccgattgcagtggttttgtttccagtgtatatatggaaaaagagaggatgtctgtaccaagaacaaccaaagatggatttaaaaatggaaaatccgttgataggagcagtttagttgttggggatttggtatttttcagcagagagggaagagggaacaaagtaaaccacgttggcatttatgttggcgatggaaattttatgcatgcgagcacctctcttggtgtcactataaccccgctagacgatagtcactggaaaaccttatatctcggagctaggagatatttgtga

SEQ ID NO: 32382 - protein, 143 aa, Unknown
  Obtained from environmental sample
  DOMAIN (34)...(141): NlpC/P60 family
  misc_feature (1)..(143): Xaa is any amino acid
MNLSARTAAAQKWIDSRNITGISEWDDVLLPWLGTPYKYGGNTKRGTDCSGFVSSVYMEKERMSVPRTTKDGFKNGKSVDRSSLVVGDLVFFSREGRGNKVNHVGIYVGDGNFMHASTSLGVTITPLDDSHWKTLYLGARRYL

SEQ ID NO: 32383 - DNA, 849 bp, Unknown
  Obtained from environmental sample
  misc_feature (1)..(849): n is a, c, g, or t
gtgaacagttcaaaaaaatttattttacagattttatgcccagaccaaagcggattgatagccgcgttcacccaaggcattgcactgactggcgcaaatattttagatttaacccaacacacagcaaaggatatagacacattttttttacgtgcccttattgaatgcgaaaacgatgctattccaaagataaaggaacatttttccaaaatggaaaaggaaaaaaatatggaatggtatctgcacgatgccgagcataaaaccaaactcgcattatttggttcaaccaccgaccactgtttttacgaacttttgctctcccacagggacggggctttgccctgtgagtggacttgcgtgatttcaaatcacaccgttttagaacctttggcaagaacttttaatttgcctttcttcttagtcccgagcaacacttcaaaagccgagcaggatagcaaattcaatgatattttgcacgcctcgcaaacagagggaatagtgcttgcacgttatatgcaaattttaagcccggaatttacagaggcttggaagtacaaaattataaatatccatcacggctttttgcctgcattcaagggagcaaaaccttatcaccaagcgtgggcaaagggcgttaaaataatcggtgcaacggcacactttgccacagcagacctagaccaaggcccaataatttggcaaagcgttcaacaggttgcggacaccgggagcatcgagcagttcatccaaataggcaaggacgttgaaaagcgcactttgctttacgccttaaaactctggcttgagcacagggtatttttgcacaacgatagaacttttattctttaa

SEQ ID NO: 32384 - protein, 282 aa, Unknown
  Obtained from environmental sample
  DOMAIN (7)...(74): ACT domain
  misc_feature (1)..(282): Xaa is any amino acid
MNSSKKFILQILCPDQSGLIAAFTQGIALTGANILDLTQHTAKDIDTFFLRALIECENDAIPKIKEHFSKMEKEKNMEWYLHDAEHKTKLALFGSTTDHCFYELLLSHRDGALPCEWTCVISNHTVLEPLARTFNLPFFLVPSNTSKAEQDSKFNDILHASQTEGIVLARYMQILSPEFTEAWKYKIINIHHGFLPAFKGAKPYHQAWAKGVKIIGATAHFATADLDQGPIIWQSVQQVADTGSIEQFIQIGKDVEKRTLLYALKLWLEHRVFLHNDRTFIL

SEQ ID NO: 32385 - DNA, 828 bp, Unknown
  Obtained from environmental sample
  misc_feature (1)..(828): n is a, c, g, or t
ttgatcgccgaaatttttcgccttctgaagaagcgtgtattcatccggtactattatcttcagccgggaaagcaaaaaatgaaacatggctttgttgttcccgtgtacaggcatggtgaaaccgcggggccgttagcggaaaagctggccgctacaggactgcctgttatccttgtggatgacggaaacgacgagcggactagagagatccttgccgaatggcagaagaaaatttcctctgttgttcttgtcagcctaaaaaaaaataccggtaagggcggggctgttgccaaaggttttgaaaaagccgcagagcttggtctgactcacgtctttcaaatcgacgcagacggccagcacgatacggcaatggttggtttttatttggaggagtccgccaaaaatccggacaaggtcatctgcggctttcctgtctttgacagcaacgcgccgagaagcagggtcgccgggcgcagggtttcaaatttttgggctgcggtagttacgctttcaaaagaattaaaagacgcgctttgcggcttcagggtttacccccttgacgccgcgctgaaaataaccagaaatccctttatggacaggcgcatgggctttgatgcggaaatccttgtgcgtctttactgggaaaaggtgtttcccgttttttacccggtaaaggtaagttacccctctggcggcgtttccaatttccgcgttttccgggataatcttcgcataagctggatgtttaccaggctttgcgtaggtatgctcctgcgcttccccatgctgatagcattgcgcgttaagcgcggcacagggcggttatga

SEQ ID NO: 32386 - protein, 275 aa, Unknown
  Obtained from environmental sample
  DOMAIN (30)...(193): Glycosyl transferase family 2
  misc_feature (1)..(275): Xaa is any amino acid
MIAEIFRLLKKRVFIRYYYLQPGKQKMKHGFVVPVYRHGETAGPLAEKLAATGLPVILVDDGNDERTREILAEWQKKISSVVLVSLKKNTGKGGAVAKGFEKAAELGLTHVFQIDADGQHDTAMVGFYLEESAKNPDKVICGFPVFDSNAPRSRVAGRRVSNFWAAVVTLSKELKDALCGFRVYPLDAALKITRNPFMDRRMGFDAEILVRLYWEKVFPVFYPVKVSYPSGGVSNFRVFRDNLRISWMFTRLCVGMLLRFPMLIALRVKRGTGRL

SEQ ID NO: 32387 - DNA, 1320 bp, Unknown
  Obtained from environmental sample
  misc_feature (1)..(1320): n is a, c, g, or t
atgctccgtacctgcggtgcctcgtcaattgacgacctcttcacggacatccctcacacccttgccccgtccgcgtcggcgagagacttttttaacacggatggcctctccgagttcgagacgttgacagaatgcgaacggttagcctcggcgaacgacacgcgcctgatttcctttctcggtggcggcttctacgaccacttcatccccgccgccgtggacgccatagcctcccgcagcgagttctacaccgcctacacgccctaccaacccgaactatcgcagggcacgctgcaggccatctacgagtaccagtcgcagatatgccgtctgaccggaatggagatctccaacgcctcgctctacgacggcggaacggcaatcttcgaggcctgcaaaatggcgctggccgccacggatagacgcgtgattgtaatagataccggcgtaaacccgatatacggaaaaatgttaaagtcgcataccgtcaatttggggattgatattgtagagatccacacaatgtacgacggaacgcttgaccgggagaccataaacagcactattgacggcaaaacagcggccgtcgtcttgcaaaacccgaacttcttcggaattatagacgatcactccgatattgttgacaaatgcaaaagcgtaggcgcgatagccgtccaaaccgtcaaccccttagccttagcgttgataaaatcgcccggagaacaaggcttcgacatcgccgtcggagaaggccaaccattaggcataccgctatccttcggaggcccgtacctcggcttcatcggcgcccaaaaagcgctcgcaagaaaaatgcccggacgtatcgtagccaaaacgacagacgcaaacggtcgcgagggtttcgttctgtcgctgcaagcgagagagcagcacatcagacgcgaaaaagctacctccaacatctgttcaaacgaggctctatgcgcgctgcgggcgcacgcctacctgtcgctgatcgggaaacaaggcctcattgatgtggcgacgctgtgctgcaacaaagccgcttacctccgcgagcggatcaaagagtcaatcccgtcaatacgaatgtacgacgacgccacaatattcaacgagttcgtaatcgatctgccgatgaacgccgatacatgcgtagaatacatgctgagaaaaggtttcgccgccggaattccgatccgtaaatactacaactacgagggcgcggacaaagcgctgctagtggctgtgacggagaagagaacgcgcggcgagatcgacgcgttcgtagacgctctgcgggaggttgttgggtaa

SEQ ID NO: 32388 - protein, 439 aa, Unknown
  Obtained from environmental sample
  DOMAIN (1)...(434): Glycine cleavage system P-protein
  misc_feature (1)..(439): Xaa is any amino acid
MLRTCGASSIDDLFTDIPHTLAPSASARDFFNTDGLSEFETLTECERLASANDTRLISFLGGGFYDHFIPAAVDAIASRSEFYTAYTPYQPELSQGTLQAIYEYQSQICRLTGMEISNASLYDGGTAIFEACKMALAATDRRVIVIDTGVNPIYGKMLKSHTVNLGIDIVEIHTMYDGTLDRETINSTIDGKTAAVVLQNPNFFGIIDDHSDIVDKCKSVGAIAVQTVNPLALALIKSPGEQGFDIAVGEGQPLGIPLSFGGPYLGFIGAQKALARKMPGRIVAKTTDANGREGFVLSLQAREQHIRREKATSNICSNEALCALRAHAYLSLIGKQGLIDVATLCCNKAAYLRERIKESIPSIRMYDDATIFNEFVIDLPMNADTCVEYMLRKGFAAGIPIRKYYNYEGADKALLVAVTEKRTRGEIDAFVDALREVVG

SEQ ID NO: 32389 - DNA, 372 bp, Unknown
  Obtained from environmental sample
  misc_feature (1)..(372): n is a, c, g, or t
atgcaaaagcgtaggcgcgatagccgtccaaaccgtcaaccccttagccttagcgttgataaaatcgcccggagaacaaggcttcgacatcgccgtcggagaaggccaaccattaggcataccgctatccttcggaggcccgtacctcggcttcatcggcgcccaaaaagcgctcgcaagaaaaatgcccggacgtatcgtagccaaaacgacagacgcaaacggtcgcgagggtttcgttctgtcgctgcaagcgagagagcagcacatcagacgcgaaaaagctacctccaacatctgttcaaacgaggctctatgcgcgctgcgggcgcacgcctacctgtcgctgatcgggaaacaaggcctcattga

SEQ ID NO: 32390 - protein, 123 aa, Unknown
  Obtained from environmental sample
  misc_feature (1)..(123): Xaa is any amino acid
MQKRRRDSRPNRQPLSLSVDKIARRTRLRHRRRRRPTIRHTAILRRPVPRLHRRPKSARKKNARTYRSQNDRRKRSRGFRSVAASERAAHQTRKSYLQHLFKRGSMRAAGARLPVADRETRPH

SEQ ID NO: 32391 - DNA, 900 bp, Unknown
  Obtained from environmental sample
  misc_feature (1)..(900): n is a, c, g, or t
gtggaaagcaacaagagaacctaccgtcccggcgaagaagttaccatgaccctgaccgcgaccaaggacggcaaagccctgcccaacgcggagctgaccctgatggcggtagaccggggcgtattggaccttatcaattaccatgtgccggacccgatacagtatttttataatgaagacctcttcagactcatggtggccggcggcgattcccgttcatggcttatggatcccgtaacctacagcgtaaaaaatctcgccggcggcgacgctgcgggcgaaagcaaaattgaggaacgcaaggactttaaccccaccgcggtatttgagccgatgctgataaccgatgattcgggcaaggttacctgcaaattcaaactccccgataaccttaccacatatcgcgtaacggtctttggggtgcggggcgatattttcgcccttaaagaaagcgagattgccgcccggaacaaaataaacgtacgggaagttctgccccggcgcgcgcgggaaagggataccgccgaagcgggggtgcttattaccaatctcgattcagcgtcccataccctgtctgtcaggcttgatataggaccgcccctgcccaatgacgattcaagcggaataaaaaaaattaccgggcaggcttttgttgacggaattttcgagcgtcgtataacggtaaaaagcggcgagaacgccgtggtgtattttgacgtggcggcggtaaaggaagggaatgttacgcttaattttaccgtcaattcggatattctcaatgaaaagctgatacgggaactggtgattgaacatccctatattatggaaagcggttacaactaccggatccgtggacaaggattcggaaagcgaaggcgttgttatctcctcgccatctga

SEQ ID NO: 32392 - protein, 299 aa, Unknown
  Obtained from environmental sample
  misc_feature (1)..(299): Xaa is any amino acid
MESNKRTYRPGEEVTMTLTATKDGKALPNAELTLMAVDRGVLDLINYHVPDPIQYFYNEDLFRLMVAGGDSRSWLMDPVTYSVKNLAGGDAAGESKIEERKDFNPTAVFEPMLITDDSGKVTCKFKLPDNLTTYRVTVFGVRGDIFALKESEIAARNKINVREVLPRRARERDTAEAGVLITNLDSASHTLSVRLDIGPPLPNDDSSGIKKITGQAFVDGIFERRITVKSGENAVVYFDVAAVKEGNVTLNFTVNSDILNEKLIRELVIEHPYIMESGYNYRIRGQGFGKRRRCYLLAI

SEQ ID NO: 32393 - DNA, 933 bp, Unknown
  Obtained from environmental sample
  misc_feature (1)..(933): n is a, c, g, or t
atgactgaaaaaccgataagcaatgtcgtcctgattcagcccccctttgtacagcttaacagtccgtatcctgccccctattacctgaaaagttttcttgagcaaaggggatttcatgtaacggttttggatcattccatcgggctttttgaaagaattttttcccgcgctggccttgagcgaatttttgctgatgcagttcttttgtccacaaataatagcgaaacagaaagattcctgtccgagagggatatgtggtgtgtttcaatagacaggcttatcgcttttctccgccacaaggatcgcgaatggggacattaccttgcccttgtcaacggctgcctccccggcggcaggcggactgaagctttcattgcgaggcataacggggagctttcagccgacgaggctgggcttcttgcgacgaaactcctttcggatatagcggattttatcacctgttccctggatgagaatttcaaccttatccgttacagggcggcaggggaggaaagtttccgctctttttcctctgttctaaaaaccctggacggttacatcatgaaaaacttttaccgccccctgctcgaagaagaatggaaaagactggaaagtatcggcgttgcaaacggcgaatttttgcttggcgttaccattccctttcccggctgtctttcggctgcgcttgtctgtgccgagtcggcgaaaaaacgctttggcaaggcggttcgcactgtcgcgggcggtgggtatgtaaacaccgaattgcgctttttagattccaaagaattttctgagtacttcgattatgtttcttttgacaagggttatgcttcgctcatttccattctggnaaaaacacaaatagatgaatgcancgaaaaactcctttgtgaaagacactttttccgactattcggaaatggattttag

SEQ ID NO: 32394 - protein, 310 aa, Unknown
  Obtained from environmental sample
  misc_feature (1)..(310): Xaa is any amino acid
MTEKPISNVVLIQPPFVQLNSPYPAPYYLKSFLEQRGFHVTVLDHSIGLFERIFSRAGLERIFADAVLLSTNNSETERFLSERDMWCVSIDRLIAFLRHKDREWGHYLALVNGCLPGGRRTEAFIARHNGELSADEAGLLATKLLSDIADFITCSLDENFNLIRYRAAGEESFRSFSSVLKTLDGYIMKNFYRPLLEEEWKRLESIGVANGEFLLGVTIPFPGCLSAALVCAESAKKRFGKAVRTVAGGGYVNTELRFLDSKEFSEYFDYVSFDKGYASLISILXKTQIDECXEKLLCERHFFRLFGNGF

SEQ ID NO: 32395 - DNA, 396 bp, Unknown
  Obtained from environmental sample
  misc_feature (1)..(396): n is a, c, g, or t
gtgcttcttgacggactgccgggtaaaagtgaataccgcaaatatattatcaatcaagaccatcccgacgactttgcctctatggaagaagttttgaccagacgctgtatgcgcctggacgacaataaccgtcctgatctggtggttatcgacggcggcaaaggacagctcggtatagcggtgcgcgtctggaaaaactttaacttaaatattccgctctgcgcgttggccaaacgcgaggaagaaatttttgtcccgcgacgcagtgagccgttggtgttgccccggcgcgatccgggcttgcgtctgctccagactgtccgcgacgaagcgcaccgcttcgccgtgtctttccaccgtctccggcggaaaaagagaacattgtccgaaaaataa

SEQ ID NO: 32396 - protein, 131 aa, Unknown
  Obtained from environmental sample
  DOMAIN (3)...(116): UvrC Helix-hairpin-helix N-terminal
  misc_feature (1)..(131): Xaa is any amino acid
MLLDGLPGKSEYRKYIINQDHPDDFASMEEVLTRRCMRLDDNNRPDLVVIDGGKGQLGIAVRVWKNFNLNIPLCALAKREEEIFVPRRSEPLVLPRRDPGLRLLQTVRDEAHRFAVSFHRLRRKKRTLSEK

SEQ ID NO: 32397 - DNA, 639 bp, Unknown
  Obtained from environmental sample
  misc_feature (1)..(639): n is a, c, g, or t
atggacggaaacctaaagaaaataatagtagtagatgacaacgttgagaacctgactgcccttaaagatactttgaaagatcggtacgaagtttacccaagcccttcggcggctaaattgtttgatttgcttaaccattttacgcctgacctgattttactggacgttgaaatgccggaaatgaacggatatgaaacggcaaagatgcttaaaaaagatgaaaaatacaaagcgatacctcttatgtttctgactatcagagacgacataaaaagcgagatggaggggtttaagattggcgccattgattacatccataaaccttttgtaagccctcttcttcttcagcggattaaaacacatttgtcccttttggattatcaaaagattgaagttatttccaaagcgactgtaaccgccatggaacacatcaaggaaggctttatccttgtagatacggaaagaaagtatctgtcttccaaccccgccgccgcgagaatgattcccggaataacaagaattaataaaggagattcaatatataacgcggaagattggccgaaagaatttaaaattgacaaggaaagcagcgtagaattttccactacgggcgacagcaggttttcagagccggaataa

SEQ ID NO: 32398 - protein, 212 aa, Unknown
  Obtained from environmental sample
  DOMAIN (6)...(119): Response regulator receiver domain
  misc_feature (1)..(212): Xaa is any amino acid
MDGNLKKIIVVDDNVENLTALKDTLKDRYEVYPSPSAAKLFDLLNHFTPDLILLDVEMPEMNGYETAKMLKKDEKYKAIPLMFLTIRDDIKSEMEGFKIGAIDYIHKPFVSPLLLQRIKTHLSLLDYQKIEVISKATVTAMEHIKEGFILVDTERKYLSSNPAAARMIPGITRINKGDSIYNAEDWPKEFKIDKESSVEFSTTGDSRFSEPE

SEQ ID NO: 32399 - DNA, 726 bp, Unknown
  Obtained from environmental sample
  misc_feature (1)..(726): n is a, c, g, or t
ttgcggctggcgcaagttattattaacctgatgaccaacgcgataaaattgacgcctgataacggcttagttcagttgaacgcacaaaaggtagaagaaaaagacgataaggttacgattagaatcgaaattgtgaacaacggtatcgggctttcacctgaacagcaggagaaacttttgtcggattacgaccaggccgacctcacaatcgctaaacaatccggcaacacgggatcggggcttgccatttccaaacggaatatagagctcatgcaaggcaagatttggattgagtcgcaaggcggcaagggcgcgaaatttatatttaccttaaatatgaaaaagggagaaaatagtgcggtttcggctacaaccgacggcattgccgaagacacttccgcgcctctatccgcaattaaagcgttcgatttacagttacagggttatgccatacttgccgcggaagacatggatttccacagggaagtcctgtccatgtatctgaaaaaaaccggggttgccattgattataccgaaaacggcaggcaggctgtcgaaaagttcaaagctaatcccgaaaaatactgcctgatcctaatggacataagaatgcccgaaatgaacggagatgaagcgacaaagctaatacgcgcgcttgatttcaaaaaagcaaaggagatacctatcatcgcgatgaccgcggatgcttttccgcgaagatattga

SEQ ID NO: 32400 - protein, 241 aa, Unknown
  Obtained from environmental sample
  DOMAIN (149)...(239): Response regulator receiver domain
  misc_feature (1)..(241): Xaa is any amino acid
MRLAQVIINLMTNAIKLTPDNGLVQLNAQKVEEKDDKVTIRIEIVNNGIGLSPEQQEKLLSDYDQADLTIAKQSGNTGSGLAISKRNIELMQGKIWIESQGGKGAKFIFTLNMKKGENSAVSATTDGIAEDTSAPLSAIKAFDLQLQGYAILAAEDMDFHREVLSMYLKKTGVAIDYTENGRQAVEKFKANPEKYCLILMDIRMPEMNGDEATKLIRALDFKKAKEIPIIAMTADAFPRRY

SEQ ID NO: 32401 - DNA, 900 bp, Unknown
  Obtained from environmental sample
  misc_feature (1)..(900): n is a, c, g, or t
atggcaatgatgctgtcgccaaagctgacgcaaatcccgtggcagaggtttatggattttattgccccagctgccgaccgcttggcaatactgaaagagaccctgaaagaagccggtctggaatacaaagttacagagatagccgaatgtcgtcatcttgttgtagccccgccgcgggatcagttaaaggacgtggggcggcgtcctccggtcattcttttagcccattacgatcgcgctaaagacagtccgggagcaaacgacaacagtgcgggggtttttctcattatcgaaactgcaaccagacttataaaacaaaacagaacaaactggcttataatattctccgacagagaagaattgaaaaccggcgataaaattcaggcccagggggcctatgcgctggccgagggctttaaaaattcaaaaatggaaaaggccagggttttcattttcgatgcctgcggcaggggagatacccttgtcatctcaaacacgcttgaatccctgttaaaaaaagaaacggcaagagaaaagttaaaggactccctggcgctgcgcaaatttgccctggacactgccagaaaccttaacatggcaaaggtacttcttgccccgacgcccttttcggatgacgttggttttttccgcgccggattaatcgcgcagaccgttaccatgctcccatccaaagagtgtattcagctcgttgcggatctccgcaaaaacccggaattgggcgaggcgctaataaacgccaaaattaggcaggccagccatttgcaatccatcccggatacctggcgcagtcttaacactcccgccgacagccacctgcgcctgacgccggaaaatttccgcactgtagtaaggtttgccgaagcgctatgcagtgggtaa

SEQ ID NO: 32402 - protein, 299 aa, Unknown
  Obtained from environmental sample
  DOMAIN (69)...(251): Peptidase family M28
  misc_feature (1)..(299): Xaa is any amino acid
MAMMLSPKLTQIPWQRFMDFIAPAADRLAILKETLKEAGLEYKVTEIAECRHLVVAPPRDQLKDVGRRPPVILLAHYDRAKDSPGANDNSAGVFLIIETATRLIKQNRTNWLIIFSDREELKTGDKIQAQGAYALAEGFKNSKMEKARVFIFDACGRGDTLVISNTLESLLKKETAREKLKDSLALRKFALDTARNLNMAKVLLAPTPFSDDVGFFRAGLIAQTVTMLPSKECIQLVADLRKNPELGEALINAKIRQASHLQSIPDTWRSLNTPADSHLRLTPENFRTVVRFAEALCSG

SEQ ID NO: 32403 - DNA, 675 bp, Unknown
  Obtained from environmental sample
  misc_feature (1)..(675): n is a, c, g, or t
atgattgtggtggagaggcacatggaaaaagagggcggcggctgtacactgaaccatgccgtgcatcatattgacatgctgtgctggatacttggactgccaaagaaagtcagcgccgttatcagcaacgcgtcccatgacaacgccgaagtggaggacatntccgtcgcggtactacaatacgacggcgggctttgctcgaagggggcgctggcgcaggtaacaagctccgttatacaccacggcgaagagcaacagcttatttttcagggggagaaagcccgcgtttcggcgccgtggcgagtttcggccaatatcagccagcccaacggttttcctttcttcaaacaacaaaatgaagaactaatatcaaaactaaataatttttacgagtccctgccaaagcttactcatactttacacgcgggacaaattgacgacgtattgaccgcgcttgaaaccggaggcaagccgttgattgacggcgaagacggcaggcgcacactggaacttatctccgccatttacaaggccggcacggaacaacgcgcagtggaactgccaatgcaaaaaaacgatcccttttacacggttaaaggcattatggaaagagtgccgcatttctacgaaaaaaccgtctctgtaaatgatcagggcggacaaattacattttag

SEQ ID NO: 32404 - protein, 224 aa, Unknown
  Obtained from environmental sample
  misc_feature (1)..(224): Xaa is any amino acid
MIVVERHMEKEGGGCTLNHAVHHIDMLCWILGLPKKVSAVISNASHDNAEVEDXSVAVLQYDGGLCSKGALAQVTSSVIHHGEEQQLIFQGEKARVSAPWRVSANISQPNGFPFFKQQNEELISKLNNFYESLPKLTHTLHAGQIDDVLTALETGGKPLIDGEDGRRTLELISAIYKAGTEQRAVELPMQKNDPFYTVKGIMERVPHFYEKTVSVNDQGGQITF

SEQ ID NO: 32405 - DNA, 1434 bp, Unknown
  Obtained from environmental sample
  misc_feature (1)..(1434): n is a, c, g, or t
ttgcttgccgaggctaagagcgcttatgaacaaggttttaagccggcggtattggaaatcctcgacggcgccgaaaagggcttgtccattgactccttgtcgcagatactgcggactaaagcgagacccagcgtggatatcgtgtcagaaaagatatccattgttatcgaacataagcaggaactgctgaaacaggccaacaaaaacggcgacgccattacgacgaaactcaccgtgattatggttctgattatcatcgtgggcgccggcgtttccatattcttctccctttacatctcctccttggtcggcaagcccatcagccgtctctctgaattgatcgccgattggagccgtgggcgtcttgacaacaagctcgaaatcaaggggcgcacggatgagatcggaataatggccgaggccgcgaacgaatgggtggacgacctcaaaaagctcattttatcggacggcggcaaagttctgaaagcggcggcgggcaaagacctgacgcagaggcttacggttcactatcacggcgagtacggcgtcatgaaaaccaatataaacgccgtgatcgagagcctcgacgacgctctcaaccaagtacgcgaggccgcgacgaacgtggcgagcgaggtcgcccaaatttcggcgggggcgcagagtctggcgcagggttcgagccagcaggcgagttcccttgagcaggtgtcggcgagccttgaccagatatccgccatgaccaagcagaacgcggaagactccaacacggctaaggatttggcgaacgaggcgcgtagcgccgccaacgagggggacgcctccatgaagcaaatggccgaggctatccgtcagataaagcaatcggcggacaacaccgccaagattatcaagtctatagacgatatcgctttccaaaccaacctcttagccctcaacgcggctgtggaggcggcgcgggcgggcgaggccggcaagggcttcgccgttgtggccgaggaggtgcgcagcctcgcgatgcgcagcgccgaagcggcgaaaaataccgccgatttgatcgagcaatcggtcaaaaacgccgataacggggtgaagattacagaagaagtcgcaaaatctctcactaaaatcgttgaccgcgcggacaaagtcggcaacctcatcgccggaatagcgacagcctccaacgaacagtctgcgggtatacatcaggtaaccgacgccgtatcgaatatgaaccaagtgacccagagcaacgccgcaaacgccgaagagtcggccagcgcggtcgaggagctcaacagccttgccgaggagcttcaagatttggtgaacactttcaagttaagcgcgtcgttcggcggcgttaagcagtacggcggcggcgcccacgcgccggcggcaagacagttgccttcgccgaccagagcgtga

SEQ ID NO: 32406 - protein, 477 aa, Unknown
  Obtained from environmental sample
  DOMAIN (81)...(151): HAMP domain
  misc_feature (1)..(477): Xaa is any amino acid
MLAEAKSAYEQGFKPAVLEILDGAEKGLSIDSLSQILRTKARPSVDIVSEKISIVIEHKQELLKQANKNGDAITTKLTVIMVLIIIVGAGVSIFFSLYISSLVGKPISRLSELIADWSRGRLDNKLEIKGRTDEIGIMAEAANEWVDDLKKLILSDGGKVLKAAAGKDLTQRLTVHYHGEYGVMKTNINAVIESLDDALNQVREAATNVASEVAQISAGAQSLAQGSSQQASSLEQVSASLDQISAMTKQNAEDSNTAKDLANEARSAANEGDASMKQMAEAIRQIKQSADNTAKIIKSIDDIAFQTNLLALNAAVEAARAGEAGKGFAVVAEEVRSLAMRSAEAAKNTADLIEQSVKNADNGVKITEEVAKSLTKIVDRADKVGNLIAGIATASNEQSAGIHQVTDAVSNMNQVTQSNAANAEESASAVEELNSLAEELQDLVNTFKLSASFGGVKQYGGGAHAPAARQLPSPTRA

SEQ ID NO: 32407 - DNA, 336 bp, Unknown
  Obtained from environmental sample
  misc_feature (1)..(336): n is a, c, g, or t
ttggaggctgtcgctattccggcgatgaggttgccgactttgtccgcgcggtcaacgattttagtgagagattttgcgacttcttctgtaatcttcaccccgttatcggcgtttttgaccgattgctcgatcaaatcggcggtatttttcgccgcttcggcgctgcgcatcgcgaggctgcgcacctcctcggccacaacggcgaagcccttgccggcctcgcccgcccgcgccgcctccacagccgcgttgagggctaagaggttggtttggaaagcgatatcgtctatagacttgataatcttggcggtgttgtccgccgattgctttatctga

SEQ ID NO: 32408 - protein, 111 aa, Unknown
  Obtained from environmental sample
  misc_feature (1)..(111): Xaa is any amino acid
MEAVAIPAMRLPTLSARSTILVRDFATSSVIFTPLSAFLTDCSIKSAVFFAASALRIARLRTSSATTAKPLPASPARAASTAALRAKRLVWKAISSIDLIILAVLSADCFI

SEQ ID NO: 32409 - DNA, 1197 bp, Unknown
  Obtained from environmental sample
  misc_feature (1)..(1197): n is a, c, g, or t
atgctttacacacagggaaaaacggattgtaagccaggtgaggttggatataatgaacaacggcttgatgtgctgaaccgccaccttcagcgcctcattgatgacggagaaattcaatgcgcgacctattgtatttcgcgtaaaggtaaaattttcgcgcatggcgcaatcgggaaaaagtcgttccgtaaggatgataatactccggttcagccggactcagtacgctacatagcgtcaattaccaaggtatttaccgcggtggcaataatgaaactggttgaggacggcgttacgcggctggacgtaccggtgggtgaaattctgccgcagttcaacacgccgccgtataacggcgttacgctgtttcagcttttaacccacacttcgggaatgcacgcggatgacggatgttttgaaaacaaataccagtcaaattactggaaattgattgatgtcgcgtacaagctttgcgatcctgacaagaaaaatgaatttgactggttggccgccgccctgggcacgataggcagcggtttccgcgtcaaacccgataccgagtgggcgtattgcagttttggttttgttgtcctcggcgcggttatcgaaaaactgacaggcgtacacgcgcacaaatacatcgaagacaatatatgcaaaccgctgggtatgaaagacaccatgtttaacataacggctgaaatggcgaaacggtatatcgttacagatgaagagcttgaaaaatacgtaaatgatacgataaacggaacttacgagccgcagtggattagtgaaaaactcaacattccttcgacaggcggaggactggacggcacttcttacgatcttaaccgtttcgggaatatggttcttttcggcggtactttggacggtgtacgcatacttggcagaaaagccgttgaaagaatgacggctattgtttcagcgcttccgaattatacatggaacgcaaaggaaaaagaacgttactacggcataggttttgacatgcgaaacggcccggcgtttacattttctccgggcactttcatgcatgagggcgcgggagcgtgttcgctgtatattgatccgaaagaagaacttgtcgcggcgtggatcgtgccgtttgccaaagaaggctggttctcgcaggcattgtttaacgtgcagaatataatctggtcaggcgttatgtga

SEQ ID NO: 32410 - protein, 398 aa, Unknown
  Obtained from environmental sample
  DOMAIN (25)...(389): Beta-lactamase
  misc_feature (1)..(398): Xaa is any amino acid
MLYTQGKTDCKPGEVGYNEQRLDVLNRHLQRLIDDGEIQCATYCISRKGKIFAHGAIGKKSFRKDDNTPVQPDSVRYIASITKVFTAVAIMKLVEDGVTRLDVPVGEILPQFNTPPYNGVTLFQLLTHTSGMHADDGCFENKYQSNYWKLIDVAYKLCDPDKKNEFDWLAAALGTIGSGFRVKPDTEWAYCSFGFVVLGAVIEKLTGVHAHKYIEDNICKPLGMKDTMFNITAEMAKRYIVTDEELEKYVNDTINGTYEPQWISEKLNIPSTGGGLDGTSYDLNRFGNMVLFGGTLDGVRILGRKAVERMTAIVSALPNYTWNAKEKERYYGIGFDMRNGPAFTFSPGTFMHEGAGACSLYIDPKEELVAAWIVPFAKEGWFSQALFNVQNIIWSGVM

SEQ ID NO: 32411 - DNA, 792 bp, Unknown
  Obtained from environmental sample
  misc_feature (1)..(792): n is a, c, g, or t
atgcgccattcttttccttacgcgcgaatttactacgcggtcaaggcaaatcccgacgcggcaataatttccatgcttgataaattaggggcgaattttgaccttgcttcccgttacgagcttgaccaggttatgtcgctgggagtttcgcccgaccggatgtcctacgggaatacgattaaaaaggcaaaagatgtagggtacttttatcaaaaaggcgtgcgcatgttcgcaaccgacagcgaggacgatctgaagaacatagcttcgcacgctccgggttcccgtgtctatgcgcgtatcattatggacgattccagtactgccgactggccgctttcgcgtaaattcggctgtcaccccgatatggcgtacagccttctggttatggcgcgttcgcttggtctaattccctacggcatatcttttcatgtgggcagccagcagagggatgtcagccagtgggacgaggcaatcgcgaaaacaaaggctcttttttcttccctggaaaaagatgaaaatatacgcctggcgatgatcaatatgggaggcggttttcccgcgtcttatgtccagccggccaatgatttaaccgaatacgcttcagaaatatacaaatatctgaaagatgactttggctccgaaatacctttaatcgtacttgaaccgggacgttctttggtaggtgacaacggcattttaatagcggaagtcatattaatttcaagaaaaacccctgcggcgcttaaccgctgggtttatcttgataccggaaatttaacgggcttatag

SEQ ID NO: 32412 - protein, 263 aa, Unknown
  Obtained from environmental sample
  DOMAIN (2)...(230): Pyridoxal-dependent decarboxylase, pyridoxal binding domain
  misc_feature (1)..(263): Xaa is any amino acid
MRHSFPYARIYYAVKANPDAAIISMLDKLGANFDLASRYELDQVMSLGVSPDRMSYGNTIKKAKDVGYFYQKGVRMFATDSEDDLKNIASHAPGSRVYARIIMDDSSTADWPLSRKFGCHPDMAYSLLVMARSLGLIPYGISFHVGSQQRDVSQWDEAIAKTKALFSSLEKDENIRLAMINMGGGFPASYVQPANDLTEYASEIYKYLKDDFGSEIPLIVLEPGRSLVGDNGILIAEVILISRKTPAALNRWVYLDTGNLTGL

SEQ ID NO: 32413 - DNA, 879 bp, Unknown
  Obtained from environmental sample
  misc_feature (1)..(879): n is a, c, g, or t
ttgaaagttcgacggcgtgcagttcactacttgatgacccgcgagtacaaccagatggcgggccgtgccggccggcgcgggatggacgaggtgggctacgtctactcgcaggtgatcccggaggccaccgaccccgaccaattggagcgcatactttacggtacaaatgagcgcatcaacagccggttttacgcgtcgtattcgacgatactctccctctacagccaattcggcgacggggcgttcgatattttccgcaagagcctccacaacttccgcaaaggcgtcttttcaatgtcgaagatatatcaaaaagaagaggcgcagataaggaacaggataaaattcctgcaatcgagcggctttttggacggtacgaagctgacgcccaagggccagctggcggcggcggtgagcggttacgagatacagaccgcggagctttactactgtagggatttcgaagacgtatcggcggcgcagctgccggtgctattggccgcgctgattaccgaggaggcgcgcagccgcaaagttccgcccataaccaatgtggcgctcaaattcgacgcccagaagacgatccacaaactgcgccaaaaagagatcaagtacaacatagcgaacccgatccgggagatggacttctctatggccgccccggtcttcgcgtgggcgagcggttgcgatttaaagcagttagccggtttcggcgtgccggagggggatttgatacggatactgcggatgacgatacagttgcttcgtacgctgcgggacaggattgttgacccggagatcagcgacaaaatgcataacgcgttggaattagtcaatagggatgtggtggacgctcagaatgaattgaatgtggggtga

SEQ ID NO: 32414 - protein, 292 aa, Unknown
  Obtained from environmental sample
  DOMAIN (113)...(291): DSHCT (NUC185) domain
  misc_feature (1)..(292): Xaa is any amino acid
MKVRRRAVHYLMTREYNQMAGRAGRRGMDEVGYVYSQVIPEATDPDQLERILYGTNERINSRFYASYSTILSLYSQFGDGAFDIFRKSLHNFRKGVFSMSKIYQKEEAQIRNRIKFLQSSGFLDGTKLTPKGQLAAAVSGYEIQTAELYYCRDFEDVSAAQLPVLLAALITEEARSRKVPPITNVALKFDAQKTIHKLRQKEIKYNIANPIREMDFSMAAPVFAWASGCDLKQLAGFGVPEGDLIRILRMTIQLLRTLRDRIVDPEISDKMHNALELVNRDVVDAQNELNVG

SEQ ID NO: 32415 - DNA, 684 bp, Unknown
  Obtained from environmental sample
  misc_feature (1)..(684): n is a, c, g, or t
atgcaagttgaaacgcttgatgccacagtctgcgattacatcaatgagctggaaacgaaatataaacaaatagaaataagaaatcaggaattgcaaaataaagtcattgagactgaaacaagcaacaaacaaatattaaatgaatacttaattttaaaagaacagtacgacctattggtatacaaacgatttgtgcggagcgccgagcaattgttggctgacgagaagcaaccgttattgtttaccgaggaaaccggacagcctgacacacatgaagaaaagcctatagagtttcaaaccgttagatcgtttacgaggaagaatggcgggcgcaagcctattggcgcaaaccttgagcgaaggcagagggtcatagacataccggaaagcgaaaaaacatgcgcctgcggggcgaatttgacccggattggtgaagaaaccagcgaaaaactggtgataatacccccgcagatttatgtggaccaaacagtcaggccgaaatatgcctgtaggcaatgcgaaggaacggaagacgaagacaagcctgcggtgcgcatcgcgcctgtggagccgtctataattccccggagcatagcgagccccagcctgctggcaaccgtcttcacgcaaaagtttgaaatgcacctccctattacaggcaggaaaaacagtttgagcagatag

SEQ ID NO: 32416 - protein, 227 aa, Unknown
  Obtained from environmental sample
  misc_feature (1)..(227): Xaa is any amino acid
MQVETLDATVCDYINELETKYKQIEIRNQELQNKVIETETSNKQILNEYLILKEQYDLLVYKRFVRSAEQLLADEKQPLLFTEETGQPDTHEEKPIEFQTVRSFTRKNGGRKPIGANLERRQRVIDIPESEKTCACGANLTRIGEETSEKLVIIPPQIYVDQTVRPKYACRQCEGTEDEDKPAVRIAPVEPSIIPRSIASPSLLATVFTQKFEMHLPITGRKNSLSR

SEQ ID NO: 32417 - DNA, 834 bp, Unknown
  Obtained from environmental sample
  misc_feature (1)..(834): n is a, c, g, or t
atgagcaactggcagcagcaggcgtatgaaaaactgaagccgttattcgccatgctcaaagaaacagtaaaaagcggccctgtgctgcagatggacgagactgaggtgcaggttataggggaagcggagcggagcgacacgcagaaaagctatatgtggcttgcccgcggcggtcctgtcggcaaaaaagtaatttggtatgagtaccatccgactcacgccgcatataacgctattgaattcctccaagggtacagagggtatctgcaaacggacgggtacatagggtatgacagcgcggccaaaggcctgccagggataatacaggtgggatgtttcgcacatgcaaggcggaagttttttgaggctgctaaaataagctctaaaggccgttctgccgaggaaggcataaaatatatccgcagcctgtatgcgatagaaaatgaattgcgggataggaatattgataatggcatgttcttgtccgaaaggaaggcccgtgctggtcccgtactggagaagttcaaggcatggcttttaaagcgcaaaggtgaagtccctgaaagcgctcttttggggaaggctttgagaattgcaggatggaaaactcccggccccttatgtattctgccttttgcaatcaataccagcaattcgcggcgaagcataaagcaaccatgcatgttgagcataagccaggcgaacgcatggaagttgactgggcaggggataccgctttcatactggataacatttcaggaaagccaatacctgtatatttgtttgtcgcggtattgccctgttccggctatgcctatgcagaaggctttttga

SEQ ID NO: 32418 - protein, 277 aa, Unknown
  Obtained from environmental sample
  misc_feature (1)..(277): Xaa is any amino acid
MSNWQQQAYEKLKPLFAMLKETVKSGPVLQMDETEVQVIGEAERSDTQKSYMWLARGGPVGKKVIWYEYHPTHAAYNAIEFLQGYRGYLQTDGYIGYDSAAKGLPGIIQVGCFAHARRKFFEAAKISSKGRSAEEGIKYIRSLYAIENELRDRNIDNGMFLSERKARAGPVLEKFKAWLLKRKGEVPESALLGKALRIAGWKTPGPLCILPFAINTSNSRRSIKQPCMLSISQANAWKLTGQGIPLSYWITFQESQYLYICLSRYCPVPAMPMQKAF

SEQ ID NO: 32419 - DNA, 855 bp, Unknown
  Obtained from environmental sample
  misc_feature (1)..(855): n is a, c, g, or t
gtgggcatcgtcagcgcgcttgggcggacaggcggcccgggcggcaacatcaatgactttattcaaaccgacgcttctattaaccagggaaattccggcggcccgctcgtgaacatctacggggaagtgatcggcatcaacacatggatcgccagcaatcagggcggcggttctgtgggtcttggttttgccattcccataaacaacgcgaagcgggctatggatgaaataatcgcgtcaggcagcgtcaaagacggctggcttggagtgtcgcttaccgatgccgatcgcgacaccttgcaggctttgggcatagctgcaggacagcggggcgctctggcatcgcaggtgttcctcggctctcccgcggacaaaggcggaatccgccccggcgattttattacccatgtgaataaaaacgaagtgaggggaaccacccagcttacgcagatggttggcaatacaaggcccggcgaccgcgtggttttcacggtaattcgtgacggcgcttcaagggattttaccgttactatagaagccaggagcgacgcggtcgccacggaaaataacaagctgtggccgggcgttatggtggttactcttaccgacgaagtacgttccagcctgaatctggacaaagacgcgcagggcctttatgtggctcaggtcatcgccgaatcccctgccgctatcatcggcatccagcgcggcgaccgcattaccgctgtgaacgacacgccggtaaaagatctgcaatcgtactataaggccttgagggaaaaaacagacaaagaactctggttcagctttattcgcggaaacaacaatctggattcgctcaaatacagacgctga

SEQ ID NO: 32420 - protein, 284 aa, Unknown
  Obtained from environmental sample
  DOMAIN (76)...(166): PDZ domain (Also known as DHR or GLGF)
  misc_feature (1)..(284): Xaa is any amino acid
MGIVSALGRTGGPGGNINDFIQTDASINQGNSGGPLVNIYGEVIGINTWIASNQGGGSVGLGFAIPINNAKRAMDEIIASGSVKDGWLGVSLTDADRDTLQALGIAAGQRGALASQVFLGSPADKGGIRPGDFITHVNKNEVRGTTQLTQMVGNTRPGDRVVFTVIRDGASRDFTVTIEARSDAVATENNKLWPGVMVVTLTDEVRSSLNLDKDAQGLYVAQVIAESPAAIIGIQRGDRITAVNDTPVKDLQSYYKALREKTDKELWFSFIRGNNNLDSLKYRR

SEQ ID NO: 32421 - DNA, 861 bp, Unknown
  Obtained from environmental sample
  misc_feature (1)..(861): n is a, c, g, or t
atggagaatgccggagaggccacggacgaatttaagggaaaagcggacagcgccgccaaatctgtcgaccgcggcatgaaggacgccgggaagtccacgcagggcttcaaggaaaaagcggtaagcgccgccaatgccatcgaccaggcattttcgactgtcggcgcgaaaatagcttctttgggcgtcgccgtaggcggtatggcccttatgaaatcaagcatcgactatgaggacagcatcatccgcatcggcaccaacgcggggatgtccggcgaggcggtcaaccggttcaggcgcgacctgctggcgatcgcaaccgaggccaaagtgccggttcaggagctggttcagttcggccaggttgtcacggacaattccataagcctggacgcggcttcggagggcatgcgcttcatggccgacgcgatgcaggggcttggcatatcgggtcaggaagccggggatattttcagcgtccttgtgcagaaaggcgcgagcatcgatatagtaaagcaaaaactaaacaacctagccgaaatcgacaacaggctccagggcatgggactggcagaatttacaaaaaggctgccggaactaatgacagcgagcgatgtaaccgtcgacaacattgaggatttgtatatttcaatactgacattaaacaatggggtttcaagtaaaaaagctattaccgagtacaccaccgctatgcaaacttttgcaaataaaagggatgctattcggcaaaagctaaaagggtttgatgttaaaaatgaaaatgatgaattaaaaagttttgaagaaataatgactgccctggttgaaagaagcaaagaaataggcggccttgataactaa

SEQ ID NO: 32422 - protein, 286 aa, Unknown
  Obtained from environmental sample
  misc_feature (1)..(286): Xaa is any amino acid
MENAGEATDEFKGKADSAAKSVDRGMKDAGKSTQGFKEKAVSAANAIDQAFSTVGAKIASLGVAVGGMALMKSSIDYEDSIIRIGTNAGMSGEAVNRFRRDLLAIATEAKVPVQELVQFGQVVTDNSISLDAASEGMRFMADAMQGLGISGQEAGDIFSVLVQKGASIDIVKQKLNNLAEIDNRLQGMGLAEFTKRLPELMTASDVTVDNIEDLYISILTLNNGVSSKKAITEYTTAMQTFANKRDAIRQKLKGFDVKNENDELKSFEEIMTALVERSKEIGGLDN

SEQ ID NO: 32423 - DNA, 840 bp, Unknown
  Obtained from environmental sample
  misc_feature (1)..(840): n is a, c, g, or t
ttggcggctacgccaacgttgaatgggaagcccgttgacaaactgctgctcatccccggcgttcgctacgattactatcccgaacttgactacgagggatcggcgttgccggcgttttgggactacggttttatggacaaccgccgcggatggtcgggcgagccctctttcagggtcagcgggcgctatcagctaacggacaagtatacgcttaaggcggcaaccggcacctacagccagaccccggagccgatgggccttgcggtgcacgaggacttcggcaatccggacctgccgtcaacgaaagccgcgcactacattgcggggttcgagtggcggataagcgaccttataagcctagacgcgcaaacgtactttaatcgcatttgggacgtagcgcgttcatacaacgggttaattgattacgatccgaatcttgaggtacagcggcgctacttcagcgacggaaaacagcggatgtacgggctggagcttatgttgcgccactcccgttccgaaaaattcttcgggtggatatcgtacacgctcgcgagaagcgagatgtggagcaagcgcgacggaaagtacatcctctcaagccgcgacgaaccgcacaacttgcagttactaggcagctggcgtttgaaggactgggaggtgggcacgagagtgcgtttcgtaagcggaaagccgacgtcgccgatagtcgcgactgtcgagagcgagaacggaaagtatataagcgccgtttacggggagcgaaactcaacacggcaagatccgttttttcaagttgacatgagggtagagaaaaaattcatctttgacaaattatattga

SEQ ID NO: 32424 - protein, 279 aa, Unknown
  Obtained from environmental sample
  misc_feature (1)..(279): Xaa is any amino acid
MAATPTLNGKPVDKLLLIPGVRYDYYPELDYEGSALPAFWDYGFMDNRRGWSGEPSFRVSGRYQLTDKYTLKAATGTYSQTPEPMGLAVHEDFGNPDLPSTKAAHYIAGFEWRISDLISLDAQTYFNRIWDVARSYNGLIDYDPNLEVQRRYFSDGKQRMYGLELMLRHSRSEKFFGWISYTLARSEMWSKRDGKYILSSRDEPHNLQLLGSWRLKDWEVGTRVRFVSGKPTSPIVATVESENGKYISAVYGERNSTRQDPFFQVDMRVEKKFIFDKLY

SEQ ID NO: 32425 - DNA, 759 bp, Unknown
  Obtained from environmental sample
  misc_feature (1)..(759): n is a, c, g, or t
ttgaatcccaaaggaaggcaggcgctttccaacgtgaaatacctcatccttgatgaaatccacgccgtgctgggaaacaagcggggcgcgtttctctgttgccagatcgacaggctttcgcttattgccggagagttccagcgtataagcctttccgccacaatccgcacgccggagattgcagccgctttcgtcgcgggtattgaccaaaacggacaggggcgcaaaatcagtattgtcgcgccggctgctgaaaagaaaatagaacttatcctgtcatttgatgatagagagaacaatatcggccaaatcgaaaaatacggaagacgctatacaagcctaattaattatattttgaatcgaatctccgggcgttctaccattctggtttttacagaatcacgccgtcgcgctgaacgactctgttattttatcaaccaggaagcggggaccaccctcgcctttacccatcacggctcgctttcaaaagaactgaggcaaagcgtggagaggaggctggcagcgggcagcctattctgcgtggttgctaccgcctcgctggaacttggtatagacataggcagtgttgacgaggtggtgctggcgggaagtccgggctccgtatcccaggccctgcagcgcatcgggagatcgggccatggcgtgggaatggtcagccgggggcttctctttcctttcacggaatggacctgctgcatgccgccgcccttaaaaacgccgttgaggatagggacatag

SEQ ID NO: 32426 - protein, 252 aa, Unknown
  Obtained from environmental sample
  DOMAIN (149)...(222): Helicase conserved C-terminal domain
  misc_feature (1)..(252): Xaa is any amino acid
MNPKGRQALSNVKYLILDEIHAVLGNKRGAFLCCQIDRLSLIAGEFQRISLSATIRTPEIAAAFVAGIDQNGQGRKISIVAPAAEKKIELILSFDDRENNIGQIEKYGRRYTSLINYILNRISGRSTILVFTESRRRAERLCYFINQEAGTTLAFTHHGSLSKELRQSVERRLAAGSLFCVVATASLELGIDIGSVDEVVLAGSPGSVSQALQRIGRSGHGVGMVSRGLLFPFTEWTCCMPPPLKTPLRIGT

SEQ ID NO: 32427 - DNA, 333 bp, Unknown
  Obtained from environmental sample
  misc_feature (1)..(333): n is a, c, g, or t
ttgttctatattttcggattaagcggcttccttgcgattttccattcatcttcaatgataacgcgtttnttagtcgccgcgttaataatagcccctccggccttctttatgggcattccgtacccgaacggccttagcagtcttcaggaaacaaagcctcaccttttaccctgggcgtggggaatgaacggcggcctctcacttgtcggaagcgcgatggcgcgccttctttccatagccagcggttttccggtgctcttaaaattcggaatcgggatatatctattggtaggaattcttttcccaatcaaccaggaattgaccagggattaa

SEQ ID NO: 32428 - protein, 110 aa, Unknown
  Obtained from environmental sample
  SIGNAL (1)...(26)
  misc_feature (1)..(110): Xaa is any amino acid
MFYIFGLSGFLAIFHSSSMITRXLVAALIIAPPAFFMGIPYPNGLSSLQETKPHLLPWAWGMNGGLSLVGSAMARLLSIASGFPVLLKFGIGIYLLVGILFPINQELTRD

SEQ ID NO: 32429 - DNA, 633 bp, Unknown
  Obtained from environmental sample
  misc_feature (1)..(633): n is a, c, g, or t
atggcgcatgaaaatatagctcctacaaaaagcaatctcataaaagtcaaggaaaggcttaatatagcgcgggaaggctatgatcttttggagcaaaaacgggaaattcttgtcgcggagcttatgcgcaaggtggaacaggtaaaaatactggaacgcgaccttgataagagcgtagaaacggcctatccctgcttaaaacgcatgcttgttgtcgtcggaagggagcgggctcaaaaactggcgcaaaatgtctcctattcttttgatttaacggaaaaacaggtaattgccgccggaatgaaactgcccgggctggaaatcaaccttccggcgatagatttaaaatattcccctgtgaattcatttgcagaatgtgatgaaaccgtgctagaattctttgagatgcttaaaatatgcacacaactggcggcggtacgaaccataagctggaggctggcgagggaagtacgcaagacgcagcgcagggtgaacgcccttgagaaaatggtcattcctaccgccagcgagacaaaggtatatattgaagcctcgctggaagaaagggacagggattccttctttaccagcaaactgctcaagaaaaaaggagttgccggtataagtaaatga

SEQ ID NO: 32430 - protein, 210 aa, Unknown
  Obtained from environmental sample
  DOMAIN (11)...(205): ATP synthase subunit D
  misc_feature (1)..(210): Xaa is any amino acid
MAHENIAPTKSNLIKVKERLNIAREGYDLLEQKREILVAELMRKVEQVKILERDLDKSVETAYPCLKRMLVVVGRERAQKLAQNVSYSFDLTEKQVIAAGMKLPGLEINLPAIDLKYSPVNSFAECDETVLEFFEMLKICTQLAAVRTISWRLAREVRKTQRRVNALEKMVIPTASETKVYIEASLEERDRDSFFTSKLLKKKGVAGISK

SEQ ID NO: 32431 - DNA, 486 bp, Unknown
  Obtained from environmental sample
  misc_feature (1)..(486): n is a, c, g, or t
atgaaatcacccatcactaatatactaacagcggttaccggctctgacgcgtctattatggcggcgaagtacgccatagtcctggcgaaactctatcattgccgccttggcgtagtgtatgtcgtggacacggcgacgataaaacagctaaccctgagcaagatcttcatccaggctgaaagctccgaatatgaaaaaagccttgaggcgaacggccagcgttacctctcctttgtggaggagcttgccaacgcgaaaggggtaaaagccgacaaggttttgcggaaaggcgcggtatacaccgaaattctcaccaccgccgaggaacgcgaggcggatctgatcgtgatgggaggctgggagaaaaaccgcagcgcccttgacatcatagggcacgcccaccgcgaaattatgcttaacgctaaatgctcggtgctgctggtaaaagagccgggtatcgatcaactgtacaaagaattaagatag

SEQ ID NO: 32432 - protein, 161 aa, Unknown
  Obtained from environmental sample
  DOMAIN (4)...(149): Universal stress protein family
  misc_feature (1)..(161): Xaa is any amino acid
MKSPITNILTAVTGSDASIMAAKYAIVLAKLYHCRLGVVYVVDTATIKQLTLSKIFIQAESSEYEKSLEANGQRYLSFVEELANAKGVKADKVLRKGAVYTEILTTAEEREADLIVMGGWEKNRSALDIIGHAHREIMLNAKCSVLLVKEPGIDQLYKELR

SEQ ID NO: 32433 - DNA, 663 bp, Unknown
  Obtained from environmental sample
  misc_feature (1)..(663): n is a, c, g, or t
atggcctttgctaatttcaccgtggaaaccggtaaagccctgcccctgggcgcaacggtgacggataggggaattaattttgccgtcttttcgcggcatgccacttcggttacgttgatcgtttttcaatcagcggagccgggaagcctcttcacagaaataaaactggacaaaaaaaagaaccgcaccggtgacatctggcattgctttattccaggccttaaggaacatacatgctacctatatcgcgccgaagggccctatgttccagaaaaggggttccgttttaattcgaataaaactctcttcgacccgtacgccaaggcactgacggatctctccaattgggacctgaaagcatgcgtaggttatgatccctacacggcatccaaagatctttcttattcttacattgatgacatattcacccagccaaggtgtatagcgattgacgataattttgactggcagggcgatctacccctcaactatccattgcgtttcagtgtactttacgaaacccatgtaaagggactcacaaatcatccaggttcgggcgtttccgcgcccggaacctacaaaggtgtgatcgaaaaaattcctttactaanagacttggcattacagcctggaattccttccattcagaattcacgagaatga

SEQ ID NO: 32434 - protein, 220 aa, Unknown
  Obtained from environmental sample
  DOMAIN (15)...(107): Isoamylase N-terminal domain
  misc_feature (1)..(220): Xaa is any amino acid
MAFANFTVETGKALPLGATVTDRGINFAVFSRHATSVTLIVFQSAEPGSLFTEIKLDKKKNRTGDIWHCFIPGLKEHTCYLYRAEGPYVPEKGFRFNSNKTLFDPYAKALTDLSNWDLKACVGYDPYTASKDLSYSYIDDIFTQPRCIAIDDNFDWQGDLPLNYPLRFSVLYETHVKGLTNHPGSGVSAPGTYKGVIEKIPLLXDLALQPGIPSIQNSRE

SEQ ID NO: 32435 - DNA, 876 bp, Unknown
  Obtained from environmental sample
  misc_feature (1)..(876): n is a, c, g, or t
atgagcataggctttgagaggcctttttttatcctggccgcttttatctcaattccgcttcttctttntgtttcaaggtactntaagcctctctttgccctggatattcccctggaaccgcccggaggcattgcctttaagcctcccttaaatcttaaatttttaatgaaattcctacatgcgctggagatggcggggatattcctgctttttgccgccgccgccgggcctcattttgtttttaccgagatggtctggctcaaccgaggggccgacattatcttcgtgatggatataagccccagcatggcggggatggacatgggtggccgaacccgttttgaggctgcccgcagccttatgatagatttcgccgacaggcggcaacaggacgcgattggtttcgttgccctggggcaggacgccgcccttttagtgcctctaacaaccgaccgcgaggttttgtattcgcggcttaattccctgatgataggcgagctgggggacggaactgccctgggtaccggtcttgcccttgctgcttttcatatcagcaagtcggaagctccaaggcgggcggtagttcttattaccgacggcgagaacaacgcgggaacgattcatcctgagtccgcggcagctatgctgggcgaaatgggcgtttctctttgggtggtaggtgtaggatcctccggggaggttcccgtcaactacgtggatccaattacaaaaatgcgccgtaccggtacttttgaatcgcgttataacactgaagatctaaaaagcatagccgacaaggcgcatgggcagtggattcatgcccctcaggctgaggcctgtcagcggcgtnttcgcaactggatcaaagggaaatga

SEQ ID NO: 32436 - protein, 291 aa, Unknown
  Obtained from environmental sample
  DOMAIN (92)...(267): von Willebrand factor type A domain
  misc_feature (1)..(291): Xaa is any amino acid
MSIGFERPFFILAAFISIPLLLXVSRYXKPLFALDIPLEPPGGIAFKPPLNLKFLMKFLHALEMAGIFLLFAAAAGPHFVFTEMVWLNRGADIIFVMDISPSMAGMDMGGRTRFEAARSLMIDFADRRQQDAIGFVALGQDAALLVPLTTDREVLYSRLNSLMIGELGDGTALGTGLALAAFHISKSEAPRRAVVLITDGENNAGTIHPESAAAMLGEMGVSLWVVGVGSSGEVPVNYVDPITKMRRTGTFESRYNTEDLKSIADKAHGQWIHAPQAEACQRRXRNWIKGK

SEQ ID NO: 32437 - DNA, 561 bp, Unknown
  Obtained from environmental sample
  misc_feature (1)..(561): n is a, c, g, or t
ttgcactttacccttgccgatttggtgactgatattacgcagaacgggtgcgagtccggggcgtcccttgttgagcttgagattacggaggatgagcataaaaaggaattccgttttctggtaagggataacggcaaagggatgacgaaagagcaactggcgcaggccattgatccttttgtcaccgacggggtgaagcaccctcaccggaaggtggggctggggcttccgtttttgatacagaccgccgagcagtccggcgggggctgggatgtacagtccgaaaaggggcaaggcactgtggcgacggcgtggtttgataccggcaatgtggatacgccgcctgtcggcgacttgccgggaatgttcaggacagtcctgatgttcaacgggccggaagaaattgttatccggcgaaccggcctgcaaacgggcaaggaaccgctggaatacgaattcagcaaaacggaacttgcggaagccctgggcggctttgagagcgccggggctatggtgatgctggatcagtttttgagatcgcaggaagaagaaggggagtag

SEQ ID NO: 32438 - protein, 186 aa, Unknown
  Obtained from environmental sample
  DOMAIN (3)...(109): Histidine kinase-, DNA gyrase B-, and HSP90-like ATPase
  misc_feature (1)..(186): Xaa is any amino acid
MHFTLADLVTDITQNGCESGASLVELEITEDEHKKEFRFLVRDNGKGMTKEQLAQAIDPFVTDGVKHPHRKVGLGLPFLIQTAEQSGGGWDVQSEKGQGTVATAWFDTGNVDTPPVGDLPGMFRTVLMFNGPEEIVIRRTGLQTGKEPLEYEFSKTELAEALGGFESAGAMVMLDQFLRSQEEEGE

SEQ ID NO: 32439 - DNA, 585 bp, Unknown
  Obtained from environmental sample
  misc_feature (1)..(585): n is a, c, g, or t
ttggcgcatttggaagcggacaaggccgcgattattctacagaacctcaaccacgacgcgcagggcgacgtgtcccggcgtatcgcatgtatggatcgggtcagccacgaagtaatgcgtagaattgaacgggttctggagaagaagataagcgcattgtccaataaagactattcaacagccggcggcgttcaaagcatcgttgatatccttaaccttgttgaccgagcttctgagaagcagatcattgaatccatggaagaaggggaaccttatcttgccgaggagatcaaaaagcggctgtttgtgttcgaggacatcgtgatactggatgaccagtctatccagaaagttttgcgtggagtggaatcgcaggaacttgccaaggcgcttaaaagtgtggataccgaggtgcaggacaaaattttcaggaatatgagtcagcgtgcggccggaatactcaaggaaaacatggaccaaatgggcccgatacggattagggatgttgaagaagcgcagcaaaatatcatttcgattatcaagcatttggaagatatcggggagatagtagttgcccattcctga

SEQ ID NO: 32440 - protein, 194 aa, Unknown
  Obtained from environmental sample
  DOMAIN (83)...(192): FliG C-terminal domain
  misc_feature (1)..(194): Xaa is any amino acid
MAHLEADKAAIILQNLNHDAQGDVSRRIACMDRVSHEVMRRIERVLEKKISALSNKDYSTAGGVQSIVDILNLVDRASEKQIIESMEEGEPYLAEEIKKRLFVFEDIVILDDQSIQKVLRGVESQELAKALKSVDTEVQDKIFRNMSQRAAGILKENMDQMGPIRIRDVEEAQQNIISIIKHLEDIGEIVVAHS

SEQ ID NO: 32441 - DNA, 783 bp, Unknown
  Obtained from environmental sample
  misc_feature (1)..(783): n is a, c, g, or t
gtggcgattcctcaaaaggacggaacattcaggcaggacaccctttgcgaagcttttggccttcacggagaaagccgcttttttacggtttttagagaccagcgtagcaatctttggtatgtccggtcatccaaggacatagccgagcgcgggctttttgccggccttaacggctacgagacccaggttttccttgattttcaggaaaaagaagacacgcctgatgccacgccgggaagctgggaaacccggtgggcagtgctgaactatgagcttggcggtcggggagtcaaaagcgttgacgaaaccctgctggatattttcctgaaagagatttactcccctgtcagagaaatgctgtctaaaaaccgttttgaaacgcttgccaaaatattcagcgaaaagccaaaaaaagcaattgcctccgctcctcagtctccggctccagtccccagtcctgacgaattagttgaatctttcagagagccggttaatcaatttgcagcggcagcggaaaaatacctggacggcgcggacggtaaattcaagccatggggagaatgcgtattaaaatccgacttaaaaaaatccggcggaaaaacaaaacgaaaagccagttcaaacaaagacgcttttggcgattggtccttattctttgaaaacattctggccctggcaaaaagccaggccgggaaagaatataaattcgcgcgcagcctgagaaagaaaatcgccgaacgtccggccttgcttcttatggcattgggttacaataccccntga

SEQ ID NO: 32442 - protein, 260 aa, Unknown
  Obtained from environmental sample
  misc_feature (1)..(260): Xaa is any amino acid
MAIPQKDGTFRQDTLCEAFGLHGESRFFTVFRDQRSNLWYVRSSKDIAERGLFAGLNGYETQVFLDFQEKEDTPDATPGSWETRWAVLNYELGGRGVKSVDETLLDIFLKEIYSPVREMLSKNRFETLAKIFSEKPKKAIASAPQSPAPVPSPDELVESFREPVNQFAAAAEKYLDGADGKFKPWGECVLKSDLKKSGGKTKRKASSNKDAFGDWSLFFENILALAKSQAGKEYKFARSLRKKIAERPALLLMALGYNTP

SEQ ID NO: 32443 - DNA, 684 bp, Unknown
  Obtained from environmental sample
  misc_feature (1)..(684): n is a, c, g, or t
atggactgtaaaacgctattctgttatcatttccctatgattggctttttaataaaaaaaactttatatgatttatgggacaatatgttcagaattgtcctgcttaatttaggcttttttatttgcaccgcgattccgcttctgcccgcattgcttcccaatgttttcggttccaatccgtttttattagtatttgccgttttgggagtccttatctgttcgatatatcttgccacagccgcccttacggtaaagtcagtttccgattacggcaattttacttttcaggattttttcagaaacattaaaaaagcgctgcccgcaggcattgccatgtttgtattcttattcattatttacattgtattgactatcgtaattccgttttatgccgcaatgtcttcgttattcggtttaattatatcggcaatactgntgtgggtagtaatnttcgcctttctttcttttcaattttattttcctgtctactcaaggctcggcatgaacttaataaaatcatttaaaaagtgcatgttaatttctttagataacaccggcatggcgatttttttattaatacacaatactctggctttgctgatctctatcatctttgtttttatgtttcccggtcccgccggcgttcttctctaccttgacgaagctctgcgtctgcgtttgtaa

SEQ ID NO: 32444 - protein, 227 aa, Unknown
  Obtained from environmental sample
  misc_feature (1)..(227): Xaa is any amino acid
MDCKTLFCYHFPMIGFLIKKTLYDLWDNMFRIVLLNLGFFICTAIPLLPALLPNVFGSNPFLLVFAVLGVLICSIYLATAALTVKSVSDYGNFTFQDFFRNIKKALPAGIAMFVFLFIIYIVLTIVIPFYAAMSSLFGLIISAILXWVVXFAFLSFQFYFPVYSRLGMNLIKSFKKCMLISLDNTGMAIFLLIHNTLALLISIIFVFMFPGPAGVLLYLDEALRLRL

SEQ ID NO: 32445 - DNA, 483 bp, Unknown
  Obtained from environmental sample
  misc_feature (1)..(483): n is a, c, g, or t
atgatagtaatgaaattcggcggaagttcggtggcggacgcggaaagaatacgccatgtcgcaagtattgtaaaaactcaaataacaaaaaaaccggtactggtgttatctgctatgggagacacaaccgatcaccttcttgaagcgggaaaccttgctttaaaagaaggtaaggtagatataaaacaagttgaaaaattgcacttggagactgtaaaaaagttaaaacttcccgttcaaaaagagatttcaagccttttggacgagcttactcggctgttatcgggaattgcgcttatcagggaacttactcccagaacaaaagattatttggtctccttcggcgaacggctttcaatcagacttgcggcggcgtttttaaaagcatcaaatatgaacgcaagggcttttgacgcgtgggacgtangttttatttccantcagatatacaaaaccgaagtgctgaaagaagctggnacttga

SEQ ID NO: 32446 - protein, 160 aa, Unknown
  Obtained from environmental sample
  misc_feature (1)..(160): Xaa is any amino acid
MIVMKFGGSSVADAERIRHVASIVKTQITKKPVLVLSAMGDTTDHLLEAGNLALKEGKVDIKQVEKLHLETVKKLKLPVQKEISSLLDELTRLLSGIALIRELTPRTKDYLVSFGERLSIRLAAAFLKASNMNARAFDAWDVXFISXQIYKTEVLKEAGT

SEQ ID NO: 32447 - DNA, 1224 bp, Unknown
  Obtained from environmental sample
  misc_feature (1)..(1224): n is a, c, g, or t
gtgcgtgaggtgctaaagagcatcattattcccctgtggaacgcgtacagtttttttatcacttatgccaacatcgacaaaattaccgcgcaaggcgcgcccgaaaaacccgccaatccgctggatcaatggatactttcagagacacaaaccctgatagaaaaaacaggcggcgcgcttgacgtttacgacntgagccgcgccgtagaccacatactgcgcttcatagacctgttgaacaactggtacatccgccgctcccgccgccgtttctggcgcagcggtaatgacagcgacaagctcgaagcttacggcgctctctacgaagctcttaaaacattaataacagtcgccgctccattcatgccctttaccacggacgctgtctggagaaatctgcgtctggaaaacgatcccgaatccgtgcatttgactgactatcccgtacccgacgaaaaacgccgcgacagcgcgcttgaattccgcatggcctgtgttatgtccgccgtttcaatcggacgctcgctccgctcccagtacaatatcaaaatgcgccagccgctgagcaaagctgaagttgttacgcgcaatgaagacgaaaaaaacgcactaatgagcatggcggatataatccgcgaggaactcaatgttaaagaagttgttttttccgataaagaagaagatttggtagagtatgaggtaaaagccaacttccgcgtattgggaaaagaacttggaaaggacatgaaatccgccgccgccaaaatagaggcgctcaaacacgcccagattcaaagcgtcatggaaggcgcgtctctttcgatagacgttccatgcgaaggcggcggcacaaggacgcttgtaataactgcggataaacttgacatccgcagaatagagaaggcgaacctgcgcgtccttaacgaaggctctgtcacagtcggacttgacacggaaattacccgcgaactttcgatggagggcgacatccgcgacttaatccgaggcgttcaaaacgcgcgcaaggaaatgggcttgtctgttaccgaccgcatagaactttgtttacatggcgtggattcattaaaagaagcctgggacaatttcggcaaaaccgccgccgaagaaactcttgccgtaaagacccaatgggcaaaaaccgacggccaaatccccatcgaagccggagacgaaacatggcatgtaaaaattacaaagtcgtaa

SEQ ID NO: 32448 - protein, 407 aa, Unknown
  Obtained from environmental sample
  DOMAIN (42)...(193): Anticodon-binding domain
  misc_feature (1)..(407): Xaa is any amino acid
MREVLKSIIIPLWNAYSFFITYANIDKITAQGAPEKPANPLDQWILSETQTLIEKTGGALDVYDXSRAVDHILRFIDLLNNWYIRRSRRRFWRSGNDSDKLEAYGALYEALKTLITVAAPFMPFTTDAVWRNLRLENDPESVHLTDYPVPDEKRRDSALEFRMACVMSAVSIGRSLRSQYNIKMRQPLSKAEVVTRNEDEKNALMSMADIIREELNVKEVVFSDKEEDLVEYEVKANFRVLGKELGKDMKSAAAKIEALKHAQIQSVMEGASLSIDVPCEGGGTRTLVITADKLDIRRIEKANLRVLNEGSVTVGLDTEITRELSMEGDIRDLIRGVQNARKEMGLSVTDRIELCLHGVDSLKEAWDNFGKTAAEETLAVKTQWAKTDGQIPIEAGDETWHVKITKS

SEQ ID NO: 32449 - DNA, 687 bp, Unknown
  Obtained from environmental sample
  misc_feature (1)..(687): n is a, c, g, or t
ttgatgtttgaatttattgcgatcacaaaccgccgtctctgtccaaaagagaacgctgcgtctggaaacgcggcgtttgggaacgcaaggttcctgacacaaattgaaaagattgccgcctcgggagttaaagcggttgtgttaagagaaaaggatcttccatcaaatgattatcttgatcttgcccgcgaggttcttgagctttgtaaagcaaaaaaagttcaatttattgttcacggtctgcctcaggttgctctggatttggactgccctcttcttcatctgccgtgggaagtgtttaaggagcaatgcttaagtcaagatgctcttccttcatggaaagaaaaaagcgttctttctttcggggtttctgttcatagcacggaagaagcgaaacttgccatagccaatggagcttcatggcttattggcggccatattttttctacccaaagcaaagacggccttgaaggcagggggccggaatttcttgcggatctctgtaagttgtcctctgtccctgtttacgggatcgggggtattaatgaaatgaatataattgaaatttttaaaaccggcgcggcaggagcatgtttattgtcatctttgatgcaaagttcagatccttccgcgctgatatccgaattgacagacaagtgtaaaaaatattttaaggaggtaaactaa

SEQ ID NO: 32450 - protein, 228 aa, Unknown
  Obtained from environmental sample
  DOMAIN (5)...(203): Thiamine monophosphate synthase/TENI
  misc_feature (1)..(228): Xaa is any amino acid
MMFEFIAITNRRLCPKENAASGNAAFGNARFLTQIEKIAASGVKAVVLREKDLPSNDYLDLAREVLELCKAKKVQFIVHGLPQVALDLDCPLLHLPWEVFKEQCLSQDALPSWKEKSVLSFGVSVHSTEEAKLAIANGASWLIGGHIFSTQSKDGLEGRGPEFLADLCKLSSVPVYGIGGINEMNIIEIFKTGAAGACLLSSLMQSSDPSALISELTDKCKKYFKEVN

SEQ ID NO: 32451 - DNA, 369 bp, Unknown
  Obtained from environmental sample
  misc_feature (1)..(369): n is a, c, g, or t
gtgctgatagcgtccgtttccatcaggggggcgccgtttttcgcgtacatcacaggatcaataaccacgttgcgcggtttccattccagcagttttcccgcgacagccgtcatgatctggccgcatgaaagcattccgacttttaccgcgtcgggcggaatgtcctcaaacaccgcgtcaatctgtttttcaataatgcccggacggatattctggtattcgatcacgcggaacgtgttttccgctacaaccgatgtaacagccgtcatgccgaaaacgccgtgggccgaaaatgttttcaaatcagcctgtatacccgcgcctccgctgcaatcagaccctgcgatactcaacgctgttttcatttag

SEQ ID NO: 32452 - protein, 122 aa, Unknown
  Obtained from environmental sample
  misc_feature (1)..(122): Xaa is any amino acid
MLIASVSIRGAPFFAYITGSITTLRGFHSSSFPATAVMIWPHESIPTFTASGGMSSNTASICFSIMPGRIFWYSITRNVFSATTDVTAVMPKTPWAENVFKSACIPAPPLQSDPAILNAVFI

SEQ ID NO: 32453 - DNA, 804 bp, Unknown
  Obtained from environmental sample
  misc_feature (1)..(804): n is a, c, g, or t
atgaaaacagcgttgagtatcgcagggtctgattgcagcggaggcgcgggtatacaggctgatttgaaaacattttcggcccacggcgttttcggcatgacggctgttacatcggttgtagcggaaaacacgttccgcgtgatcgaataccagaatatccgtccgggcattattgaaaaacagattgacgcggtgtttgaggacattccgcccgacgcggtaaaagtcggaatgctttcatgcggccagatcatgacggctgtcgcgggaaaactgctggaatggaaaccgcgcaacgtggttattgatcctgtgatgtacgcgaaaaacggcgcccccctgatggaaacggacgctatcagcacgctgattaaggaagtcgtgcccttggctgatttgataacgccgaatattcccgaagcggaaaaaatatcgggaatggcggttaaaacgcatgacgctatgcgggaggcggcccggcgtattcacgcgatgggatgccgcgccgttgtcgttaaaggcgggcatatcgagggagacgcgacggatattttgtttgacggggaaaaattttatgaatacccgtcgccgaggatagacacaaagcatacccacggaaccggatgtactttttcttcggcgattgcttcaaatctcgccctcgggctccccgtttacaaagcggtcgaaaacgcgaaggcgtatataaacacggcgattgcccatgcgccgaaacttggaaaagggcacgggcctacgcatcatttttacgccttatacgaaaattttttcagggacaagtaa

SEQ ID NO: 32454 - protein, 267 aa, Unknown
  Obtained from environmental sample
  DOMAIN (11)...(254): Phosphomethylpyrimidine kinase
  misc_feature (1)..(267): Xaa is any amino acid
MKTALSIAGSDCSGGAGIQADLKTFSAHGVFGMTAVTSVVAENTFRVIEYQNIRPGIIEKQIDAVFEDIPPDAVKVGMLSCGQIMTAVAGKLLEWKPRNVVIDPVMYAKNGAPLMETDAISTLIKEVVPLADLITPNIPEAEKISGMAVKTHDAMREAARRIHAMGCRAVVVKGGHIEGDATDILFDGEKFYEYPSPRIDTKHTHGTGCTFSSAIASNLALGLPVYKAVENAKAYINTAIAHAPKLGKGHGPTHHFYALYENFFRDK

SEQ ID NO: 32455 - DNA, 801 bp, Unknown
  Obtained from environmental sample
  misc_feature (1)..(801): n is a, c, g, or t
atgtggcaagactacaattccttttccgtttcaataatgtccatgctttttgagccacttgcggaactccattccacagagaacagaccaagcggagttttggcgagcaaatgggaaatttcagaagataaaatgagctacttttttgaaatagacagccgcgcaaaatggagcgatggaaaacccattacggcttatgatgtgcagttctattacgatgttataatggatccgaaaaatttaacgcctatattcaaagttgggctttctcgccttgaacgcccagaggttgttgacagcttgcatttaacaataaaagccaaagacccgcattgggctaatttttgggaagcggcaggaatggttgcttttccaaaacatatttgggaaaaggcagatttcaattccattcgctttgagtttcctgttgtgagcggaccttactccattaagcaaatgaaaatggatcagaaattggaactcgtgcgccgctcggattggtgggggcggcaaaaaagatataatgctggcaaatataattttgaaaaaataacctaccgttttatggaagaccgcaacaaagcccttgaagctttgaaaaaaggcgattttgatgcttacccaatttacacttcgtctatatgggttaagcaaaccgattttgatgcaataaaaaaaggttatgtgttgaaaaatagagttttcaacgaagaacccattggttttcagggctttgcgctgaacttgcgcagggaaaaattcaaagacgttcgcgttcgcaagctctttcccttttgctag

SEQ ID NO: 32456 - protein, 266 aa, Unknown
  Obtained from environmental sample
  DOMAIN (29)...(257): Bacterial extracellular solute-binding proteins, family 5 Middle
  misc_feature (1)..(266): Xaa is any amino acid
MWQDYNSFSVSIMSMLFEPLAELHSTENRPSGVLASKWEISEDKMSYFFEIDSRAKWSDGKPITAYDVQFYYDVIMDPKNLTPIFKVGLSRLERPEVVDSLHLTIKAKDPHWANFWEAAGMVAFPKHIWEKADFNSIRFEFPVVSGPYSIKQMKMDQKLELVRRSDWWGRQKRYNAGKYNFEKITYRFMEDRNKALEALKKGDFDAYPIYTSSIWVKQTDFDAIKKGYVLKNRVFNEEPIGFQGFALNLRREKFKDVRVRKLFPFC

SEQ ID NO: 32457 - DNA, 786 bp, Unknown
  Obtained from environmental sample
  misc_feature (1)..(786): n is a, c, g, or t
ttgctagatagagaacttatgagcgagaaatttatgttcaatcaatattttttgctaaatacatattatccaagtctttgggatgggcacaaaaatccttatgcaccactatacccttatgctccagattccgctcgcaaactttttgaagaagctggctacactgtaaatgctcagggcaaacttgtggacaaagctggcaagcaatttgaactcacttttttaaaccacgccgaggacattcgccacacaacaaaattccaagaagatttaaaagccgtgggaatagaatccaacatagagacggtttctctttccacgttccgccagcgcattgacgatgcgaactttgacttgtgctggctcgcttggggcgcgggtcgcttgagcgatccggaggcaagttggcattccaaaaccgcaaacgacaaaggcacaaacaacgtgcctggtttgcaagacaaaattatagacagtcttatagaagcccaaaaaaccgagctgaatttagatgcccgcaacaatatattaaaagatttggacattcgtctaacagagatagttccatatattttgctgtggcaatccgaaaataacaaaattctgcattggcagcgttttggctatcctgggtcgttatacggcaaattcaatagggaagatgctatacctgtgtattggtggtacagccccgaaaaagcaggggagcttcaaaaggcacaaaagaacaatgaggctttgcctgttgaagaagtggatgtgcggtttcagagtagttgccattaa

SEQ ID NO: 32458 - protein, 261 aa, Unknown
  Obtained from environmental sample
  misc_feature (1)..(261): Xaa is any amino acid
MLDRELMSEKFMFNQYFLLNTYYPSLWDGHKNPYAPLYPYAPDSARKLFEEAGYTVNAQGKLVDKAGKQFELTFLNHAEDIRHTTKFQEDLKAVGIESNIETVSLSTFRQRIDDANFDLCWLAWGAGRLSDPEASWHSKTANDKGTNNVPGLQDKIIDSLIEAQKTELNLDARNNILKDLDIRLTEIVPYILLWQSENNKILHWQRFGYPGSLYGKFNREDAIPVYWWYSPEKAGELQKAQKNNEALPVEEVDVRFQSSCH

SEQ ID NO: 32459 - DNA, 846 bp, Unknown
  Obtained from environmental sample
  misc_feature (1)..(846): n is a, c, g, or t
ttggaaagtaccgggagcagccgcgagatgtatatgggcaaaatgcgccgattctacaacggctaccgcttctccgagaatccgcttaaaatctacaatccattcggcttgctaaaccactttcatgaaggcggaaaattcaggccgtattggtacagaaccggtacgcccacgctcctgactgacctgattaacgaccggcgtatcgacttcacgaaactgaacaatatgcaggtcgggtacgaggatttcgactcttttgacatagagaacttggcgctggaaccgcttttatatcaaaccggctacctgactataaccgattacgacgaaaatcgagagagttgcttcacgcttgactatcctaatattgaggttcgcagcgccttcgcgaaatcgttggcgacgcggtgtctgaagactcactcaccggaatctaccgcgttaagcgacaaactgacggcggcgctgaacggcggcgacgtagacgccgctttggaggcggtaaagctgtttatgaccaaaatcccatacgacttgtttcaaaaaagggagaacttcttccaatcggtgatatacgtggtattcgcaatgctcggccttgactgccgcacggaggaaagaatcgccgccgggcgtatcgacatggtcgtcgaaacacggggctttgtttactgcttcgagttcaaattagacggaacagcggaggcggcgctcgcgcagatcgacaccaaggagtacgcgattccgtggaccggtcgcgggaagaaggtattcaaagtcggggtgaactttgatttcgagaagaagaacatcggggagtgggtgtctgcggcagcggagtag

SEQ ID NO: 32460 - protein, 281 aa, Unknown
  Obtained from environmental sample
  DOMAIN (1)...(275): Protein of unknown function (DUF1703)
  misc_feature (1)..(281): Xaa is any amino acid
MESTGSSREMYMGKMRRFYNGYRFSENPLKIYNPFGLLNHFHEGGKFRPYWYRTGTPTLLTDLINDRRIDFTKLNNMQVGYEDFDSFDIENLALEPLLYQTGYLTITDYDENRESCFTLDYPNIEVRSAFAKSLATRCLKTHSPESTALSDKLTAALNGGDVDAALEAVKLFMTKIPYDLFQKRENFFQSVIYVVFAMLGLDCRTEERIAAGRIDMVVETRGFVYCFEFKLDGTAEAALAQIDTKEYAIPWTGRGKKVFKVGVNFDFEKKNIGEWVSAAAE

SEQ ID NO: 32461 - DNA, 1263 bp, Unknown
  Obtained from environmental sample
  misc_feature (1)..(1263): n is a, c, g, or t
atgatcaagaccgtaaaatcagttgatctgaaaggtaagcgcataataatgcgcgtggattttaacgttcccatgaaggacggagtagtgcaggacgatacgcgtattgtcgccgcaattcctactattaaatatattctggaacagggggttaagtccctaacgttaatgtcgcacttgggcgatccttccaaagacgcgaagaaagcgcaggaaaaggccgagaaggacggcaaaacatttgacaaggacgcgtatataaagggtaagcaccgtatggctcccgttgccgcatatcttgaaaagaaacttggaaagcccgttattttcgccggagaagacggctgttacgggaaaaaggcttttatcgaaagccagccggacggttccattatcatgcttgaaaatacgcgcttccataaagaagaaaccgccaaagaaccggcggagttggacaaactggcaaaagagcttgccacttacggcgatatatttgtaaatgacgcttttggaaccgcacaccgcgatcacgcttctacggcatccatagcgaagtttgtgcctgtgtccgtggctggctttttaatggagaaggaagtcaattaccttgagccgattgttacaaatccccaaaaaccgttagttgcgattatcggcggcgcgaaggtatcgtcaaaaatcgcggtgctggaaagcctgcttaaaaactccagtgcgctcattatcggcggcggcatggcgtataccttctttaaggcgcagggtcacaagatcggaaaatctcttgttgaggacgatcagcttgataccgcgaagaaaatccttgacgccgcaaagagcgcgaatgtgcaaattatcctgcctcttgatcaggttgccgcgacaagctttgacgcgaactcctctcctatcccggttgacagcctcgaccttcccgacaatctgctcgggcttgacgtagggcctaagactatcgccaaatacaaagaagtgcttgcgggcgcgaagaccattgtgtggaacggccctgtcggcgtctttgaatttgaagctttcgcgaaaggaaccgaagaagtcgcgaaacttgtggcggaaatgaccggcaaaggagccattaccgttgtaggcggcggcgactcggtcgcggccgtaaacaagttcggccttgcttcaaagatgagccacgtttcaacaggcggaggcgcgtcgcttgaactgcttgaaggcaggaagcttccgggtattgaagtttgtcggagctag

SEQ ID NO: 32462 - protein, 420 aa, Unknown
  Obtained from environmental sample
  DOMAIN (1)...(418): Phosphoglycerate kinase
  misc_feature (1)..(420): Xaa is any amino acid
MIKTVKSVDLKGKRIIMRVDFNVPMKDGVVQDDTRIVAAIPTIKYILEQGVKSLTLMSHLGDPSKDAKKAQEKAEKDGKTFDKDAYIKGKHRMAPVAAYLEKKLGKPVIFAGEDGCYGKKAFIESQPDGSIIMLENTRFHKEETAKEPAELDKLAKELATYGDIFVNDAFGTAHRDHASTASIAKFVPVSVAGFLMEKEVNYLEPIVTNPQKPLVAIIGGAKVSSKIAVLESLLKNSSALIIGGGMAYTFFKAQGHKIGKSLVEDDQLDTAKKILDAAKSANVQIILPLDQVAATSFDANSSPIPVDSLDLPDNLLGLDVGPKTIAKYKEVLAGAKTIVWNGPVGVFEFEAFAKGTEEVAKLVAEMTGKGAITVVGGGDSVAAVNKFGLASKMSHVSTGGGASLELLEGRKLPGIEVCRS

SEQ ID NO: 32463 - DNA, 501 bp, Unknown
  Obtained from environmental sample
  misc_feature (1)..(501): n is a, c, g, or t
ttgaatgtggttacaaaaagggccggagatgaaggccttataggaatctcggtaattgataaaatgatttttattcgttttgggttttataaccttgcttcggtattgcttgacggacaatttcccaactacaggaaagttataccggaagaacataaaagttcctttcatgttgacaggctggaaatgctggatgccctccgccgtgtgtcgcaggttgttgaacagaaatcgcaccgtatatatatagggcttaaacccggaattatggagatttattctgaggaaggtgaaattgcggaaggaaagaccgaaattccctgtaaatacgatggagaagaagtagcattcgcacttaactatcaatatcttgaagaaccttttaaagtgatgaactgtgaagaaatctgcataaattttacagggccaagcaaggcgataaccatagttccagtccccaagatggattatttccacatcgtaatgcccatgcaatcctga

SEQ ID NO: 32464 - protein, 166 aa, Unknown
  Obtained from environmental sample
  DOMAIN (45)...(165): DNA polymerase III beta subunit, C-terminal domain
  misc_feature (1)..(166): Xaa is any amino acid
MNVVTKRAGDEGLIGISVIDKMIFIRFGFYNLASVLLDGQFPNYRKVIPEEHKSSFHVDRLEMLDALRRVSQVVEQKSHRIYIGLKPGIMEIYSEEGEIAEGKTEIPCKYDGEEVAFALNYQYLEEPFKVMNCEEICINFTGPSKAITIVPVPKMDYFHIVMPMQS

SEQ ID NO: 32465 - DNA, 402 bp, Unknown
  Obtained from environmental sample
  misc_feature (1)..(402): n is a, c, g, or t
ttgtggcagtcttattctgtggtaatttcttcggtacgtacggcggctttccggaatttgtcggatgctgttattgaaaccgcggcaaagaatgtttttcttgtcggggaaaacggacagggcaagacaaattttttggaagccctttatttttgctcctacgcttcatcctttcgcggggcgcgtgacagcgatattgcccaaaatgaaaaaaaagatttttccgcttctataacgacggcatccatgcattcggagaaaaatgtttgtggcgaagttcttgttaaattcgataaaggtaaaaaaacagtttttattgacggtaaaaaagcggaagaccggaaggagctgctttcgatagtccctgtgtcgtattctgccatgaagatatggaatttgtag

SEQ ID NO: 32466 - protein, 133 aa, Unknown
  Obtained from environmental sample
  misc_feature (1)..(133): Xaa is any amino acid
MWQSYSVVISSVRTAAFRNLSDAVIETAAKNVFLVGENGQGKTNFLEALYFCSYASSFRGARDSDIAQNEKKDFSASITTASMHSEKNVCGEVLVKFDKGKKTVFIDGKKAEDRKELLSIVPVSYSAMKIWNL

SEQ ID NO: 32467 - DNA, 564 bp, Unknown
  Obtained from environmental sample
  misc_feature (1)..(564): n is a, c, g, or t
ttgtgcccctcgggattgcttcgtcgctacgctcctcgcaccgtgtttatcgaggcgaagccaatccagaatcgcacaatatttaattggtatttcaataatatcttgggttcaacggccgtcaaaggggcttttatgggcaatttagggtggttggggcgagtgatactggcggcgggggcggttgcggcggttgccggggcggtgtcggcctcaatgaccaggacgccggggacgctcaccgacaagagggacgggaaaacttaccggacggtggtcatcggcaacaagaggtggatggcagagaatcttaattatcagacagacagctcttggtgttacaataacgatacctcatattgcaataaatacggcaggctctatagctttaatacggcgcggacggtttgcccagccggatattatttgccgtccaataaagactggtctgatttgggacgtgaagtgcgtgtattagatgtatataaaaaacacagatataggttttattatagcagtcgagacacaatagatttcttttacggcgacgcggtagagacgtaa

SEQ ID NO: 32468 - protein, 187 aa, Unknown
  Obtained from environmental sample
  misc_feature (1)..(187): Xaa is any amino acid
MCPSGLLRRYAPRTVFIEAKPIQNRTIFNWYFNNILGSTAVKGAFMGNLGWLGRVILAAGAVAAVAGAVSASMTRTPGTLTDKRDGKTYRTVVIGNKRWMAENLNYQTDSSWCYNNDTSYCNKYGRLYSFNTARTVCPAGYYLPSNKDWSDLGREVRVLDVYKKHRYRFYYSSRDTIDFFYGDAVET

SEQ ID NO: 32469 - DNA, 849 bp, Unknown
  Obtained from environmental sample
  misc_feature (1)..(849): n is a, c, g, or t
atgccttcattaagcgcgctcaaagagtttagtaactcatttagcaatatagctaacgagaaagaagatgtaacatcaagaggtttgccctatacatctttcgaactccccaccacagaagcccccccccttgagtcgttctcacgggaagccactcccgccaaaggttctccgcccgattcctcaactgataccgccggggatttaccagcaagcgcagatacggatggaggtatcgataatttcgattttaacgcttttttgggttctatacccacagatactcccccaccttctgataatgatactgccccgccggcggatgaaggtcagccgccttctgataacttacctgtttccgaagatctgctttcggcggaagaacctccgtctgccgatgattttttagactctctgggaagcgaatctttatcagacgaaactccccctgccggtgaatttacagactcattgggaagcgaatcttcatcggacgaagccctccctgtcgatgattttttaaacacattgggaagtgaaacttcatcggacgaaatgtccgcagatgaatccttccctaccgatgattttttagactccagaggaacagaagccccgcccaaagatgacgagtcttcaaaaacagacgatgatttttccgtacctgcggatctgctgtcgggattgtcagatgaaattgaatcggctccgtcagattttccatccgaagaggtgccttccgaagaggtaccggccgaagacttttcatccgcggattttccggctatggattttccgactgcggacattacgtccgcggaccttacgtccgaagaagcctccgtctga

SEQ ID NO: 32470 - protein, 282 aa, Unknown
  Obtained from environmental sample
  misc_feature (1)..(282): Xaa is any amino acid
MPSLSALKEFSNSFSNIANEKEDVTSRGLPYTSFELPTTEAPPLESFSREATPAKGSPPDSSTDTAGDLPASADTDGGIDNFDFNAFLGSIPTDTPPPSDNDTAPPADEGQPPSDNLPVSEDLLSAEEPPSADDFLDSLGSESLSDETPPAGEFTDSLGSESSSDEALPVDDFLNTLGSETSSDEMSADESFPTDDFLDSRGTEAPPKDDESSKTDDDFSVPADLLSGLSDEIESAPSDFPSEEVPSEEVPAEDFSSADFPAMDFPTADITSADLTSEEASV

SEQ ID NO: 32471 - DNA, 480 bp, Unknown
  Obtained from environmental sample
  misc_feature (1)..(480): n is a, c, g, or t
atgtccgcagtcggaaaatccatagccggaaaatccgcggatgaaaagtcttcggccggtacctcttcggaaggcacctcttcggatggaaaatctgacggagccgattcaatttcatctgacaatcccgacagcagatccgcaggtacggaaaaatcatcgtctgtttttgaagactcgtcatctttgggcggggcttctgttcctctggagtctaaaaaatcatcggtagggaaggattcatctgcggacatttcgtccgatgaagtttcacttcccaatgtgtttaaaaaatcatcgacagggagggcttcgtccgatgaagattcgcttcccaatgagtctgtaaattcaccggcagggggagtttcgtctgataaagattcgcttcccagagagtctaaaaaatcatcggcagacggaggttcttccgccgaaagcagatcttcggaaacaggtaagttatcagaaggcggctga

SEQ ID NO: 32472 - protein, 159 aa, Unknown
  Obtained from environmental sample
  misc_feature (1)..(159): Xaa is any amino acid
MSAVGKSIAGKSADEKSSAGTSSEGTSSDGKSDGADSISSDNPDSRSAGTEKSSSVFEDSSSLGGASVPLESKKSSVGKDSSADISSDEVSLPNVFKKSSTGRASSDEDSLPNESVNSPAGGVSSDKDSLPRESKKSSADGGSSAESRSSETGKLSEGG

SEQ ID NO: 32473 - DNA, 984 bp, Unknown
  Obtained from environmental sample
  misc_feature (1)..(984): n is a, c, g, or t
atgaagattttactctcggaatgtccggccgcgggcataatgctgttcaggtacaacctcaacacggatgacagtgcgatacaaaaactgattgccgaaagcgtcgcgctcattacagagggaaataccgttaaactgctttctgcttccgaggtattcattaccatccccccgtttgtcgtagtggatcacgaggggggaaaagtaaaccgcttcctgccgggggtggcggatctgcctaccgcgtcttcctattgggaaatggcccagagcgaaggcaggggcagcgcgattgcccaaatactgacagacagttttaacacggggaataagctccgcgatcttggcgtaaattttaatttagcgcctgtcgttgaattcctgaatgaagacaattcaagctttcttgagaggcgttcattcggcccggatccggaatttaccgttgatagcgccagggcatttattataggcatggggctggcccgtgttatctgcgccgtaaagcactttccctcaagcgcgggcgcagatccgcactatttccccggtaaattaaccggcgacaaggaagccttgtctgaacttgtcttcccgtttgccaccctcattcaggataatcaggcaggggcaatcatggtttcccactcggctgttcccgcctgggacgagaaaaacatcgcaagcctttcaccggcggtaatgggcggatggctgcggcaggaactggggtataagggactgattatcagcgatgacttttccatgggcgccgcgacagccgctggccgtacaaaaccggaagacgctgcagtccaatccctgattgccggcgcggacattgtgctggtatggccatcggatctgcggcgtacccaccgggcgattcaagcggcccttgccgatggcagactttcccgccaaaggctggaggagtcggcggggcgcgtcgttttgagaaaatgggactctcggccgatctga

SEQ ID NO: 32474 - protein, 327 aa, Unknown
  Obtained from environmental sample
  DOMAIN (49)...(284): Glycosyl hydrolase family 3 N terminal domain
  misc_feature (1)..(327): Xaa is any amino acid
MKILLSECPAAGIMLFRYNLNTDDSAIQKLIAESVALITEGNTVKLLSASEVFITIPPFVVVDHEGGKVNRFLPGVADLPTASSYWEMAQSEGRGSAIAQILTDSFNTGNKLRDLGVNFNLAPVVEFLNEDNSSFLERRSFGPDPEFTVDSARAFIIGMGLARVICAVKHFPSSAGADPHYFPGKLTGDKEALSELVFPFATLIQDNQAGAIMVSHSAVPAWDEKNIASLSPAVMGGWLRQELGYKGLIISDDFSMGAATAAGRTKPEDAAVQSLIAGADIVLVWPSDLRRTHRAIQAALADGRLSRQRLEESAGRVVLRKWDSRPI

SEQ ID NO: 32475 - DNA, 792 bp, Unknown
  Obtained from environmental sample
  misc_feature (1)..(792): n is a, c, g, or t
ttgaatacttccgctgtcttgcgcttatnttcgaaacaagctatactttcgtacaaaaggacttggtgcatggaagcgcttgaaatacggactattttcaccttttcggtgtttaatattgaaattccaattaccgaaacggtgataatttcatgggcggtaatgcttatccttataatcggagcgttcgcccttacgcgcaggcttaaagaagttccctcaggcccgcaggcgctcctggaaaccgcggtcgagtttcttgacaatttcgccaaaaaccagttcggcccttttgcaaagcacctcggcccgtacatgggcgccctctttctgtttctgctcctctcaaatattctccctgttttatcgcccctgcctataaaagcctttggacgcgagtttattccgccctttgaggtacgtcctccaacaagggacatcaatgtaacggcggcgcttgcggtaatttcgattctgctcgttcttttctgcgggttcgcggcgcgcggcccttttggctggttcaaaaaactactgcacccaatttcgtttatgcttcccttcaatataatggaatacgggacgcggctgatttcccttgccctgcggttattcggaaatatgctgggcggctatgtgctgatgagcatgatcgagggactgcttccggtcgcgcttcctgttgttttttcgctctatttcgatttcttcgacggattaattcaggcggcaatttttgtatttcttaccagcctctatatcagcgaggcggttaaagtaaatgaagaataa

SEQ ID NO: 32476 - protein, 263 aa, Unknown
  Obtained from environmental sample
  DOMAIN (40)...(256): ATP synthase A chain
  misc_feature (1)..(263): Xaa is any amino acid
MNTSAVLRLXSKQAILSYKRTWCMEALEIRTIFTFSVFNIEIPITETVIISWAVMLILIIGAFALTRRLKEVPSGPQALLETAVEFLDNFAKNQFGPFAKHLGPYMGALFLFLLLSNILPVLSPLPIKAFGREFIPPFEVRPPTRDINVTAALAVISILLVLFCGFAARGPFGWFKKLLHPISFMLPFNIMEYGTRLISLALRLFGNMLGGYVLMSMIEGLLPVALPVVFSLYFDFFDGLIQAAIFVFLTSLYISEAVKVNEE

SEQ ID NO: 32477 - DNA, 984 bp, Unknown
  Obtained from environmental sample
  misc_feature (1)..(984): n is a, c, g, or t
atgaaaaacctcctgcgcctgaccatgacagccctcttctgccttttgattccgccggccttctggccggcccaggcctggggcatccgcttgaaggaaataacctcctttgaaggggtccggcccaaccaggtgcagggctacggcctggtggtgggcctaaacggcaccggcgacaaggacaagaccgtcttcaccaaccagagcctggccaccatgctccggcatatggacgtgaacataaaccccaccgcggtcaaggtcaagaacgtggccggggtcatcgtcacggccgaactgccgcccttcgtcaagcccggcaccatgatcgacctggtggtcagttccctgggcgacgcctcgagccttcagggcggaacccttttgaccacccaactcatgggcgtggacggcaaggtctatgtcgtggcccagggctccctctcggtgggcggtttcgccgccaccgggcaaggcgccagcgtgcagaagaaccaccccaccgtgggccgcatagtccagggcggcacggtggaacgggaagtgcccgtccactggcagggccgggaaaccctgagcctcaagcttagccggcccgatttcaccaccgccgcccgagtggccgaagctgtcaacagccgtctgcccggcgccgcggcccggccgctggattcctcgaccatcgaattcaacgtgcccctgaattaccgggaaaacatggccttgatggtggcggaactggaaaacctggaggtggagccggacgccatcggccaggtggtcattgatgagcgcaccggcaccgtggtggtgggggaaaacgtaaaaatatccaccgtggccgtggcccacggcaacctttcggtccagataaaagaaggccagaccgtctcccagcccgggcctttctccatgggcgagacggcgaacaccccggaaaccgagatcaacgcggaagaaggggccgacaagctcttcttatga

SEQ ID NO: 32478 - protein, 327 aa, Unknown
  Obtained from environmental sample
  SIGNAL (1)...(26)
  DOMAIN (30)...(327): Flagellar P-ring protein
  misc_feature (1)..(327): Xaa is any amino acid
MKNLLRLTMTALFCLLIPPAFWPAQAWGIRLKEITSFEGVRPNQVQGYGLVVGLNGTGDKDKTVFTNQSLATMLRHMDVNINPTAVKVKNVAGVIVTAELPPFVKPGTMIDLVVSSLGDASSLQGGTLLTTQLMGVDGKVYVVAQGSLSVGGFAATGQGASVQKNHPTVGRIVQGGTVEREVPVHWQGRETLSLKLSRPDFTTAARVAEAVNSRLPGAAARPLDSSTIEFNVPLNYRENMALMVAELENLEVEPDAIGQVVIDERTGTVVVGENVKISTVAVAHGNLSVQIKEGQTVSQPGPFSMGETANTPETEINAEEGADKLFL

SEQ ID NO: 32479 - DNA, 693 bp, Unknown
  Obtained from environmental sample
  misc_feature (1)..(693): n is a, c, g, or t
gtgggccacggccacggtggatatttttacgttttcccccaccaccacggtgccggtgcgctcatcaatgaccacctggccgatggcgtccggctccacctccaggttttccagttccgccaccatcaaggccatgttttcccggtaattcaggggcacgttgaattcgatggtcgaggaatccagcggccgggccgcggcgccgggcagacggctgttgacagcttcggccactcgggcggcggtggtgaaatcgggccggctaagcttgaggctcagggtttcccggccctgccagtggacgggcacttcccgttccaccgtgccgccctggactatgcggcccacggtggggtggttcttctgcacgctggcgccttgcccggtggcggcgaaaccgcccaccgagagggagccctgggccacgacatagaccttgccgtccacgcccatgagttgggtggtcaaaagggttccgccctgaaggctcgaggcgtcgcccagggaactgaccaccaggtcgatcatggtgccgggcttgacgaagggcggcagttcggccgtgacgatgaccccggccacgttcttgaccttgaccgcggtggggtttatgttcacgtccatatgccggagcatggtggccaggctctggttggtgaagacggtcttgtccttgtcgccggtgccgtttag

SEQ ID NO: 32480 - protein, 230 aa, Unknown
  Obtained from environmental sample
  misc_feature (1)..(230): Xaa is any amino acid
MGHGHGGYFYVFPHHHGAGALINDHLADGVRLHLQVFQFRHHQGHVFPVIQGHVEFDGRGIQRPGRGAGQTAVDSFGHSGGGGEIGPAKLEAQGFPALPVDGHFPFHRAALDYAAHGGVVLLHAGALPGGGETAHREGALGHDIDLAVHAHELGGQKGSALKARGVAQGTDHQVDHGAGLDEGRQFGRDDDPGHVLDLDRGGVYVHVHMPEHGGQALVGEDGLVLVAGAV

SEQ ID NO: 32481 - DNA, 348 bp, Unknown
  Obtained from environmental sample
  misc_feature (1)..(348): n is a, c, g, or t
ttgaaacccaatgtcgggattgacgccaactacgccagcaccttcagcggttccggcaccacggcccgcaccgaatccatgaacgcccgcctctcggcccgcgtcatccaggtcttgcccaacggcaacctggtcctccgcggctcccaggagatactggtcaataatgaacgccagtacataaccatccagggcgtcgtccggccctacgacatctccaatgacaacaccgtcctgtccacctatatcgccgacgcccgcatagactactccggccagggcgacctgagccgcaagcagcgcgaaggctggctctcccgcttcttcgacacggtctggccgttctga

SEQ ID NO: 32482 - protein, 115 aa, Unknown
  Obtained from environmental sample
  DOMAIN (1)...(114): Flagellar L-ring protein
  misc_feature (1)..(115): Xaa is any amino acid
MKPNVGIDANYASTFSGSGTTARTESMNARLSARVIQVLPNGNLVLRGSQEILVNNERQYITIQGVVRPYDISNDNTVLSTYIADARIDYSGQGDLSRKQREGWLSRFFDTVWPF

SEQ ID NO: 32483 - DNA, 432 bp, Unknown
  Obtained from environmental sample
  misc_feature (1)..(432): n is a, c, g, or t
atggtacaacccctgacccgtctgtccctgacagaaatcagcgcttccgccagtagtgaaaatattaatataaacctccagacgggaagggtacgggtagatgtaaatcctcccgccgggaaaaaggcgtccatgacggtgagcagcccaagcgctaccgcttccgttcgcggtaccagcttcgatttaagcacccagaatctctatgtgcagcacggtaccgtgagttttgcggggaatagaggtaacttacaactggtaaatgccggctccgacagccaggtaaaaacagacggcagtgtggtcgatcccctagagagcagaagcggcagattgttaccgcaattgccggtaggaatggatacccgcaccggagctgctgttgaaacggtccgttcaaacggcgcaattattattgatattgaatattag

SEQ ID NO: 32484 - protein, 143 aa, Unknown
  Obtained from environmental sample
  misc_feature (1)..(143): Xaa is any amino acid
MVQPLTRLSLTEISASASSENININLQTGRVRVDVNPPAGKKASMTVSSPSATASVRGTSFDLSTQNLYVQHGTVSFAGNRGNLQLVNAGSDSQVKTDGSVVDPLESRSGRLLPQLPVGMDTRTGAAVETVRSNGAIIIDIEY

SEQ ID NO: 32485 - DNA, 1251 bp, Unknown
  Obtained from environmental sample
  misc_feature (1)..(1251): n is a, c, g, or t
ttggtgataaggaaattgatacgattcttgcggctgcggaagaagtctttcgcgggacttgaggaaagggagggaggtactgtgaaccaatatcaggcgcgtctggaaaaaatttgggattggatggcccaggaaggcattgacctggtcatgtttgaggacaccgagggcaggcgtgacgcgaacattcgttggcttaccgggcagccgggcgatgccctgctctttctttctctttctcctcaaccgagcccgtcgggcgtcgaaccagaggttcgcggttcccctcttgcccgcaaaagccttcttgtaccctgggatattattcttgccaaggcgtatgccaaggcggacgcgattgtcccctataatgaatttgaccgtgcgcccaaaaaagcaatcaaaggggcggttgaacggctgaatatccccgccggttcaaaaattgaaatacctccggttactccttatccggtcttccttgattttgtagccgaattacaggattttgatattatctgccggaacagaagcaccatggatcacgcaatggatctgcgaacctttaaagacgcggaggagattgctattatccgcaaagcggcaatgcttacaaataaaattatcgatcttttggaaaaaaaagtgagagccgggagaatcaagaccgaggctgacgccgttatgctgattgagcttgagtcaagaaagctgggctgcgatggcgcggcttttgagattcttgccgcagggcaggacaggagtttcggcatacacgcgttccccgcgtggacggacgcgccttttggcgggaaaggtctgtccatcctggacttcggcgtgcggtattgcggatataacaccgatgttactttgacctttgtgagggagccaagtccgcagcagcttaaaatggtaaccctggtagagaaagcgtacaaggcagcggtcgattcaatagccgccgggaacgatacaaaggccgctgccgttcgtgttgatgagtttttggcaaaatcaagaaaacgcatggtacacggattggggcacggcatcgggctggatgtgcatgagtacccctttctcaggagccgccatgaaataacatgggatttgcagccgggaatgatttttacgattgagccgggcctgtacgaccctgtgcatggcggctgccgactggaaaatgattttcttatcaccgaagatggttttgagattcttaccgagtcgcggatagtttggctgtaa

SEQ ID NO: 32486 - protein, 416 aa, Unknown
  Obtained from environmental sample
  DOMAIN (196)...(410): metallopeptidase family M24
  misc_feature (1)..(416): Xaa is any amino acid
MVIRKLIRFLRLRKKSFAGLEEREGGTVNQYQARLEKIWDWMAQEGIDLVMFEDTEGRRDANIRWLTGQPGDALLFLSLSPQPSPSGVEPEVRGSPLARKSLLVPWDIILAKAYAKADAIVPYNEFDRAPKKAIKGAVERLNIPAGSKIEIPPVTPYPVFLDFVAELQDFDIICRNRSTMDHAMDLRTFKDAEEIAIIRKAAMLTNKIIDLLEKKVRAGRIKTEADAVMLIELESRKLGCDGAAFEILAAGQDRSFGIHAFPAWTDAPFGGKGLSILDFGVRYCGYNTDVTLTFVREPSPQQLKMVTLVEKAYKAAVDSIAAGNDTKAAAVRVDEFLAKSRKRMVHGLGHGIGLDVHEYPFLRSRHEITWDLQPGMIFTIEPGLYDPVHGGCRLENDFLITEDGFEILTESRIVWL

SEQ ID NO: 32487 - DNA, 444 bp, Unknown
  Obtained from environmental sample
  misc_feature (1)..(444): n is a, c, g, or t
ttggcggcgcggtataagcgcaaggtttggcgggggaatgagcaggctggggttcttgcggcggccggcattatcgcgcttaaagagcatagcttgctcntgaaagcggatcacctgagggcaaaaaaactggcgcaggggcttgcaaaaattaaaggtgttaatgttattgacaatattgatatcaatatggttttctttaactatcagcatgaaatgccaccgaaggtgacaacgccacctaaggtggcgccgccgcttaaggaggcgatgtcagccgatgcggaatttgcgagggaaattgtcgggcattttgcaagtcgcggtataacgataaattcgcctgaacagggagtgttccgttttgtaacccattattggattggtgataaggaaattgatacgattcttgcggctgcggaagaagtctttcgcgggacttga

SEQ ID NO: 32488 - protein, 147 aa, Unknown
  Obtained from environmental sample
  misc_feature (1)..(147): Xaa is any amino acid
MAARYKRKVWRGNEQAGVLAAAGIIALKEHSLLXKADHLRAKKLAQGLAKIKGVNVIDNIDINMVFFNYQHEMPPKVTTPPKVAPPLKEAMSADAEFAREIVGHFASRGITINSPEQGVFRFVTHYWIGDKEIDTILAAAEEVFRGT

SEQ ID NO: 32489 - DNA, 516 bp, Unknown
  Obtained from environmental sample
  misc_feature (1)..(516): n is a, c, g, or t
atgattggaacaaaaggaacggtagtagccgttaacggcaatatggtcagcgtccactttgacggcgctgtttccatgaacgaggtcggttatgtaaaagttgccgacaaacggctgaaaagcgaagtaatccggattcgcggcgaggtaagccagctccaggtctttgaaatcaccaagggtattaccgttggcgataaggtggaattcaccggagacatgctggcggtagagttggggccgggccttctgggccaggtctacgacggcctgcaaaaccccctgccgcagcttgccaaagcggccggttacttcctggaacggggcgtttatctggatcccctgcccacggacaagacctgggaatttacccccgcggtcaaagtcggcgccaaagttgaacgggcggatactttgggaactgtgccggaaggggcctttacccaccggattatggttccgtttaacctgtacggctcgtacaaagtggcaaaaatcaaatccgccggaaaatga

SEQ ID NO: 32490 - protein, 171 aa, Unknown
  Obtained from environmental sample
  DOMAIN (8)...(72): ATP synthase alpha/beta family, beta-barrel domain
  misc_feature (1)..(171): Xaa is any amino acid
MIGTKGTVVAVNGNMVSVHFDGAVSMNEVGYVKVADKRLKSEVIRIRGEVSQLQVFEITKGITVGDKVEFTGDMLAVELGPGLLGQVYDGLQNPLPQLAKAAGYFLERGVYLDPLPTDKTWEFTPAVKVGAKVERADTLGTVPEGAFTHRIMVPFNLYGSYKVAKIKSAGK

SEQ ID NO: 32491 - DNA, 567 bp, Unknown
  Obtained from environmental sample
  misc_feature (1)..(567): n is a, c, g, or t
gtgggttcttactattaccttgcggcgcagctcccctaccttgtttacgggcaggcgcttccaatgagttctgccgcttttaaggccttggccgccgatatgatgaacgctgccgatgccgcctcccttgaagattgcacccttaaccacgaatctgccaagcccagttcttcctcgtttattaaccgctggaaggaatgggaacgcgttttaaggctgaacctcgcgcgaggccgctttcagaagctcaagcgggagggtggggctatagaagcgccggactatcccgcgaacgccgccgctgtggcaaaagccgcccttgcgatggaatcgcctctggaagcggagttgtttctggacaaagcccgctgggacgcaattgatagctttcagggcattagtacattcagtgaagatgctatgtacgcctaccttctaaagctcctgcttatggaacggagggcggcgtttaaaccgaagaaagatttaccgaatacaaggcgctttatgcggctattcttggagaatctaaatgattggaacaaaaggaacggtagtagccgttaa

SEQ ID NO: 32492 - protein, 188 aa, Unknown
  Obtained from environmental sample
  misc_feature (1)..(188): Xaa is any amino acid
MGSYYYLAAQLPYLVYGQALPMSSAAFKALAADMMNAADAASLEDCTLNHESAKPSSSSFINRWKEWERVLRLNLARGRFQKLKREGGAIEAPDYPANAAAVAKAALAMESPLEAELFLDKARWDAIDSFQGISTFSEDAMYAYLLKLLLMERRAAFKPKKDLPNTRRFMRLFLENLNDWNKRNGSSR

SEQ ID NO: 32493 - DNA, 948 bp, Unknown
  Obtained from environmental sample
  misc_feature (1)..(948): n is a, c, g, or t
gtggcgttaaattctattccccgcgattttacaggcagcactcagcacacttacagatcggccgcatatctgggcggaatgacaagcgcttaccgtacgtttgtatcggaagaaaataaaaggttaaacgccattaatacattaatgaaagaaaattcgcttgatattcttaaagaggaacatattattgattatcttcttacccgcggcgatacggttcttgcctatgatattattcggttaattcaggatacaaaatcggaaaaactgacaattgattattgtcccggtctgctggaagcttactccgacattaagcgttggaacacttcaatagacaatcccgttgaaccgctgatagaacaaatacttatacttgtttctgaaaatctcagcaaggacacggtttcaaatttggtgtacgcttccggttccaaagaacgtgatttgtattacagcgtcaggcttggaaacacgcttattaactgggcggaagacgcaaaaaattccgattgggcggacataggccgctctcttgttttatcggcgctgacaaacgcggggcccggagccgggaatttatacgctaatttaaaacctacggaatattatccaagggccttatggctcggggaacccggattctgggcatggactgtttccccttccgtcaagccttcatggcaggacggcaacctgaacatttcgtttactttcccggtaagcacgactcatcatgtaataatccgcggggtaaaaccttttcttagcctgcgaatccacgacactaactggagaacggacagccagtatgaacgctatgactcatcgggctgggtatattaccagcaggagcaaatactggtcctaaaattacggcatcgcgaacagacagaaactatcaagatcgtttataaatacgcgcccgccgccgccgccggttgttga

SEQ ID NO: 32494 - protein, 315 aa, Unknown
  Obtained from environmental sample
  misc_feature (1)..(315): Xaa is any amino acid
MALNSIPRDFTGSTQHTYRSAAYLGGMTSAYRTFVSEENKRLNAINTLMKENSLDILKEEHIIDYLLTRGDTVLAYDIIRLIQDTKSEKLTIDYCPGLLEAYSDIKRWNTSIDNPVEPLIEQILILVSENLSKDTVSNLVYASGSKERDLYYSVRLGNTLINWAEDAKNSDWADIGRSLVLSALTNAGPGAGNLYANLKPTEYYPRALWLGEPGFWAWTVSPSVKPSWQDGNLNISFTFPVSTTHHVIIRGVKPFLSLRIHDTNWRTDSQYERYDSSGWVYYQQEQILVLKLRHREQTETIKIVYKYAPAAAAGC

SEQ ID NO: 32495 - DNA, 519 bp, Unknown
  Obtained from environmental sample
  misc_feature (1)..(519): n is a, c, g, or t
ttgtacaattaccgcggctacgcaagggcggaattggcggtgggcagggcatccgaattaaaactcgcaatcgaagattattccaaggcaatctccattaccgccaattacaccgacgcccttatcaaccgttcgcaggccttactcgaaatcggcgaatacaggagggtaatcgacgactgtacccgtattatcgcgctggagccgaaaaactcctacgcgtggaacagacgcggcagcgcgtggtacgccctcggagacgacgacaaagcaattaacgacttttccgaggcaataaaaataagaaacaatcacgcgtccgcctggcacaacagaggcaacgcttggtacagcaaaggagaccacgaaaaagccctctccgacataaaccgctgtatttcaattaacccgtcatacgccgaagcatacgtaagccgaggaaacatacatcgctctcttggtaacaccgaaagcgcatcagccgatttcgcggaagctaagcgattaaaacaaaaataa

SEQ ID NO: 32496 - protein, 172 aa, Unknown
  Obtained from environmental sample
  DOMAIN (72)...(105): Tetratricopeptide repeat
  misc_feature (1)..(172): Xaa is any amino acid
MYNYRGYARAELAVGRASELKLAIEDYSKAISITANYTDALINRSQALLEIGEYRRVIDDCTRIIALEPKNSYAWNRRGSAWYALGDDDKAINDFSEAIKIRNNHASAWHNRGNAWYSKGDHEKALSDINRCISINPSYAEAYVSRGNIHRSLGNTESASADFAEAKRLKQK

SEQ ID NO: 32497 - DNA, 888 bp, Unknown
  Obtained from environmental sample
  misc_feature (1)..(888): n is a, c, g, or t
ttgatccttcggagtactggctttaagatcaagggagtcgacgtaggcaggagcaagatacgcatgggatttttcctctgcatcaatcccggtacggttacggaggagcttcccggcgacaaaacagttgaccccgcttatgggattccggccaaatggataagtgaggacaggcgggacgaggctgaacgggcgggctatactgtggttgatccgcctacgatcatagccacccacctgaccgagattatcaagcggcacgcggcggagctcctcggcctgcaggacactcaggcgattctggacacgctccgcaaggaatacccggcggtggtggacgaggtccaacggcccgatctgaaagtgccggtcgttaaaattcagagaatactccacgggcttttgaaggagagggtttcgatccgcaacatggtgacgatactggaggcgattgccgaatacgcgccgcttacgggcaatgtccagtttcttacggaaaaagtccgccaggcactgggcagccagatttgccatcaatacaccgatgaaaaccacaaactgcgcgtgcttacaatcatgccggaactggaacagaaaatcatcgagagcaagtacgagacctcttccggcatagtgtgcgccctggagccgcccttgcaggccgcgtggatcagggccgttaaaaaatccgcaggggcggtaaagagcaggggataccagcccgttatactctgttcaatggaggcgcgtttcctggtcaagaattcaacggaaagggagcttcccgaactgatcgtaatctccgtgcaggaaattacgcctgatattattcctgaagctgtgggcgttataaggctggaagctccttcgaaagaaggcggggagtag

SEQ ID NO: 32498 - protein, 295 aa, Unknown
  Obtained from environmental sample
  DOMAIN (1)...(277): FHIPEP family
  misc_feature (1)..(295): Xaa is any amino acid
MILRSTGFKIKGVDVGRSKIRMGFFLCINPGTVTEELPGDKTVDPAYGIPAKWISEDRRDEAERAGYTVVDPPTIIATHLTEIIKRHAAELLGLQDTQAILDTLRKEYPAVVDEVQRPDLKVPVVKIQRILHGLLKERVSIRNMVTILEAIAEYAPLTGNVQFLTEKVRQALGSQICHQYTDENHKLRVLTIMPELEQKIIESKYETSSGIVCALEPPLQAAWIRAVKKSAGAVKSRGYQPVILCSMEARFLVKNSTERELPELIVISVQEITPDIIPEAVGVIRLEAPSKEGGE

SEQ ID NO: 32499 - DNA, 465 bp, Unknown
  Obtained from environmental sample
  misc_feature (1)..(465): n is a, c, g, or t
atgacagaaacgtcttttaaaatttatactgacggcggctgttccggcaatccgggaccgggaggctgggcgtatgtcatggtgcagcagacttttcagggcgaacaggtaatcgcaaagaacaaaggctcggaaaaggacacaaccaacaacagaatggaattaaccgccgtgattatggcattacgcgctcttaaaacaatgaccggcataccgcatcaggcggcggtattaaccgactctcagtatgtgcaaaagggcattaccgaatggatacgcaactggaagcgcaacgcgtggagaaccgccgataaaaaaccggtaaaaaatcaggatttatggatggagcttgattcccttgccagtgaatttcctcttaagtgggaatgggtaaaaggacatgcgggcaacgaatacaatgaaatgtgcgacgcgatgactcaggaagccatcgcgcttgtttag

SEQ ID NO: 32500 - protein, 154 aa, Unknown
  Obtained from environmental sample
  DOMAIN (3)...(152): RNase H
  misc_feature (1)..(154): Xaa is any amino acid
MTETSFKIYTDGGCSGNPGPGGWAYVMVQQTFQGEQVIAKNKGSEKDTTNNRMELTAVIMALRALKTMTGIPHQAAVLTDSQYVQKGITEWIRNWKRNAWRTADKKPVKNQDLWMELDSLASEFPLKWEWVKGHAGNEYNEMCDAMTQEAIALV

SEQ ID NO: 32501 - DNA, 567 bp, Unknown
  Obtained from environmental sample
  misc_feature (1)..(567): n is a, c, g, or t
ttggaaggattatataatatgaccgagaagactgcccatattcctgaacgtataaaggaattaagggagattcttgaaatcagcgcaatggatttggcaaaagacgcgggtattccttttgatacttacagtaaatatgaaagcggcgaattagacataccaatcagcgctttgtatacgatagcgggtcaccttggaacaaatattacagtccttcttaccggagaagaggcaagaatggacagcgcggctgtttgcagaaagggtaagggcgtggaaattgaacgctacccgggatatgatttttcaagtcttgcatataactttaaacacagaacaatggagccgttgattgttacccttgactcgtcaaagcctcctgttgatcaggtgtctcatacggggcaggaatttaactttgtaattgaagggcaggtaaaagtaacggttgtaaaaaccgaacatattttaaacccgggcgaatctatctattttgacgcccgtcttccccacgcgcaaagcgccgttaacggaacagcgcaattttttacggtaattcaggaataa

SEQ ID NO: 32502 - protein, 188 aa, Unknown
  Obtained from environmental sample
  DOMAIN (117)...(186): Cupin domain
  misc_feature (1)..(188): Xaa is any amino acid
MEGLYNMTEKTAHIPERIKELREILEISAMDLAKDAGIPFDTYSKYESGELDIPISALYTIAGHLGTNITVLLTGEEARMDSAAVCRKGKGVEIERYPGYDFSSLAYNFKHRTMEPLIVTLDSSKPPVDQVSHTGQEFNFVIEGQVKVTVVKTEHILNPGESIYFDARLPHAQSAVNGTAQFFTVIQE

SEQ ID NO: 32503 - DNA, 1431 bp, Unknown
  Obtained from environmental sample
  misc_feature (1)..(1431): n is a, c, g, or t
ttgtttgacgagtacacaagcggcccagacccagtgtttgttggcaaaaaggtgcattttggaagcgatgagtacggcgatggctccccgctgcacgatcaacttcaggcactgtacaacaaggccatgactgaggggctgcttgcaaaagggctgaaggtcaggacttgggcagaaccagcaacccttgacaatgccatgccaaatgaattggcaaaaaatcccaacgtggaggtcaacatatgggctccatatcatgccgacacgcagagcatctacaataagggctacaacgtcatcaatactgccggcggctggctgtacttagtgccaggctgcgccactggctaccccgactattgggggcgcgtctatgccaacaatggcgactatcgcttggattacctttatgattcatttgacgcaaacaatttttctcccaaacgcaacaacggcaagggcggggcgatcatgccaaaggcgcatccgcagacaaggggcgcacagttctgcgtctggcacgacttcccttctttcaatggcggcctttcggaatttgacctgtttgacaggatgcgggacgtgataccctttgtggcagaaaagtcttggcatggcgaaaaaacaaatggtcaaacttatgaatcttacgccgctcgtttttcaaagttggccaaccgagctccaagtggcaacccagggcggtttgtagaaagtatgtcagacttagtagcttcatatcgcttcagtccagaaaacggattaaacgattcttcaggaaatggctacactgcggttgcgattggtgcggccatcacccccaacggattagaattgtctggcaatgggaagatcagcttgcccttcggttccatggggtacccatacactgtcaggctaaaggcaaagctggccgatgttcctgccaataccattttgttcaagggcaaggatggaattctctacgccaactacttgggcaggggcagcattggctttgagcgcggcgaaaagggcatcgagtaccactttgaatttgtggatgccgatggagtgtcggtatcaagccccgcaatatccctcgacacatggtttgatttagtgcttacttgtgacaaaagattcagcgacgagggcaagcccgcacagacagacacgaagctttacatcaatggcgctttgcaggtgggtcgcgccacttgcgtctggatacacgatggcaagtctttcattccaatcaccggcggcagcggcaatcgcaaaggggtcacttacgattccaattcttttgtgctgccagtagaagagatactccctagcgcanaagccatcgtgcacagtattgacatctacaacaaaaaaatgagtggcgcggaaatccaagacctatacaagatgagcgaacaagcggcgggcgataaattgagataa

SEQ ID NO: 32504 - protein, 476 aa, Unknown
  Obtained from environmental sample
  misc_feature (1)..(476): Xaa is any amino acid
MFDEYTSGPDPVFVGKKVHFGSDEYGDGSPLHDQLQALYNKAMTEGLLAKGLKVRTWAEPATLDNAMPNELAKNPNVEVNIWAPYHADTQSIYNKGYNVINTAGGWLYLVPGCATGYPDYWGRVYANNGDYRLDYLYDSFDANNFSPKRNNGKGGAIMPKAHPQTRGAQFCVWHDFPSFNGGLSEFDLFDRMRDVIPFVAEKSWHGEKTNGQTYESYAARFSKLANRAPSGNPGRFVESMSDLVASYRFSPENGLNDSSGNGYTAVAIGAAITPNGLELSGNGKISLPFGSMGYPYTVRLKAKLADVPANTILFKGKDGILYANYLGRGSIGFERGEKGIEYHFEFVDADGVSVSSPAISLDTWFDLVLTCDKRFSDEGKPAQTDTKLYINGALQVGRATCVWIHDGKSFIPITGGSGNRKGVTYDSNSFVLPVEEILPSAXAIVHSIDIYNKKMSGAEIQDLYKMSEQAAGDKLR

SEQ ID NO: 32505 - DNA, 1446 bp, Unknown
  Obtained from environmental sample
  misc_feature (1)..(1446): n is a, c, g, or t
atggagagaaaacgacatatgtccgaattcagaataagcgtaaaactttcggataaagacttcgccatggtaattcccttcagaacgcagcgctcatcggttattcgtgacaccgaaaataatacgctgaccatagtgtataacggcagccgttaccaatttaaccgccccctgaacagtcttgaatcaggccggataattctctcggacatggcgtcaattgtctcctaccgtgtcgtacccgacaaaaaagaatttaaccccgccgactttattattccgcaggcggagaccgctccggcgttttccgatgtgctttctcagtgggttagccgtaattttgcggtgtggggccagatgggaaccgaaaccgatgaagacacggttgtcgcctggtgcggtgaggccatacagcaaagaacatatcgttcggcggtttctgtcataccggttagttttagttccaatcctcagcgttcatgggaatccgccgtatatcaattcgaccggaaaatcggcgtttgggaagtagccgcaagatccatgtatacttttgagcgtgataaaatgaaccgcatttcccggctgttagctgaaaagaaaatcagtctttttgccgaaaatcatctgattgaatatctggcgatccggggccacagccaattaatagaatatgttctttccgttgcgcaggagatagaccctaccgctatcacccttgaaataggccccggaattctggaaaactgcctggatacaggcttatggcggcctcacgcgtccaatccctttgagtctctcgcggaacaggtttgccagcttgccgccgctgatatacacagaaccggagaccgggtgtttgttttttccgccggctccgcaaacaccgagtttaacgtgcgccttggaaaagccatctatcaatggggagaaaagtccggcaacagcggttgggcggggctgggacgctcgctggtagtttcggttctctccctgagcgatgacagcggatcgcttcccgcatcgctgacgattgacaattccggggaaattattgcgcccggagcgcggatcagcgcggcgaaaatataccgcatcctgagtgacagtgaatatatgcctcacgcgacagcaaccggagcaagcaacgtctgggcatggacagccgcttcatcaataaatatcgttcaggatgaccggcaaatggacattgcgatacaattccccctcggtgatactcattatgtagtgcttaataatataaaaccttttcccatgcttcagatttatgatatgaactggcgcagggcttttgattttgaaagttattacaattcttccggctggtactattttggacgggaacagatgcttatattaaaaattaatcaccggttcagcgttgagcatgtgaaagattatttttaccgttccacgagctcctga

SEQ ID NO: 32506 - protein, 481 aa, Unknown
  Obtained from environmental sample
  misc_feature (1)..(481): Xaa is any amino acid
MERKRHMSEFRISVKLSDKDFAMVIPFRTQRSSVIRDTENNTLTIVYNGSRYQFNRPLNSLESGRIILSDMASIVSYRVVPDKKEFNPADFIIPQAETAPAFSDVLSQWVSRNFAVWGQMGTETDEDTVVAWCGEAIQQRTYRSAVSVIPVSFSSNPQRSWESAVYQFDRKIGVWEVAARSMYTFERDKMNRISRLLAEKKISLFAENHLIEYLAIRGHSQLIEYVLSVAQEIDPTAITLEIGPGILENCLDTGLWRPHASNPFESLAEQVCQLAAADIHRTGDRVFVFSAGSANTEFNVRLGKAIYQWGEKSGNSGWAGLGRSLVVSVLSLSDDSGSLPASLTIDNSGEIIAPGARISAAKIYRILSDSEYMPHATATGASNVWAWTAASSINIVQDDRQMDIAIQFPLGDTHYVVLNNIKPFPMLQIYDMNWRRAFDFESYYNSSGWYYFGREQMLILKINHRFSVEHVKDYFYRSTSS

SEQ ID NO: 32507 - DNA, 1416 bp, Unknown
  Obtained from environmental sample
  misc_feature (1)..(1416): n is a, c, g, or t
gtgaagaacacgccgccacaggttgctatagacaatataaaccttaatgatcgtgtttttgatccttcgagcggaaaccgaacgtccattaacatcgtttcccgcggtactgaggaagagaaatgggaaagcagtatttataatgccgaaggcaagctgatacggacattcgcgcccaaaagcgggagtccgcagccgcagatttgggacggcaaaaccgactccggggagcttgccccggacggcgcttatactttcagaataatgtccaccgacagggcgcagaacacgggactcgccgttatgagtaatatcgttgtggacacaaaaacagtcggcgcaatactcaccgcgtcggcaaacgcgattgcccccaaaacaggtcaagccgcggagttggtgcattttaataaccgccttaaccggacggacggtataagttcatggaaactggaaataaaaaatgataaaggcgggattgaaaagatttatcagggaagcggtgcctcccagggaggcattggaaagcctccggaaaactttagctggaacggtttgtccggtaatgactcagtccgcgagggaatggtctatcctgagcttaccgtaaactaccttgacggccatatcgcaaacgcaaaatcaacgccgatattggttgactcaaccggcccggttttggatttatcatccgcgcccgatctgttcagtcccgataatgacggtgtgaacgacgtgttgtctatcaggctgaaagcggaagatgtttcccccattgcgcgctggtcgctggatatttacgaaccggttatggaggatggaacaaaccctgttcatatattcaaacattttgaaggcaaagccgcccccgttgatgaactgatgtggaacggacgcggaaacaacggcgatcttgtacaatccgctgttgattatccctatgtttacaccgcgactgatgcccttggcaattccagtacaatgaagggaactttcggcattgacgttcttgtaataagagaaggtgaccgatatagaatacagataccgtccattatctttccggcggacagcgccgtctttgacggtttgaatggaagcgcgcttgacaacaatatccgcataattaagcgcgttgcgcagatactcaacaggttcaggaattacaaggtaacggttgaaggccacgcgaatccgaccactgccccaggtcctgcccgcttagaggaagaaccgtcgctgaaggatctaagcgaaaagcgcgcgggctatgttcttgagcagcttgtcattaacggcgttgccggaaacaggcttacattttcaggcgcgggcggttccatgcctgtggttccttatgaaaatcattccggctggtggaaaaaccgccgtgtggattttattttgattaagtag

SEQ ID NO: 32508 - protein, 471 aa, Unknown
  Obtained from environmental sample
  DOMAIN (360)...(463): OmpA family
  misc_feature (1)..(471): Xaa is any amino acid
MKNTPPQVAIDNINLNDRVFDPSSGNRTSINIVSRGTEEEKWESSIYNAEGKLIRTFAPKSGSPQPQIWDGKTDSGELAPDGAYTFRIMSTDRAQNTGLAVMSNIVVDTKTVGAILTASANAIAPKTGQAAELVHFNNRLNRTDGISSWKLEIKNDKGGIEKIYQGSGASQGGIGKPPENFSWNGLSGNDSVREGMVYPELTVNYLDGHIANAKSTPILVDSTGPVLDLSSAPDLFSPDNDGVNDVLSIRLKAEDVSPIARWSLDIYEPVMEDGTNPVHIFKHFEGKAAPVDELMWNGRGNNGDLVQSAVDYPYVYTATDALGNSSTMKGTFGIDVLVIREGDRYRIQIPSIIFPADSAVFDGLNGSALDNNIRIIKRVAQILNRFRNYKVTVEGHANPTTAPGPARLEEEPSLKDLSEKRAGYVLEQLVINGVAGNRLTFSGAGGSMPVVPYENHSGWWKNRRVDFILIK

SEQ ID NO: 32509 - DNA, 396 bp, Unknown
  Obtained from environmental sample
  misc_feature (1)..(396): n is a, c, g, or t
ttgcttggcggcaatgaatatctccctcacgaggcgatgaccgaggtaaacggcttatgggcatggaccgccgccccgtcaataagcgttacgcaaaatgaaaggcagatggatatttccgtcaagtttccggttaatgaaacccattatatcatgcttcgcaatgtaaagccgtttcccatattgcaaatatacggccaaaactggcgaagggccgctgactttgaaagttactacaacgcgtccggctggtactattccgagcaggaacaaacacttgtgttaaaaatcgcccaccgttcaaatacggaacttataaggattctctttgtggcgccccctcctccgcctcctcctccgcccccgcctgcgcctgacgtttttgatatgtattaa

SEQ ID NO: 32510 - protein, 131 aa, Unknown
  Obtained from environmental sample
  misc_feature (1)..(131): Xaa is any amino acid
MLGGNEYLPHEAMTEVNGLWAWTAAPSISVTQNERQMDISVKFPVNETHYIMLRNVKPFPILQIYGQNWRRAADFESYYNASGWYYSEQEQTLVLKIAHRSNTELIRILFVAPPPPPPPPPPPAPDVFDMY

SEQ ID NO: 32511 - DNA, 444 bp, Unknown
  Obtained from environmental sample
  misc_feature (1)..(444): n is a, c, g, or t
atgttgaagtcaaaaattaaaattttgttgtttgtttttcttatgactgcgctggttttatacacgtcctgttccggaaagaaggcgggcgcgcaatccggagcttcgctgcgttatgggtataattccgaaccggtaacattggatcctttaagcccttccaacacagcggacggcagaagcatactgtttaatgtctttgaaggtttggtaaaaccggatactgacggcgcgctccgcccatgcattgcggaatcggttgcaatggaggaattgggccgcatatacaattttcaactgcgaaaaggaatacgtttccacgatggctcgcagttaaggtcaaacgatgtaaaattttcactggaggaggcaaaggccgccggctttattggttttgacgctgtagaaaaaattgaaccggcggggactattctattaaagtga

SEQ ID NO: 32512 - protein, 147 aa, Unknown
  Obtained from environmental sample
  SIGNAL (1)...(29)
  misc_feature (1)..(147): Xaa is any amino acid
MLKSKIKILLFVFLMTALVLYTSCSGKKAGAQSGASLRYGYNSEPVTLDPLSPSNTADGRSILFNVFEGLVKPDTDGALRPCIAESVAMEELGRIYNFQLRKGIRFHDGSQLRSNDVKFSLEEAKAAGFIGFDAVEKIEPAGTILLK

SEQ ID NO: 32513 - DNA, 1008 bp, Unknown
  Obtained from environmental sample
  misc_feature (1)..(1008): n is a, c, g, or t
atggcgagatccgcctttccggacggtgaacagcttcgtgcccaataccgccttgccctttcaggcacgccggtggaaaaccgccttgaagaccttcgttccctgtttgattttattttgcccggctatctgggggacgcggcgcaattcaaagaacagtaccgcgttcccattgaagttatgcgtaaccgcaaacaggcggaaaccctgcgtaaaattacatctccgtttttgttacggcggcttaaaaccgacaaaaaaattatcaaagatttgccggataaaattgccgccaatgaatacgccgtgctggaaaaggaacaggcggcgttatacgaaaatgttgtcaccgaatcaataaaaaaatcaaaagaaatggaccccaaagaacgaccgtctttggttctctccatgcttacttcccttaaacaaatatgcgatcatccgcgggtatttgacaaggaaagccccgcagtttcggcgctttccggcaaatcccagctgcttctcgctttattgcaggaaattctcgctaaccgcgaaaaaactctggtgttcagccagtatgttgaaactttgaattgtctggagatcatcattaaaaaagaactgggcgaggcgccgcttgtttaccacggcggtctgagccaaaatacccgcgcgggaattatcgaccgttttcagaatgaccccgcggcgcggatactgctggtcagccttaaagccggcggcctgggattgaacctgaccgcggcgagccgggtaatccattacgatttatggtacaaccccgccgtagaaaatcaggcgaccgaccgcgccttccgcataggccagaaacgcacggtttttgttcaccgttttatcaccaaaaacagttttgaggaaaaaattgacgccatgatttccggcaagcgggaactcgcggaaatgaccgtcgcctcaggcgaatcctggctggcgcggatgagccacgaggaattgaaagatttatttgacaggggatag

SEQ ID NO: 32514 - protein, 335 aa, Unknown
  Obtained from environmental sample
  DOMAIN (200)...(278): Helicase conserved C-terminal domain
  misc_feature (1)..(335): Xaa is any amino acid
MARSAFPDGEQLRAQYRLALSGTPVENRLEDLRSLFDFILPGYLGDAAQFKEQYRVPIEVMRNRKQAETLRKITSPFLLRRLKTDKKIIKDLPDKIAANEYAVLEKEQAALYENVVTESIKKSKEMDPKERPSLVLSMLTSLKQICDHPRVFDKESPAVSALSGKSQLLLALLQEILANREKTLVFSQYVETLNCLEIIIKKELGEAPLVYHGGLSQNTRAGIIDRFQNDPAARILLVSLKAGGLGLNLTAASRVIHYDLWYNPAVENQATDRAFRIGQKRTVFVHRFITKNSFEEKIDAMISGKRELAEMTVASGESWLARMSHEELKDLFDRG

SEQ ID NO: 32515 - DNA, 420 bp, Unknown
  Obtained from environmental sample
  misc_feature (1)..(420): n is a, c, g, or t
atgcgagagacgttcgggccgtttattattatttccgccgacggaatgtgcgaagcgggtcgtattcagcaccacctgattcacaatattacaaaccccaataccaccgtcttgatcgttgggtacatggccgaaaataccctgggccgccgtatccttgaaaaagccgaagaggttaggatacacggtatgttgttgaaacgccgcgctgaggtcaagaagatcaacgctttcagcgcccacgctgattacagcgaggcgataaattggcttaaatcattggacacttcccgccttaaaaagatcctcatggttcacggagaaccaaaaacccaggccgtctttaaaaagcaccttgctgaagcgggcttttcaaatgtcgatattgtgaagtatgggcaggtttatgatttggcatga

SEQ ID NO: 32516 - protein, 139 aa, Unknown
  Obtained from environmental sample
  DOMAIN (64)...(110): RNA-metabolising metallo-beta-lactamase
  misc_feature (1)..(139): Xaa is any amino acid
MRETFGPFIIISADGMCEAGRIQHHLIHNITNPNTTVLIVGYMAENTLGRRILEKAEEVRIHGMLLKRRAEVKKINAFSAHADYSEAINWLKSLDTSRLKKILMVHGEPKTQAVFKKHLAEAGFSNVDIVKYGQVYDLA

SEQ ID NO: 32517 - DNA, 810 bp, Unknown
  Obtained from environmental sample
  misc_feature (1)..(810): n is a, c, g, or t
gtgttaaaagacactgcggctcccgcggcgaatatcatcgtgccggtatccgaagcaaaagtaaacggaactatacgcatggcgttcgcggttgaggagttaggcgtcattcagtcgatttcttaccgcagaaacgcgacaacccctccaaaagaaatttttaacaacagccaatggaacggcgattattcgccgcgtttctttgaagtgcttatggactcgcttcaaatgccgcttgataccaatatgcgctttacatttacggataaagcgggaaactcaaacgaagtcagcgcatggccgtttgtaatagatcagcaaacggacattccgacggtgcagataattcttccgcaggaagatgaagttataacaaacgactttattgtctccggcgtcatgttcgacgacgacggaattaaagggtatcaatggcgaatagactcaaaaccgtggaataacgaagaagccgcttacggtttctccattccgatagcgttgtcaacattgacagataacgatcatacggtaacaataatcgcggaagacatttacggagtaaaaagcctcccgacaacgcanaaattccgcgtatcgttaaccgagcctacaggaacaatgacgtatcctctttacgatacggtattaaaagaaggcatagagcttcgcggaagcgcctttgaccgncacggcattaaagaagtaagagtttccgttgataacggcaattcgtttaacagggcgataggcaactttggaacgacggcggaaacggtacagtggacgtatcattttacacgacaatattaa

SEQ ID NO: 32518 - protein, 269 aa, Unknown
  Obtained from environmental sample
  misc_feature (1)..(269): Xaa is any amino acid
MLKDTAAPAANIIVPVSEAKVNGTIRMAFAVEELGVIQSISYRRNATTPPKEIFNNSQWNGDYSPRFFEVLMDSLQMPLDTNMRFTFTDKAGNSNEVSAWPFVIDQQTDIPTVQIILPQEDEVITNDFIVSGVMFDDDGIKGYQWRIDSKPWNNEEAAYGFSIPIALSTLTDNDHTVTIIAEDIYGVKSLPTTXKFRVSLTEPTGTMTYPLYDTVLKEGIELRGSAFDRHGIKEVRVSVDNGNSFNRAIGNFGTTAETVQWTYHFTRQY

SEQ ID NO: 32519 - DNA, 894 bp, Unknown
  Obtained from environmental sample
  misc_feature (1)..(894): n is a, c, g, or t
gtggacgtatcattttacacgacaatattaaaagacggtccccatgtagtatttatcagagtatgggacagatacgaagtacctgccacttacgcgttcatgattaacgtagacaacactcagccggaaattatccttgacagcccgggcgacggttcaatctcggtaggaaatatttccgtaatgggacgcgtgcttgatccaaacctaaaagaagtaagtcttgaattaagaagtcttgacggctttacaattcccgccaacttaagatcaagaaaacttgacttaagctcaataataagagagaacatagatatttccgcaatggcggacggacagtacaatctcgcgattatagcgttagacagagccggaaacatgactcgtttttcgcgtaacgtgcagatggcgcgccaaacatacagaaactacatagaaatcctctacccgcttgataacgaagaaacaagcggcgagtttaacctgtacggctacgcgggcggttcatcgccggcgggaaccgtaacaatcaaaataaacggagcggattcgcagactgcgcctgttgacgacgccggatactacgcctttaaactaaacagcgagtatctgacccccggaaacaacgctattaccgtaaccagcaacttcggcgggcctaccattgtttcatcaagggcatacaacattgtttacagggacggcggcccgtgggtaacgatagacagctttaagtttgcggaattctcctatgacagagcgtatctgtcaggaagaaccggttatgtattatccgaagatgacgtacagcttcttgccgacaaatcgacggataaagaagtaaaatgcggcgatactcgcaaaaacaccggactttacggaaataagttttga

SEQ ID NO: 32520 - protein, 297 aa, Unknown
  Obtained from environmental sample
  misc_feature (1)..(297): Xaa is any amino acid
MDVSFYTTILKDGPHVVFIRVWDRYEVPATYAFMINVDNTQPEIILDSPGDGSISVGNISVMGRVLDPNLKEVSLELRSLDGFTIPANLRSRKLDLSSIIRENIDISAMADGQYNLAIIALDRAGNMTRFSRNVQMARQTYRNYIEILYPLDNEETSGEFNLYGYAGGSSPAGTVTIKINGADSQTAPVDDAGYYAFKLNSEYLTPGNNAITVTSNFGGPTIVSSRAYNIVYRDGGPWVTIDSFKFAEFSYDRAYLSGRTGYVLSEDDVQLLADKSTDKEVKCGDTRKNTGLYGNKF

SEQ ID NO: 32521 - DNA, 384 bp, Unknown
  Obtained from environmental sample
  misc_feature (1)..(384): n is a, c, g, or t
atgataataataacagaccttgacaacagcctattaaacgacaatctccaaataaccgaatacaccaaaaacatattcaaaaaatgcaaagaaaaagattacattatagtattcgcaacggcaaggccgtacagaaaaacgcgtattttatttgactccataaagcccgacgcggtaatttgccactgcggcggagtagtttatataaatgataaaataatctgtcaacacggtataaaaccaactattgcacagaatatactaaaaaatattgttaaagattatccaagcataaatattgctgttgaatgtaacgatgaaatatacacaaattttgacacgttaatatactggaaagaagtgccttataaaaatattgattag

SEQ ID NO: 32522 - protein, 127 aa, Unknown
  Obtained from environmental sample
  misc_feature (1)..(127): Xaa is any amino acid
MIIITDLDNSLLNDNLQITEYTKNIFKKCKEKDYIIVFATARPYRKTRILFDSIKPDAVICHCGGVVYINDKIICQHGIKPTIAQNILKNIVKDYPSINIAVECNDEIYTNFDTLIYWKEVPYKNID

SEQ ID NO: 32523 - DNA, 345 bp, Unknown
  Obtained from environmental sample
  misc_feature (1)..(345): n is a, c, g, or t
atgtcttctatagaaattataagaaatttaggaaattctgaaaataacaaacgtatgtataatatttatttaagcgaattaagcaaaaaatattctttcgcattaagcgcgttggttttcacctttttcagtttgtctctatcaataatacttcaaaaacatcgtataatagcgctattaattagcgttatttcatgttttatatattattatttacttttgttttgtcaaatattttcaatgcgtattgaaaaatgtgtatttttattaatgtggcttccaaatattttatttgtaattatatcttttgtattatataattccatgtttaggaaaaagagatag

SEQ ID NO: 32524 - protein, 114 aa, Unknown
  Obtained from environmental sample
  misc_feature (1)..(114): Xaa is any amino acid
MSSIEIIRNLGNSENNKRMYNIYLSELSKKYSFALSALVFTFFSLSLSIILQKHRIIALLISVISCFIYYYLLLFCQIFSMRIEKCVFLLMWLPNILFVIISFVLYNSMFRKKR

SEQ ID NO: 32525 - DNA, 1506 bp, Unknown
  Obtained from environmental sample
  misc_feature (1)..(1506): n is a, c, g, or t
ttgggccattttcacggtgaggacccccggaacggcaatgtggaaataaatgtacggccttttgttttctggcccgagaaaaatttgatcaattatataacggtaaaggggttcaccctgaagcaggcggcgacaaactgggcgcctcccaccgctttgcagacagggcttatcggcccccattgggcgaaaggatggataattgaagacaatataatcagcgactcaaaatgtagcggcataagcctggggaaggaaataagtaccggccaaaatgaatggtacaggcttaagtttaaacagggcacccagcgggaacgggaagttattttccgcgcggccaaagggaactggaataaagaaaccatcggcagccacatagtccgcaataatattatttttgattgtgaacaggcgggggtagtaggccatttgggggcggttttcagcctgatagaaaacaaccatatttaccggattaactacaagcgccaattccagggagccgagatcggcggcataaagttacacgccgccattgataccacgattcgggaaaatgttatccatgactgttaccggggattatggcttgactggcaggctcagggaacccatgtgtgtcggaatattttttggaacaacacgcaggaagatttatttattgaggtaacccacgggccgtatctcattgatcataatcttttcctttcccccttcaattacagggaaatgtcccagggcggagcgtttgttcataatcttttcgcgggcaaactttgtaccatccccgaaatgcaccgttacacgccatatcacttcccgcatgagaccgagataatgggagtgatgacgatttccggcggagatgtccgtttctacaataatctttttatcggcgacaaggatgtagaccttccgaatgaatctgtcggcatctggtcggacgcgcctgtcgccgaccttccgctttcccctgacgcgctcgcgaatatgccgacatatatccgcaaacctttagggacaggccagtacgatgattatccaagtgaaaacgaacccgctccatggcttcctgtacccggcaagcaattaggcggcaggaccgatgccatgtttctgcctgtttacattaaacacaacgtgtacctgaaaggcgctaagccatatattaaagaacctgatcctgtggtgagccgccagtgcggagtagaatttgagatagaccacgttgaatcaaaggttacggtcaaaattgctgacccttctaaaattcattgtccaacgagcgaaataatcactaccgaagtgcttggaaaaaatcatcataccgagatgttctatgaagaaaaagatggtgcaccttatgtgctggacaaggactttaccggcaaacaacgctccactaaacctgttgcgggtccctttgaagtaagcggcagcgatccggtgaaaatcgtttatacgagagaaaaaagtaaattctgtagttttacaaattattag

SEQ ID NO: 32526 - protein, 501 aa, Unknown
  Obtained from environmental sample
  misc_feature (1)..(501): Xaa is any amino acid
MGHFHGEDPRNGNVEINVRPFVFWPEKNLINYITVKGFTLKQAATNWAPPTALQTGLIGPHWAKGWIIEDNIISDSKCSGISLGKEISTGQNEWYRLKFKQGTQREREVIFRAAKGNWNKETIGSHIVRNNIIFDCEQAGVVGHLGAVFSLIENNHIYRINYKRQFQGAEIGGIKLHAAIDTTIRENVIHDCYRGLWLDWQAQGTHVCRNIFWNNTQEDLFIEVTHGPYLIDHNLFLSPFNYREMSQGGAFVHNLFAGKLCTIPEMHRYTPYHFPHETEIMGVMTISGGDVRFYNNLFIGDKDVDLPNESVGIWSDAPVADLPLSPDALANMPTYIRKPLGTGQYDDYPSENEPAPWLPVPGKQLGGRTDAMFLPVYIKHNVYLKGAKPYIKEPDPVVSRQCGVEFEIDHVESKVTVKIADPSKIHCPTSEIITTEVLGKNHHTEMFYEEKDGAPYVLDKDFTGKQRSTKPVAGPFEVSGSDPVKIVYTREKSKFCSFTNY

SEQ ID NO: 32527 - DNA, 435 bp, Unknown
  Obtained from environmental sample
  misc_feature (1)..(435): n is a, c, g, or t
ttgtccagtttggcttccacgatgcggccgcgcgcggccttatcgggattggccttcagctccataatttccgcctgcaaggcgatgagttcgagcagttcatccagtccttgccgggttttggcggatacgtgcgctgtcacggtatcgcctccccaggactcggcttgcaggccgagatcggccagttcgcgcaggacgcgatccggatcggccgcgggcttgtcaattttgttcaccgccaccatgatgggcacgttcgcggctctggagtggttgatggcttcgcgggtctgttccatcaccccgtcgtcggcggccacgaccagcaccacgatatcggtcacctgggcgccgcgcgcgcgcatggcggtaaacgcctcatgtcccggcgtatccagaaacacgatgtcgccgcgcttggtcttgacatga

SEQ ID NO: 32528 - protein, 144 aa, Unknown
  Obtained from environmental sample
  SIGNAL (1)...(28)
  misc_feature (1)..(144): Xaa is any amino acid
MSSLASTMRPRAALSGLAFSSIISACKAMSSSSSSSPCRVLADTCAVTVSPPQDSACRPRSASSRRTRSGSAAGLSILFTATMMGTFAALEWLMASRVCSITPSSAATTSTTISVTWAPRARMAVNASCPGVSRNTMSPRLVLT

SEQ ID NO: 32529 - DNA, 423 bp, Unknown
  Obtained from environmental sample
  misc_feature (1)..(423): n is a, c, g, or t
atgaattttgcacagcaaatgtctgtgctcacacgcggagtgcaagaaattgttcctcaacatgaatttgccaaaaaaatccagaaatccatagatacaggcactgcgcttcgcattaagctgggggttgacccaactgcgccagatgtgcatttggggcacacggtggttatgcgcaaactgcggcagtttcaggatatggggcatcaggttattttgatagtgggggattataccgcgatgataggcgacccaagcgggcgcaacaaaacgcgcccacgccttagccacgagcaggttatggaaaacgccaaggaatatcaggagcagtttttcaagatagtgaaaaaagagcaaaccgaaattcgctataacggcgagtggcttggaaaaatgtcttttgataaatcgcagaacttatga

SEQ ID NO: 32530 - protein, 140 aa, Unknown
  Obtained from environmental sample
  misc_feature (1)..(140): Xaa is any amino acid
MNFAQQMSVLTRGVQEIVPQHEFAKKIQKSIDTGTALRIKLGVDPTAPDVHLGHTVVMRKLRQFQDMGHQVILIVGDYTAMIGDPSGRNKTRPRLSHEQVMENAKEYQEQFFKIVKKEQTEIRYNGEWLGKMSFDKSQNL

SEQ ID NO: 32531 - DNA, 1086 bp, Unknown
  Obtained from environmental sample
  misc_feature (1)..(1086): n is a, c, g, or t
gtgatctctgtggttaaaattttctttaaaaatgtaggtgaaaatatgtacaagtggtatgcgcttaagcgtattcttcgcggagtggtcatgtacgcccttctgatcctcctcttttccgtgctgtttaattcagtaaatgaagcgactcaaagatcgcagataaacgagcaggttaaaatggaatccatgcgtttatccaatttgcggccagagcaattaatggcatggagagccgatagagaggcgcaattgataagcctgtacaaactcgacaggccgtttggcgagcgcattatcttccgcactgtaaatatactgaccttcaaattcggaagatcaacacacataaaatcatcaaaaggcgatcagaatgtcctgactatcattctggaagcattgcccaagacaatgatgctatttaccacagccattgtatttgagcttatcataggaataacgctgggcctgttaaaggccagaaaacctggcggcaagctggacagatcgaccagttttataaccatggtagtgtacggcatgccgtcctggtggctgggcatgatgctaatacttttattcgtatatattttcaaattattcccgtccggcggcctggtatcaacccccacgccctcaggctttgccgggtttctggacaggatctggcacatgatcctgcctgtaacaacgcttgtcgtcatctctttctggagcctgtcgttcgttatacgtaatatcgtacttggagtgctgcaagaggattacatcatgagcgcgagggcgcgcggcataggcgagaaatccatcctgttcggccatacgcttcgtactgccgctcctcccatcgtaacaatggccttgttatcgcttttggtttccttttccggagcaattatttttgagggaattttttcatggccgggtttaggtaatctctactggattgccattcagcagaacgatgttccggttctaatgggcgatcttgccataacgacgggggtgtaccttacagggcttatattccttgatttgatatacggcttccttgatccgcgtatcaaagtcggaggcaaggcatga

SEQ ID NO: 32532 - protein, 361 aa, Unknown
  Obtained from environmental sample
  DOMAIN (134)...(357): Binding-protein-dependent transport system inner membrane component
  misc_feature (1)..(361): Xaa is any amino acid
MISVVKIFFKNVGENMYKWYALKRILRGVVMYALLILLFSVLFNSVNEATQRSQINEQVKMESMRLSNLRPEQLMAWRADREAQLISLYKLDRPFGERIIFRTVNILTFKFGRSTHIKSSKGDQNVLTIILEALPKTMMLFTTAIVFELIIGITLGLLKARKPGGKLDRSTSFITMVVYGMPSWWLGMMLILLFVYIFKLFPSGGLVSTPTPSGFAGFLDRIWHMILPVTTLVVISFWSLSFVIRNIVLGVLQEDYIMSARARGIGEKSILFGHTLRTAAPPIVTMALLSLLVSFSGAIIFEGIFSWPGLGNLYWIAIQQNDVPVLMGDLAITTGVYLTGLIFLDLIYGFLDPRIKVGGKA

SEQ ID NO: 32533 - DNA, 561 bp, Unknown
  Obtained from environmental sample
  misc_feature (1)..(561): n is a, c, g, or t
ttgtgtcaaaaatcatgttccngccagcatcaaggactttatactccggcggacgccattaagcgttacaatgcggctatagcttttattaaaaagtacggccacgcgctaatcggcaatggtccgtttatcatttccgaagtcaatacaacggcgaattccatcacaatggacgcctaccgcaattactaccagaagagcgactactggccgaattacttcaagcaggaaatcacaaggatcgaaaacgtaagggctccggcgaatccttcgcagtccagcgatgcggtctttgaaatcagcatttccagctttgtataccccgaagcggatacaaccccgttgaccaacaaaggcaaggtggagttaaggctccagcttccgaacggttccgaaaaggtgtataacgcgcaattcgccagaaacggccagttcacagggactattcccgcaagcgacatggcaaacctggctgcagggcagtcatacacagttgtaatcatgtcgtctatagccgatgaagccccgtctgttgcagtgtcggatttggttctgttttag

SEQ ID NO: 32534 - protein, 186 aa, Unknown
  Obtained from environmental sample
  misc_feature (1)..(186): Xaa is any amino acid
MCQKSCSXQHQGLYTPADAIKRYNAAIAFIKKYGHALIGNGPFIISEVNTTANSITMDAYRNYYQKSDYWPNYFKQEITRIENVRAPANPSQSSDAVFEISISSFVYPEADTTPLTNKGKVELRLQLPNGSEKVYNAQFARNGQFTGTIPASDMANLAAGQSYTVVIMSSIADEAPSVAVSDLVLF

SEQ ID NO: 32535 - DNA, 969 bp, Unknown
  Obtained from environmental sample
  misc_feature (1)..(969): n is a, c, g, or t
ttgggtaaagtggcagtaagcgccagaaaggacagctctttgcgcttttatgccgccgatcttggcgaacgcaagcggaccacccttgtaaaccttaaatttaaacgggaagaccgctgggccaactatatcaaagtcgcaatccatgtttttgcggaattgggcttcccggtaaaaggggcgaatttcaccattatcggaaatatccctcagcagatcgggctggcgtcttcttcggccatagaggttgcctcggcggttgctttgcggggattattacacgcaaaaaccggcgatatggatctcgcccttcgtctggcaaacgcccatcaggatatatttgggaaaccgggagatttagctgattatcttacggggcttacggcgcgaaatgaccagtttttgcttattgatgaacaaggcccttcggtaactaaaattaaatcgccttttagccgatgtaaaataatcattatggattcccgcgtaccccgtttcgggatcgacgcagaattggacgccaggcaggaggatattaaaaccgggttggtaatgctctcacagggccgcgaaggggcgagtttccgcgagtacgcggctatggatttagtggaatcactgggcaaccttcccgaagaaatacgccgcaggagtctgcatgttgtccaggagatccgccgggtatttggcgcaagggattatcttgtacgcggcgatttgccggatttttcacgcttggtcttcaactcccacgaaagcctgagggatctgtacgaagtaagctgccccgaaatcgactggatggtaaaacgggcgcaggaaaccataggcgtgtacggggcaaggatgacagggcagggttttggcggctgcacttatactataattaaaaacgagatggtcaatgaattcaaaaaaccgtctttgatgatacgagcggatattcngtttccgtcccgccatctatga

SEQ ID NO: 32536 - protein, 322 aa, Unknown
  Obtained from environmental sample
  DOMAIN (62)...(126): GHMP kinases N terminal domain
  misc_feature (1)..(322): Xaa is any amino acid
MGKVAVSARKDSSLRFYAADLGERKRTTLVNLKFKREDRWANYIKVAIHVFAELGFPVKGANFTIIGNIPQQIGLASSSAIEVASAVALRGLLHAKTGDMDLALRLANAHQDIFGKPGDLADYLTGLTARNDQFLLIDEQGPSVTKIKSPFSRCKIIIMDSRVPRFGIDAELDARQEDIKTGLVMLSQGREGASFREYAAMDLVESLGNLPEEIRRRSLHVVQEIRRVFGARDYLVRGDLPDFSRLVFNSHESLRDLYEVSCPEIDWMVKRAQETIGVYGARMTGQGFGGCTYTIIKNEMVNEFKKPSLMIRADIXFPSRHL

SEQ ID NO: 32537 - DNA, 1629 bp, Unknown
  Obtained from environmental sample
  misc_feature (1)..(1629): n is a, c, g, or t
atgaccgaatttgtccatctccatgttcattccgattattccctggcggacgccgcggtttcagtaatatcgctggcggacagggcggaagaattcggaatgacgcatcttgcccttacggaccacggtaatatgttcggcgcgatggattttataagcgcgtgcggtcataaaaagcgaaaaaaccccgtaaagccaataatcgggtgcgaggtttatgtttcaccctcttcgcgccatgaaaaaaaaggatctgagaacgaaaataaatattttcaccttgtccttctttcaaaaaccgtagaaggttattttaaccttgtaaaattatgctcgcttgcgtatacggaaggtttttattacaggcccaggatagatgaagaacttttatcaaaataccacgaaggacttatcgcgctttccgcctgcgcaagcggtgaaattccgcgtttaatacaggcaggaaaaattgatgaagcggaaaaaaaagccctttattaccgcgatctgttcggtaaagaccccgacggaagccctaatttttatcttgaaatacaggatcacggcattccttcgggaggcttaaggggaagcgaattgtcacaaaaggaaattaacgaagccgtagccgggatttccgggaaaacaggcattcctcttgtcgcaacaaatgacgttcattatttggaaaaagacgatttcgtttcgcatgacgttcttctttgcatagggacaggaaaagtacgaacggaggaaaaaagaaagaaatattacggtgatcagttttattttaagacaggcgacgagatggcggatattttctccggatatccgcaggccattgaaaatacggtaaaaatagcgcggcgatgcaacgctgatgtgccgaaaatagagactaaagatttaccgcagtatctccctgaatttaaaatcccggaaggttttaatgaaccaggtgaatacttaaagcatcttacagccgaaggtcttgaaaagcgttatgcgaaagtaaaagaaagcgatttaaacaaatgggaagaaataaataaaagagcggattttgaactgaatacgataatcagcatgggttatacgggatattttttgattgtttgggattttattaaatacgcaaaggagaataatattcccgtaggtcccgggcgcggttccggggcgggttccattgtcgcttactccctgcgtattaccgatattgatcccctgaaatacggactcatatttgagcgttttttaaacccagatcgtatttccatgcctgattttgacattgatttcgcgaatgagggacgcgaagaagtaataaattatgttacgcgcgcttatggaaaagaaagggtagcgcagatcatcacattcggaacattgggcgcaaaagcggttatcaaggatgtggcaagagtattgggaatatcaattccggaatcggaaatgataacaaaacttatttcgtttgatcctgaaatgactttggataaagcgaaagaagaggagccgcgtcttcgggaactggaaagcgatccgcgttttacggaattgtttgccatcgcgcataaattggaggggcttaaccgtcattcaagtatacacgccgcgggtatgtaa

SEQ ID NO: 32538 - protein, 542 aa, Unknown
  Obtained from environmental sample
  DOMAIN (262)...(542): Bacterial DNA polymerase III alpha subunit
  misc_feature (1)..(542): Xaa is any amino acid
MTEFVHLHVHSDYSLADAAVSVISLADRAEEFGMTHLALTDHGNMFGAMDFISACGHKKRKNPVKPIIGCEVYVSPSSRHEKKGSENENKYFHLVLLSKTVEGYFNLVKLCSLAYTEGFYYRPRIDEELLSKYHEGLIALSACASGEIPRLIQAGKIDEAEKKALYYRDLFGKDPDGSPNFYLEIQDHGIPSGGLRGSELSQKEINEAVAGISGKTGIPLVATNDVHYLEKDDFVSHDVLLCIGTGKVRTEEKRKKYYGDQFYFKTGDEMADIFSGYPQAIENTVKIARRCNADVPKIETKDLPQYLPEFKIPEGFNEPGEYLKHLTAEGLEKRYAKVKESDLNKWEEINKRADFELNTIISMGYTGYFLIVWDFIKYAKENNIPVGPGRGSGAGSIVAYSLRITDIDPLKYGLIFERFLNPDRISMPDFDIDFANEGREEVINYVTRAYGKERVAQIITFGTLGAKAVIKDVARVLGISIPESEMITKLISFDPEMTLDKAKEEEPRLRELESDPRFTELFAIAHKLEGLNRHSSIHAAGM

SEQ ID NO: 32539 - DNA, 405 bp, Unknown
  Obtained from environmental sample
  misc_feature (1)..(405): n is a, c, g, or t
atgagagtgagtaagcatcaaataatatttggagctaatcattttataagcaaaattccttatgattgtccatgctgggtaatatggaataagttattttctgaaaacgtgtcttttgcatcttccgaacttgcatggactagtttttcaacagcgtctatacaaataacgctctcctcgcatcagattaaccgtattcatcctacgcaaaaacctgtagccctgtctaaatggtgtttatctagatacgccaatcaaggcgataaaattttagacacccatttcggtagcggttcaattgatgttgcgtgtaacgaacttggctgtgagctaagtgcaagtgaaataaatgaagtatattttaacgtggcatgcaaaggaataaagggggctctaaaacaatga

SEQ ID NO: 32540 - protein, 134 aa, Unknown
  Obtained from environmental sample
  misc_feature (1)..(134): Xaa is any amino acid
MRVSKHQIIFGANHFISKIPYDCPCWVIWNKLFSENVSFASSELAWTSFSTASIQITLSSHQINRIHPTQKPVALSKWCLSRYANQGDKILDTHFGSGSIDVACNELGCELSASEINEVYFNVACKGIKGALKQ

SEQ ID NO: 32541 - DNA, 1248 bp, Unknown
  Obtained from environmental sample
  misc_feature (1)..(1248): n is a, c, g, or t
ttgtcgagccatgaaaccctgacgggcatggcggatgaacgcttaaggaggcatactatgcaatatggtttttttgacgacaacgcgagggaatatgtaattacccggcccgatacgccctatccctggattaactatcttggctgcgaggatttcttcgggcttttttccaacacgtcgggcggctattgtttttaccgcgacgcgcggatgctcaggctgacgcgctaccgctacaacaacgtccccgccgacgcgggggggcgttatttttacctgcgcgacagcgccacaggcgacgtgtggactccctcgtggatgccgatgaaatcaacgcttgaccgctacgaatgcaggcacgggatgggctattcgcgcatttcatccgcgcgaaacggacttgctttttctcaaacctcgtttgtaccgctaaaagacaactgcgaaattcacaagatcgtgctgacaaacgaatccaaggctgataaggatgtggatgttttttcttttatcgaattctgtttatggaatgccaatgacgacatgacgaactttcagcgcaacttcagcatcggcgaggttgaagtagaagcgaatggagcgcgtatctaccacaaaacagagtaccgtgagcgccgcaaccattatgcgctatgggcagtcaatgtcccggtcgccggttttgataccgaccgtcaaaccttcctgggtttgtacaatggctttgatcatcctgataccgtatttgccggaaaagcgaataactccgtagcttcaggctgggcgccgattggctctcaccatgtcaaagcgcatctaaagcctggcgaatcaaaggcgctggtgttcgtgctgggttactgcgagaacccggacgataaaaagtgggataagcccggcgttatcaacaaagcgccggctaacgcgctgtttgataaatacggctcgcctgaagctgcggacaaggcgcttgccgcgttaaaggattactgggacgctcttttgggacggttcagcgtggaggctgaagacaaacgcatggcgcgtatggcgggagtgtggaaccagtatcaatgcatggttacgtttaatatgtcgcgcagcgcgtcttattttgaatccggtatagggcgcggcatgggcttccgcgattctaatcaggaccttttgggctttgtgcatcttgtgccggaacgcgcccgcgcccgtttcggacatgcggccacgcagttccgacggccgcaataa

SEQ ID NO: 32542 - protein, 415 aa, Unknown
  Obtained from environmental sample
  DOMAIN (20)...(83): Putative carbohydrate binding domain
  misc_feature (1)..(415): Xaa is any amino acid
MSSHETLTGMADERLRRHTMQYGFFDDNAREYVITRPDTPYPWINYLGCEDFFGLFSNTSGGYCFYRDARMLRLTRYRYNNVPADAGGRYFYLRDSATGDVWTPSWMPMKSTLDRYECRHGMGYSRISSARNGLAFSQTSFVPLKDNCEIHKIVLTNESKADKDVDVFSFIEFCLWNANDDMTNFQRNFSIGEVEVEANGARIYHKTEYRERRNHYALWAVNVPVAGFDTDRQTFLGLYNGFDHPDTVFAGKANNSVASGWAPIGSHHVKAHLKPGESKALVFVLGYCENPDDKKWDKPGVINKAPANALFDKYGSPEAADKALAALKDYWDALLGRFSVEAEDKRMARMAGVWNQYQCMVTFNMSRSASYFESGIGRGMGFRDSNQDLLGFVHLVPERARARFGHAATQFRRPQ

SEQ ID NO: 32543 - DNA, 1218 bp, Unknown
  Obtained from environmental sample
  misc_feature (1)..(1218): n is a, c, g, or t
ttgaaagaaatatcggaaatgcttaaaaccgatgccaaactgccgttattgattgactgcttgaattgcgaaaaaggctgtatcggcggacccggcacggggaacgccgaaaaaccgcttgctgtacttaaagaacctgtacaaaaacgcatggctgaactggaagaaaaacaacattctaaaatcggaaataacgaatacaaaaaataccaccatgttttgagaaagtattggaagaaaaaactatataaccggagctaccgcaatctttccgagaacaatacaatcaaacatccgagcgaagctgaaataactgaaatttttcacagcatgaaaaaattccaaaaggaagatatatacaactgtacctgctgcggttacggaagctgtaaagcgatggcaacagcaatttacaacaaactgaacaaacctgaaaattgcgcccattatattcttgccttgctcacggaaaaaaccaataccgaagaacttaaccgtcagcttcaggagcgcattgcccaggcgtcaactcttattgacggaataaacaaattaataaataaactgaatgccgctatcagttcacaagcggaaacaatcgctcaatcttcgacggcaaccgaaaaaatgatcgactctctcagagaaacttctgaaatttcccgaaacaaacaggtggcgataaaagggttgatagaagacaccgccctaagccagacatccatgcgggagacgattctatcaattgagggtatttccaaatcagtggaaggcatatcgcaggctattaaaataatcagcgcgatagcggccaacaccaatttattgtctatgaacgcggcgatagaatccgcgcacgcgggcgaagcgggcaggggcttttcggtagttgccggagaaatacgcaaactttcggaaagcaccagagaaaattcggtgaacatttccaagacgctgaaaagcatcattgacggagtagttgttaccgaaaaaaaatcggacgacaccggaacgcggattaccgcaatggcaaaagaaatcgacagtttcgccgaaaccatgtccggaataatcaataccttcagcgaactgtcggcgcaaagcggtgaaattaccaacgcgctggataaccttcaaagtcaaagcgaaatggtaaaatccgactacgccgaaatactgtcaatgacggaaaagctcagcaaggcatctcggcgataa

SEQ ID NO: 32544 - protein, 405 aa, Unknown
  Obtained from environmental sample
  DOMAIN (194)...(401): Methyl-accepting chemotaxis protein (MCP) signaling domain
  misc_feature (1)..(405): Xaa is any amino acid
MKEISEMLKTDAKLPLLIDCLNCEKGCIGGPGTGNAEKPLAVLKEPVQKRMAELEEKQHSKIGNNEYKKYHHVLRKYWKKKLYNRSYRNLSENNTIKHPSEAEITEIFHSMKKFQKEDIYNCTCCGYGSCKAMATAIYNKLNKPENCAHYILALLTEKTNTEELNRQLQERIAQASTLIDGINKLINKLNAAISSQAETIAQSSTATEKMIDSLRETSEISRNKQVAIKGLIEDTALSQTSMRETILSIEGISKSVEGISQAIKIISAIAANTNLLSMNAAIESAHAGEAGRGFSVVAGEIRKLSESTRENSVNISKTLKSIIDGVVVTEKKSDDTGTRITAMAKEIDSFAETMSGIINTFSELSAQSGEITNALDNLQSQSEMVKSDYAEILSMTEKLSKASRR

SEQ ID NO: 32545 - DNA, 318 bp, Unknown
  Obtained from environmental sample
  misc_feature (1)..(318): n is a, c, g, or t
atgtccggaggcaaccagcagaaggccattatcgcgcgggaaatttcacgtaactcgcgccttttaatcgctgttcagccgacaagagggcttgatgtaggcgctattgagtatatacacaaacagcttgtcgccgagcggacaaaaggaaagggagttctgcttgtctcccttgaattggacgaagtaatggatatcagcgaccgaatcctcgttatttttgaaggaagacttgtcgccgatgtcaggccgaaagatgtaacgttcaaggaattgggactttacatggccggttctgcaaaacaggatgccgcatga

SEQ ID NO: 32546 - protein, 105 aa, Unknown
  Obtained from environmental sample
  misc_feature (1)..(105): Xaa is any amino acid
MSGGNQQKAIIAREISRNSRLLIAVQPTRGLDVGAIEYIHKQLVAERTKGKGVLLVSLELDEVMDISDRILVIFEGRLVADVRPKDVTFKELGLYMAGSAKQDAA

SEQ ID NO: 32547 - DNA, 855 bp, Unknown
  Obtained from environmental sample
  misc_feature (1)..(855): n is a, c, g, or t
atgattaattttaaattttcagattcatcggttaacgctctttcttcggttaccgctgtttttgccggacttcttgctggtcttgtaattcttcttttgactaacgcttctcaggcttttcacggattttgggcgattctttcaggcggtttcagctccatgaaagagcttgggcaggttttgtactttgctactcctattatactgaccggtctttctgtcggctttgcgtcaaaaacagggctttttaatatcggggcggcaggccagtttattgtcggcgcgtatacggctgtccttatcggagtaaaatgcagttttattcccggtcatcttctctggattaccgcgcttttagcggccatgctcgccggagcgatctggggcgctattcccggcatatttaaagcgttgttcaatgtaaatgaagtaattgcctgtattatgacaaattacataggcactttgctagtaaattatcttataacaaaaacaatctttgacgctctgaggaatcaaagtatgcgcgttgtgaaagctgcaaaccttcctaaaatgggaatggataatgttttcaaagacgggtttataacttcgagcgcgaactcgggtatttttattgcgatcatctttgccgtattgatttacatcatccttgaaaaaaccgcttttggatatgaactgaaagcatgcggacttaacagagaggccgcccgttacgccggtataaatgaaaagagaagcattattctttcaatgacgattgccggcgctcttgccggaataggcggagcgttattgtaccttgcaggttcaggcaaaggaatcaccgtgttgattgtggtcctgtcataa

SEQ ID NO: 32548 - protein, 284 aa, Unknown
  Obtained from environmental sample
  SIGNAL (1)...(22)
  DOMAIN (56)...(283): Branched-chain amino acid transport system / permease component
  misc_feature (1)..(284): Xaa is any amino acid
MINFKFSDSSVNALSSVTAVFAGLLAGLVILLLTNASQAFHGFWAILSGGFSSMKELGQVLYFATPIILTGLSVGFASKTGLFNIGAAGQFIVGAYTAVLIGVKCSFIPGHLLWITALLAAMLAGAIWGAIPGIFKALFNVNEVIACIMTNYIGTLLVNYLITKTIFDALRNQSMRVVKAANLPKMGMDNVFKDGFITSSANSGIFIAIIFAVLIYIILEKTAFGYELKACGLNREAARYAGINEKRSIILSMTIAGALAGIGGALLYLAGSGKGITVLIVVLS

SEQ ID NO: 32549 - DNA, 936 bp, Unknown
  Obtained from environmental sample
  misc_feature (1)..(936): n is a, c, g, or t
atgccgggtatggcgttggctgtggcgcagaggcaggttaaggatttaattgttctttctcccgatattcaggcttatcaggttatgaacagtgaactggagaaggtggcggaacgatatgccccggtttgggaaaatgataagatgggaaatttatttttggacataacgggtacttcaagaatattcggtcctcccgccgattgttcaagccggatactgcgggaaattaatgagcaagcgggaataaaacccgccgccgcggttgcgtctaacaaacttgtgtctaaggttgcgacaagaaccattagaccgatgggattgatacagatatataacggaacggaagcggaatttttatcccatcaggatatacggattttgcccggcatggggcaaaaacttttacggacggcttccatcgttggaatgagggaaattggggaaattgccgctctttcggtaagccaagccattgccctgtttggcaaacaagggccgctgttacgaagtatggcgcaaggtattgacggctcccgtgttgtggaaagaaaagaagacaggcggataacccaacaggcggattttaacgaggacgtaatagacgaaaccgcaattaaggccgcgattgaaagtcttgccgaacacggcggacttgaaatgaggaatgagaaattaggaatgaggaatttatcggtggtcgttatctatgctgacggcgtgagggtggaggggcgggaacaggtaaagcgtcctctggtaacggacggcgaaataatgacggcggcttttaggctttataaaaagacggcagaccgccgtatacggatacgctcaatcggtattagttttgaaaatttggttcctttgggtttccagcctgatttatttgaacctgaaacggaaacggcgaacagaaattacaggaagcggtag

SEQ ID NO: 32550 - protein, 311 aa, Unknown
  Obtained from environmental sample
  DOMAIN (1)...(289): impB/mucB/samB family
  misc_feature (1)..(311): Xaa is any amino acid
MPGMALAVAQRQVKDLIVLSPDIQAYQVMNSELEKVAERYAPVWENDKMGNLFLDITGTSRIFGPPADCSSRILREINEQAGIKPAAAVASNKLVSKVATRTIRPMGLIQIYNGTEAEFLSHQDIRILPGMGQKLLRTASIVGMREIGEIAALSVSQAIALFGKQGPLLRSMAQGIDGSRVVERKEDRRITQQADFNEDVIDETAIKAAIESLAEHGGLEMRNEKLGMRNLSVVVIYADGVRVEGREQVKRPLVTDGEIMTAAFRLYKKTADRRIRIRSIGISFENLVPLGFQPDLFEPETETANRNYRKR

SEQ ID NO: 32551 - DNA, 894 bp, Unknown
  Obtained from environmental sample
  misc_feature (1)..(894): n is a, c, g, or t
ttgaactatttgactacagagggaaaaaagcggccctccttgaattggtttttacgctccagggggcaggccgcatgtcaggctgggccctctgccttgaacttgcccagccaaacccaacgcctgcgaataacgcttcggcttcaaaacccctgcttttggcaatggcctatggcccggcagctaaacagggacttgaggcattgcatttttccgcccttgactccattatcccggaagaaggggacaggcttgccccccggcccaatcacggagtttgcctatccaagggaaacgcgaataaagaccccggtctttgcccttgattgcgaagcctggatttttgaggaagacgccgaagcggcccaggcccttgtcgacagggagtttctggttttgcgccgttaccaaaattcgcccagatggaaggaagcgtggattcggttttaccgggcaatttaccgcgattcatttgaaaggctcaccgacattgcctttcaggtggaacgcaagcttaacgttccccctcgggaaaaccgggactttgccaaccaggcgctaaagtgggttcagtcgtttaactacgagcgggatttatttggcagcgattttattaaccttgtcagctccgccaccgaaggaaggggcgattgcgataacagggccatgctttgggcgatcatcttaaagcaggcctgcattccctcggcgataatggtttcgcgcaactacagccacgccatgggccttgccgaccttcccggcacaggcgcccgttttacgctgaacgggcataaactcctcgtcgccgaaacaaccgccgatgtttccatcggcctgataaacgaggcaaccagcgaaatcaatgaatggcttggcataccatttgaatga

SEQ ID NO: 32552 - protein, 297 aa, Unknown
  Obtained from environmental sample
  misc_feature (1)..(297): Xaa is any amino acid
MNYLTTEGKKRPSLNWFLRSRGQAACQAGPSALNLPSQTQRLRITLRLQNPCFWQWPMARQLNRDLRHCIFPPLTPLSRKKGTGLPPGPITEFAYPRETRIKTPVFALDCEAWIFEEDAEAAQALVDREFLVLRRYQNSPRWKEAWIRFYRAIYRDSFERLTDIAFQVERKLNVPPRENRDFANQALKWVQSFNYERDLFGSDFINLVSSATEGRGDCDNRAMLWAIILKQACIPSAIMVSRNYSHAMGLADLPGTGARFTLNGHKLLVAETTADVSIGLINEATSEINEWLGIPFE

SEQ ID NO: 32553 - DNA, 465 bp, Unknown
  Obtained from environmental sample
  misc_feature (1)..(465): n is a, c, g, or t
ttgatgagctttttgtttttcggtattcctgttctggatacccagaatgccaatttgatacggatttgcagcaatttgcgtatggcttgcaacaaaggcgtggaagcaaaaaatggccgttttcaaagggctgttcatgaagcggcagattatgcgcgataccatttcagcactgaggaaaagctgatgtcaattttggaataccccgcctttgatgaccataaaagagagcacgaaggattcatttgggaagtttttagccgtttaaagcaatttcaggagggagaagagcttctccctgaaaaattagtctactttctcagcgaatggataaagaaccatattggggcttatgacagggagtttgccgattatttcctttcaatgaagcaccacggcaaactaaagctgatccttagcgggcggccgcttttaacgacaaattctgctatagtaatgcaatga

SEQ ID NO: 32554 - protein, 154 aa, Unknown
  Obtained from environmental sample
  misc_feature (1)..(154): Xaa is any amino acid
MMSFLFFGIPVLDTQNANLIRICSNLRMACNKGVEAKNGRFQRAVHEAADYARYHFSTEEKLMSILEYPAFDDHKREHEGFIWEVFSRLKQFQEGEELLPEKLVYFLSEWIKNHIGAYDREFADYFLSMKHHGKLKLILSGRPLLTTNSAIVMQ

SEQ ID NO: 32555 - DNA, 1155 bp, Unknown
  Obtained from environmental sample
  misc_feature (1)..(1155): n is a, c, g, or t
atgaacgaggatgccgatcaaaggcattattttgactgggctgctacagcaattccggagaaaagttttcctgctgaaggcatacccttcggcaacccttcttccgcccatgcggaaggccgcctggcgaaagaggcgctggagagcgcccgctttcgctgtgcgcgggttttgggagtagaagctgaaaaactctatttcacttccgggggaacagaatcaaatgcccttgtaatccactctttactgcttcgaaaagggcagggcaggctcctttattcgggggttgagcatccgtctgtacgggaaaactgccaattgctgggaagcctgggtctgcctgtaagcgtcatcggggttgaaaaagacggcagggtcagcgccgataccttgtctgctgcgcttcggaagcacgctgacagccgctttgcggcaataatgggcgtaaataacgagatcggcgctcaaatggacattgacagccttgtttctgcggtcagaaaaaaccaggagaaaaccggtctccctgttcattttcactgcgatctggttcaagctctgggcaaggttccggtcaatatcggcgacgtggattcggcttcgttcagtgcccataagctgggcggcgtgcggggcatcgggcttttatacctcaagaaaaaggtgaactgcctttatgccgggggccaccaggaaggcggcataaggccggggactgaaaacacccagggggctttggccctggcggaaattcttgagctaagggccaagcctgaaactgtgaaagaagaaaacgaaaaggcaagagagcggttcaagtacctcatagggagattgagaaaaataagccgcagtgctttaatccccgaagacagggaagacgacgatccccgtttttcgccctggattgttcaggtgaggtttagcgacgtgcctgggcctgtaatggtcagggcgctggaccaggaagggatcgccgtttccaccgggtcggcctgttcctcaaactcgcccgaaaggccggtgcttcaggcaatgggcctggatgtaaaggccaggctcgagggcataagaatttcgcagggctggtctacggccatggccgatttggacgcccttttggcagggatcgaaaaagcgctctcttttctataa

SEQ ID NO: 32556 - protein, 384 aa, Unknown
  Obtained from environmental sample
  DOMAIN (9)...(304): Pyridoxal-dependent decarboxylase conserved domain
  misc_feature (1)..(384): Xaa is any amino acid
MNEDADQRHYFDWAATAIPEKSFPAEGIPFGNPSSAHAEGRLAKEALESARFRCARVLGVEAEKLYFTSGGTESNALVIHSLLLRKGQGRLLYSGVEHPSVRENCQLLGSLGLPVSVIGVEKDGRVSADTLSAALRKHADSRFAAIMGVNNEIGAQMDIDSLVSAVRKNQEKTGLPVHFHCDLVQALGKVPVNIGDVDSASFSAHKLGGVRGIGLLYLKKKVNCLYAGGHQEGGIRPGTENTQGALALAEILELRAKPETVKEENEKARERFKYLIGRLRKISRSALIPEDREDDDPRFSPWIVQVRFSDVPGPVMVRALDQEGIAVSTGSACSSNSPERPVLQAMGLDVKARLEGIRISQGWSTAMADLDALLAGIEKALSFL

SEQ ID NO: 32557 - DNA, 582 bp, Unknown
  Obtained from environmental sample
  misc_feature (1)..(582): n is a, c, g, or t
atggcaatctccataggcgaagatgtctgcacaggttcaatcagatcaacaagaggatacaatattcaaattttatttgaacaatgcggaagtctttttatcgactgcgggggacatcaggcggcgggcggtttcagtatggttatggaaaactgggacgcttttatggaaaagttaaaaaaagcggtagacgcaattgaatttgccgaacagcctgacgaggaaattttaaacattgacgcggaactgccgcacgattatctttctcccgatgttttaaaattagttgacaagtttgagccctacggcaatgaaaacgaccctcttatttttatgacaaaaaaaatcaccgtaaaagaaataaattttatcggcaaacccgacgcaaaacatgtaaagatgatgttggacgcgggaaaatataaatggcctgctctttactggcaaagcgcggatcgcgtaacaaacaaggaattcggcgttaacgacaaagttgatatagcttttaatctcacccgcgattattttaaaggaaatgaaacgccgcaaataatgattttggatttaaagagaagcgagtag

SEQ ID NO: 32558 - protein, 193 aa, Unknown
  Obtained from environmental sample
  misc_feature (1)..(193): Xaa is any amino acid
MAISIGEDVCTGSIRSTRGYNIQILFEQCGSLFIDCGGHQAAGGFSMVMENWDAFMEKLKKAVDAIEFAEQPDEEILNIDAELPHDYLSPDVLKLVDKFEPYGNENDPLIFMTKKITVKEINFIGKPDAKHVKMMLDAGKYKWPALYWQSADRVTNKEFGVNDKVDIAFNLTRDYFKGNETPQIMILDLKRSE

SEQ ID NO: 32559 - DNA, 411 bp, Unknown
  Obtained from environmental sample
  misc_feature (1)..(411): n is a, c, g, or t
atggaaagcggcgttgaagctgtgctggaggaagcatccatcatcctgcgcctgcctgaagaagcgatctttgcgccgggggccgaacagattctgccgacaggcttccctgcgctgaatcaactgggggaactctttcttcttcagcctcagcaaacgatcaacatccgggggcatacggacgacagccccctgcctccgggatcgcgctacagggacaacggggagttttccgctctgcgggccgtgcagattttgcggcatatgctcgcgcgggggattgagccgtggcgtgtgaccgctgcgggcttcggcgcgcttgaacccctcttcccaaacacgacggaaatgaaccgcgcgaaaaaccggcgcatcgaatttgtgctggaaagacgcttgggaaaagaataa

SEQ ID NO: 32560 - protein, 136 aa, Unknown
  Obtained from environmental sample
  DOMAIN (23)...(123): OmpA family
  misc_feature (1)..(136): Xaa is any amino acid
MESGVEAVLEEASIILRLPEEAIFAPGAEQILPTGFPALNQLGELFLLQPQQTINIRGHTDDSPLPPGSRYRDNGEFSALRAVQILRHMLARGIEPWRVTAAGFGALEPLFPNTTEMNRAKNRRIEFVLERRLGKE

SEQ ID NO: 32561 - DNA, 597 bp, Unknown
  Obtained from environmental sample
  misc_feature (1)..(597): n is a, c, g, or t
ttgtgctggaaagacgcttgggaaaagaataaaaaaacggcagcccttggagtatccaccatgccggagtacagcagctatgccacgctggattttttcatcgcgttgaattcgccgcgtgaacggggacgctacagggttgtcgcggagggtctggctttgtacctggaggatatggcggaaaagttcgatatccacgattgcagttccgccggttgcagcctgcatgccccggcgaagctgtttaccgtgggcaaaatttttgacggcgacctgcatgtcggcaactccggctatcttgcgggtctcaagagcaaggtggtccggcatattgccgacaacagcgttgcctgcgcctttcagtccttgacccgccggcaggaaatcatgctggacaagctgctgctcgaaatgcaaaaacgcagtatcgcaaccccaggcaacgcagagaaaagggaaacacagatggcggcacatgctcctgtaacgcaacacaaagtcctggtggcgaacagaggcgaaatcgccgtgcgaatcgtcaatgcctgccacaacctcgcgcttgccttttgtctgtatctatacccaggaagatga

SEQ ID NO: 32562 - protein, 198 aa, Unknown
  Obtained from environmental sample
  DOMAIN (38)...(137): PilZ domain
  misc_feature (1)..(198): Xaa is any amino acid
MCWKDAWEKNKKTAALGVSTMPEYSSYATLDFFIALNSPRERGRYRVVAEGLALYLEDMAEKFDIHDCSSAGCSLHAPAKLFTVGKIFDGDLHVGNSGYLAGLKSKVVRHIADNSVACAFQSLTRRQEIMLDKLLLEMQKRSIATPGNAEKRETQMAAHAPVTQHKVLVANRGEIAVRIVNACHNLALAFCLYLYPGR

SEQ ID NO: 32563 - DNA, 834 bp, Unknown
  Obtained from environmental sample
  misc_feature (1)..(834): n is a, c, g, or t
gtgtttcgccgcatccgcagctatgccctgcgccagttcaaggatgacggcgtgctgattgaacagcgcatcacggacttcaaccatctggaagtgcagattgtatgcgatcgccagggacgcaaccccgtgcatttcggcacccgcaactgctctgtgcagtccacagggctgcaaaaacgcattgaagtcgcgccgggctttgatccttcttccctctcctattcctttgacgcggccaaggttctggaagacatcaccgaacactcgctgaccatggcccgcaaggtgggctacgacaatgtgggaacctgggaatggatagtcacccgcaagggggatcccttcctgatggaggtcaacacccgcatccaggtggaaaacggcgtgtccgcccgcatcgccagggtacatggagaagagatcgatctgatcgccgagcaaatccgtatcggccttggcgaggcgctcggctacaggcagcaggatatcgcctttgacggcacggccatagaatatcgcctgattgccgaagaccccgacaacggattcgccccctgggtagggcgcattgacgcctttgcctggaaggcggctccctggctgtacctgcatacgcatgtgccgaccgatacggcgtaccggattcctacggaattcgaccccaatctggccctcgccgtcatctggggaaaaaatcttgaagaggccaaacgccggggcctggagtttctgcgaaccctcaccctcaccgggcaaaatcctgccggcgaggaactaaagtccaatgtggctttcctcagcgccaacacggaacgcctcctgcgcttctaa

SEQ ID NO: 32564 - protein, 277 aa, Unknown
  Obtained from environmental sample
  DOMAIN (1)...(165): Carbamoyl-phosphate synthase L chain, ATP binding domain
  misc_feature (1)..(277): Xaa is any amino acid
MFRRIRSYALRQFKDDGVLIEQRITDFNHLEVQIVCDRQGRNPVHFGTRNCSVQSTGLQKRIEVAPGFDPSSLSYSFDAAKVLEDITEHSLTMARKVGYDNVGTWEWIVTRKGDPFLMEVNTRIQVENGVSARIARVHGEEIDLIAEQIRIGLGEALGYRQQDIAFDGTAIEYRLIAEDPDNGFAPWVGRIDAFAWKAAPWLYLHTHVPTDTAYRIPTEFDPNLALAVIWGKNLEEAKRRGLEFLRTLTLTGQNPAGEELKSNVAFLSANTERLLRF

SEQ ID NO: 32565 - DNA, 465 bp, Unknown
  Obtained from environmental sample
  misc_feature (1)..(465): n is a, c, g, or t
atgaagcataaaagaggatttaaccccctgaacagaatggcgtctcatcgtaaagcgctgcatcgtaatatggtgacgtctctttttaagcaggagaggattagaacgacaaaggcgaaggcacttgaagtgcgcagaactgcggagaaaatgattacccgcgcgaaggaagatacggtacataaccgccgtattgtttcaggtcgtttgtataacgagggtattgtcgtaaaactttttacggttatcgctcccagaatgaaagaccgcaacggcggatacacccgtattattaaattgggcgagcgcaaaggcgacgccgcagagcttgtcattttagagttggttgattataaattggataccaccgaaaaaaagaaagcgaagaagggcgaggaaaagaccgctgattcaaagcccgcgaaagaaagcaagcccgccaaagacggaaagaaggggaaataa

SEQ ID NO: 32566 - protein, 154 aa, Unknown
  Obtained from environmental sample
  DOMAIN (20)...(116): Ribosomal protein L17
  misc_feature (1)..(154): Xaa is any amino acid
MKHKRGFNPLNRMASHRKALHRNMVTSLFKQERIRTTKAKALEVRRTAEKMITRAKEDTVHNRRIVSGRLYNEGIVVKLFTVIAPRMKDRNGGYTRIIKLGERKGDAAELVILELVDYKLDTTEKKKAKKGEEKTADSKPAKESKPAKDGKKGK

SEQ ID NO: 32567 - DNA, 1056 bp, Unknown
  Obtained from environmental sample
  misc_feature (1)..(1056): n is a, c, g, or t
atggcccgtaagaatctgcttcagggattcaagcgccccaaaggtattacctttgagcatggcgatctaaaaccgaattacggtaagtttattgccgctccgtttcagcccgggttcggtacaaccgtgggcaataccttgcggcgtgttctgctttcatcaatacaggggtacgccattacggctgttaagattacttcttatgatgcaaacggaaatgcccatacggtatccagcgaatttgaaagtattcccaatattgtggaagatacccttgaggtaatcaacaaccttaagcagatccgtctccgtcttcccggaggtatggaacagatcgttttggcctatgaatggtcgggaaagcataatgttaaaagcgatgattttgaaaaagaaggtcaggtagaggtactcagtaccaaccgccatgtgatgaccctgatggacaacgctcgtgtggagtttgaggttcaaatcgatcttggccggggttatgtgccttcggaagttaacgtacagtatgtggatgtgattggtaccataccgctggatgccatattttctcctgttaaaaaggttaagtatgcggtggaaccaaccagagtagggcagagaagcgactacgataaactggtactggaagtctggacagacggaacaattaagcccgacgacgcattggcggaagccgcaaagatagccaaagatcatttttccgtatttattaattttgatgaaagcaacatcggtcttgacgatgatcttgacgatgaaaacgatcacattagaaaagttcttaatactcctgttgaggaattagagctttcggttcgttcttcaaattgtttgaagaacgcgaatataaagacaataggggagcttacgcgcaaaacagaggacgacattgccagaactcgtaatttcggcaaaaaatcgttacaggaaatcaaggagaaacttaaagagtggaacttgagtcttggaataaccgatttaaatgttctgaaaaacgctcgtatggaacccaaggtaaaggatacggaagatgaagcataa

SEQ ID NO: 32568 - protein, 351 aa, Unknown
  Obtained from environmental sample
  DOMAIN (73)...(188): RNA polymerase Rpb3/RpoA insert domain
  misc_feature (1)..(351): Xaa is any amino acid
MARKNLLQGFKRPKGITFEHGDLKPNYGKFIAAPFQPGFGTTVGNTLRRVLLSSIQGYAITAVKITSYDANGNAHTVSSEFESIPNIVEDTLEVINNLKQIRLRLPGGMEQIVLAYEWSGKHNVKSDDFEKEGQVEVLSTNRHVMTLMDNARVEFEVQIDLGRGYVPSEVNVQYVDVIGTIPLDAIFSPVKKVKYAVEPTRVGQRSDYDKLVLEVWTDGTIKPDDALAEAAKIAKDHFSVFINFDESNIGLDDDLDDENDHIRKVLNTPVEELELSVRSSNCLKNANIKTIGELTRKTEDDIARTRNFGKKSLQEIKEKLKEWNLSLGITDLNVLKNARMEPKVKDTEDEA

SEQ ID NO: 32569 - DNA, 1143 bp, Unknown
  Obtained from environmental sample
  misc_feature (1)..(1143): n is a, c, g, or t
ttgtattgtcaatggtcaattaccgccngcttttataaaatttcattgtacttgtttctcgctacaatgatccctctggtgtatacccttctttttggccgtatggcttacggtacgcgctggctgagaataggttcctttggattacaggcgtccgaatttgcaaaaatcactaccatactttttctggcgcgttacctttccgataccaggctgagtggtaattcctttatccggtttcttgtatcctgtgtgattgtatttgtgccaatggggatcgtgtttgtacaacccgatctgggtaccgcgctcgtgtttatcccgattcttctttccatgacgtatatagccggtatatcaatgcgctatatagtttttttggcatcctgtattctcctgaccggttttctgacggttctgccgctttggcagacgtatattttacgcaggtctctgtctaccctgcagttgctgaccaatcctcgtcttattttgattgccattcttgccctgagccttattatcggcattgcgctttttgggtttcttaaatataagaagcggtatttcttctggatagtgtatggttttacgatagctgttttttcgttaggcgcttcatacgccgcccgcatactgctgaagaattatcagatcatgaggcttattgtgtttcttgatccggagatagatcctcggggagcgggttggcatattatacaatccatcacggccattggttcgggagggcttgcggngcagggttatttgaagggaacacagagtcattaccgcttcctacccgaacagagtaccgactttatcttttcgattttttccgaggagacgggctttatcggcggaataggggtatttatcctgttcctgatcatctgcctgaaagatttgcagataataaaaataacttctgacccctttgcttcgtatatctgcgccggtctggtaggcatgttcagctttcacttcattattaacgtgggcatgaccatgggcattatgccgattacgggtattcncctgctgtttatatcttacggcggctccgccatgttctcggcgatgataggaatagggcttgcgctgagcatacacatcagaaggtatattccccccgcgttatga

SEQ ID NO: 32570 - protein, 380 aa, Unknown
  Obtained from environmental sample
  DOMAIN (1)...(376): Cell cycle protein
  misc_feature (1)..(380): Xaa is any amino acid
MYCQWSITAXFYKISLYLFLATMIPLVYTLLFGRMAYGTRWLRIGSFGLQASEFAKITTILFLARYLSDTRLSGNSFIRFLVSCVIVFVPMGIVFVQPDLGTALVFIPILLSMTYIAGISMRYIVFLASCILLTGFLTVLPLWQTYILRRSLSTLQLLTNPRLILIAILALSLIIGIALFGFLKYKKRYFFWIVYGFTIAVFSLGASYAARILLKNYQIMRLIVFLDPEIDPRGAGWHIIQSITAIGSGGLAXQGYLKGTQSHYRFLPEQSTDFIFSIFSEETGFIGGIGVFILFLIICLKDLQIIKITSDPFASYICAGLVGMFSFHFIINVGMTMGIMPITGIXLLFISYGGSAMFSAMIGIGLALSIHIRRYIPPAL

SEQ ID NO: 32571 - DNA, 882 bp, Unknown
  Obtained from environmental sample
  misc_feature (1)..(882): n is a, c, g, or t
atggtgaacggtaacgagttgaatataagttacgacgacgtcaacgacatcctcaagataggtaacgacatagtggcagccggtaaaagcataacgcttgacgatggcacggttctcacccacgcaagtacccttgccgataaaaacatcgcgacaggcatggtattcgtagataccggtcgcatcattttggccgaagatattactcctggaacaggtggtaacgtcgccggattctctctggcgaaagacagtacaatggccaccagtaccaaggtaaatgacgacaccatgctaatggccggtaccgtaatcacctcccccgataagttctatcctggcagcgtgacaatggcccacgaaggccgcagtgtccaattctccgccaactacgatgtcagccttggcgcccgctactacgacatggccgtaagcgaaagcatgacctacatcttctcccgttacgagccagcgtcgagcaacctgcgcgactccgtaatggcccagatcggcgccaacagcggtcaaaccgctttcgtctctatgggcgatatgcgtgccgtagcgttgaacgtgcatcaaatcgacatcagttccaagtggggcgccgccaccgccatagaaacggtgaacaacgcgcttcagcgtgtttctcaccagcgcgccctgcttggtgctatgcagaatcgtttggagcatacgataaagaacttggacgcgtccacggagaacttgcaggcagcggagagccgcatccgcgacgtagacatggcgaaggaagtgatggagtacacgaaggacagcattctcatgcaggccgcccaagcgatgttggcccaggcgaaccagcagccgcagtctgtgttgcagttgctcaggtag

SEQ ID NO: 32572 - protein, 293 aa, Unknown
  Obtained from environmental sample
  DOMAIN (200)...(271): Bacterial flagellin C-terminus
  misc_feature (1)..(293): Xaa is any amino acid
MVNGNELNISYDDVNDILKIGNDIVAAGKSITLDDGTVLTHASTLADKNIATGMVFVDTGRIILAEDITPGTGGNVAGFSLAKDSTMATSTKVNDDTMLMAGTVITSPDKFYPGSVTMAHEGRSVQFSANYDVSLGARYYDMAVSESMTYIFSRYEPASSNLRDSVMAQIGANSGQTAFVSMGDMRAVALNVHQIDISSKWGAATAIETVNNALQRVSHQRALLGAMQNRLEHTIKNLDASTENLQAAESRIRDVDMAKEVMEYTKDSILMQAAQAMLAQANQQPQSVLQLLR

SEQ ID NO: 32573 - DNA, 558 bp, Unknown
  Obtained from environmental sample
  misc_feature (1)..(558): n is a, c, g, or t
atgcttacccgctgcgccaaggtgatggcctccgggctttcatccggcgtttctttcatggaagattacacctaccattttgaacctggaaaagaagccgccttgggcgctcatatgctggaagtatgcccttcgatagccggagcaaagccccgcctggaagtgcatcctctgggaatcggcggcaagggcgatcccgcccgtctggtgtttgacgccgcccccggcccggctgttttggcaaccctgattgatcttggcgaccgcttcaggatgatcgtaaacgaaatagagacaataaaaattgaaaaggaaatgcccaagctccccgtagccagggcgctgtggaagccttatccgagtttaagcagtgccgccgaggcctggatacttgccggcgggactcaccactctgtttataccgctttgaccgctgaatatttcagggactgggcggagatctgcggcattgaatttgtcttaatcgggcgcgatacaaagcctgacaggctgagggatgagctccgctggagtgaggcatactggtcgggccgctag

SEQ ID NO: 32574 - protein, 185 aa, Unknown
  Obtained from environmental sample
  SIGNAL (1)...(20)
  DOMAIN (1)...(185): L-arabinose isomerase
  misc_feature (1)..(185): Xaa is any amino acid
MLTRCAKVMASGLSSGVSFMEDYTYHFEPGKEAALGAHMLEVCPSIAGAKPRLEVHPLGIGGKGDPARLVFDAAPGPAVLATLIDLGDRFRMIVNEIETIKIEKEMPKLPVARALWKPYPSLSSAAEAWILAGGTHHSVYTALTAEYFRDWAEICGIEFVLIGRDTKPDRLRDELRWSEAYWSGR

SEQ ID NO: 32575 - DNA, 906 bp, Unknown
  Obtained from environmental sample
  misc_feature (1)..(906): n is a, c, g, or t
ttggataaggcgggaaccgtgaaaaaaaaggaagaaagtatttcttattttatattggttgttcccgccttatttttgtatctttcggtgatggcttttccgacgtttttttccatagtcttaagtttaaccaattattcgggcgggaaggttttcggcaacccaaatgtcggttttgcgggcctgaaggcctacaaggaaattcttaccgattcatacttctatatgtcgcttaaaaacaatatctggatagtgctcatatcggtcttcggacagattcctctgggtttttttctcgcctatatactgtcacgaaggcttatccgcggaactgatttttttcaatcaatggtataccttcccaatgtcatttccaccgttatcataggtattttgttcagtaaattctttttaagttccaacagcgtgtggctggagattcagcgtgtctttaatcctgccgcggaatatgtgccgggcgtaaacgcgatgctgccggtgctggcggttatactctggatgtatacgggaacttacgtgattatttttttggcgaatctgcaaaaaattgacacttcgatcattgaggcctcaaagattgacggcgcgagtgaaatgcagacgctgcgttatattatttttccggctttgtccggngtgattgttaccaccgcgatcctggcgatttccggatcgcttaaatcctttgatctgatttttgtaatgacacagggagggcccgcccaccgtaccagcgtccttgccctgtatatgtacgaaaaagcgttcagaggcgcgccgaattatccggtggccaatgccatttctacggtaatgatgattataagttttatactgatagcgatcacccgtgttcttgaaagacgctttgcacaggaggagtag

SEQ ID NO: 32576 - protein, 301 aa, Unknown
  Obtained from environmental sample
  DOMAIN (74)...(299): Binding-protein-dependent transport system inner membrane component
  misc_feature (1)..(301): Xaa is any amino acid
MDKAGTVKKKEESISYFILVVPALFLYLSVMAFPTFFSIVLSLTNYSGGKVFGNPNVGFAGLKAYKEILTDSYFYMSLKNNIWIVLISVFGQIPLGFFLAYILSRRLIRGTDFFQSMVYLPNVISTVIIGILFSKFFLSSNSVWLEIQRVFNPAAEYVPGVNAMLPVLAVILWMYTGTYVIIFLANLQKIDTSIIEASKIDGASEMQTLRYIIFPALSGVIVTTAILAISGSLKSFDLIFVMTQGGPAHRTSVLALYMYEKAFRGAPNYPVANAISTVMMIISFILIAITRVLERRFAQEE

SEQ ID NO: 32577 - DNA, 813 bp, Unknown
  Obtained from environmental sample
  misc_feature (1)..(813): n is a, c, g, or t
atggcgctctcccattacggcgtcatggcggacattgtaatgagtacggacggcggcagttggccgctaaggcacatctatccttttttcagaaaacaagacaatgttgaaaataacgttgaaaacgccgcgtcttntgcggtaaatctntgcgcggcgcttccttcncaatgcgcgggaagacccatgttaataatgaacgacggaagcttctggcagaatgttatactgcatgaactttcgataccgtccgtaatcattacgcaaaaaggaaccgttagcgcctgcgcagtggaactcgcccttgcgcttacaagcggaaaaatttatcttgcgggcttagaccttgcagtaaaagacatgagaagccacgttcggccttatgcttttgatcacctgctttatgacagagcaagccgttttacgccagtttattcgcaaagttttataaggtcaaaccaaattcaggaaggcggaagccttgacatttacgcggcatggtttaaaaaacagcttgcctcgtggccgaaacggatcttctctctcggcggcggaaatgaagtatttgaaaacgcgctttgcgaagagaaggcaaacaaaaaaaacgccggcgaatattttaaggcacagagcgtaaaagacgagccggcgaactttcgcaaaagaggcgccgccgccctgattgccgccctgaaaaacggcgaatactcggaaaatctgaaaaaagaacttgcgcccctgctttttccgaatgaaaaagatgtaacggaaagtcaattagaaaaagcaattaacgaggcggctcatgggtag

SEQ ID NO: 32578 - protein, 270 aa, Unknown
  Obtained from environmental sample
  misc_feature (1)..(270): Xaa is any amino acid
MALSHYGVMADIVMSTDGGSWPLRHIYPFFRKQDNVENNVENAASXAVNLCAALPSQCAGRPMLIMNDGSFWQNVILHELSIPSVIITQKGTVSACAVELALALTSGKIYLAGLDLAVKDMRSHVRPYAFDHLLYDRASRFTPVYSQSFIRSNQIQEGGSLDIYAAWFKKQLASWPKRIFSLGGGNEVFENALCEEKANKKNAGEYFKAQSVKDEPANFRKRGAAALIAALKNGEYSENLKKELAPLLFPNEKDVTESQLEKAINEAAHG

SEQ ID NO: 32579 - DNA, 615 bp, Unknown
  Obtained from environmental sample
  misc_feature (1)..(615): n is a, c, g, or t
atgccgcagagggaggagggctcttcgggctccgccgatatcgccgcgggccgggttttgattctggtcggccccacgggggtaggcaaaaccaccaccatcgccaaactggccgtggtttacggcgtcggcagcgtggacagggcggcgctttccgtccgtgtatacaccattgacacgttcaaaatcggcggaaccgaacagcttgagaaatactgcgaaataatggaagtgcccttcggcattattaacaatcagacggggctcagaaaagagatagacatgtaccgagaagagaccgatctgattctgattgataccataggaagcagcccgaacgatcccaaaaaactgggggagatgcaggcgcttcttaacgtttgcggctcaaaagccgaagtttaccttgtgctttccgccagcaccaagaccaacgatatagaacatattctaagacagtttgaaccgtttaattatcaggcggttttacttaccaagatggatgaaaccaggaccgtgggcaatataatttccgcgcttgcggaaaagggaaaaccgatatcatttattaccaacgggcagcagattcacaaggatttaaaaaggcgaacgtag

SEQ ID NO: 32580 - protein, 204 aa, Unknown
  Obtained from environmental sample
  DOMAIN (16)...(197): SRP54-type protein, GTPase domain
  misc_feature (1)..(204): Xaa is any amino acid
MPQREEGSSGSADIAAGRVLILVGPTGVGKTTTIAKLAVVYGVGSVDRAALSVRVYTIDTFKIGGTEQLEKYCEIMEVPFGIINNQTGLRKEIDMYREETDLILIDTIGSSPNDPKKLGEMQALLNVCGSKAEVYLVLSASTKTNDIEHILRQFEPFNYQAVLLTKMDETRTVGNIISALAEKGKPISFITNGQQIHKDLKRRT

SEQ ID NO: 32581 - DNA, 1026 bp, Unknown
  Obtained from environmental sample
  misc_feature (1)..(1026): n is a, c, g, or t
atggattttctgcaccgcacaaaggtgttcagaggcgctgttgtttgcaacggcaatgcggttatgcaggtaagcgttgttggcgataaatccgtttatgggcaaattgccaaagaactccaaaccaccgatgacagggaaacaccgctgaaagtgaaactcagcaaattggcgcacagcatcagcaagttcggctatatcggaggctcgtccatagctttggctttgctgtttaaacatatagttataaacaataattttgacccagcgcaaattgctgcttattgctcaaactggggaacgctgctaaacgatattatacacgcctttatgctcgccgtgataataatagtcatggcggttccagaaggcttacctcttatgatagccatcgtctccgctctgaatatgggcaaaatgctcaaagacaacgtgctggttcgcaaactcgctggcatagaaaccgctggcagcctgaactttttattcagcgataaaacagggacaataacaaaaggcaaattggaagtggttacatttatagacggcaatttaaaggagtacaaaaattacggcgatgttcaaggagatttgaaaaaatatctatcactttccattcaccagaacacggattcagttatctctggcaaaaaaatcgtgggcgggaacgcaacggagcgcgcagttctcgcgttttctggtagcggcggcgaagcggtgaatgtaaaaacatcgggcaaaattccattcaacagtactaataaatattcggcaaccacaatagagggcgattattccctaaccttgataaaaggcgctccagaaaaaattttgcagaagtgcaaattttactacgatagcgatgggcaaaaaaagagttattccgggtacgagcagttgaataaaaatatagatccccttgcggagcgggcgattagagttgtagctttggcggtttctgaagaaaggataaatgacgaggcctttgccggaaaaccgattggatttggtggcgttagggcatag

SEQ ID NO: 32582 - protein, 341 aa, Unknown
  Obtained from environmental sample
  DOMAIN (2)...(155): E1-E2 ATPase
  misc_feature (1)..(341): Xaa is any amino acid
MDFLHRTKVFRGAVVCNGNAVMQVSVVGDKSVYGQIAKELQTTDDRETPLKVKLSKLAHSISKFGYIGGSSIALALLFKHIVINNNFDPAQIAAYCSNWGTLLNDIIHAFMLAVIIIVMAVPEGLPLMIAIVSALNMGKMLKDNVLVRKLAGIETAGSLNFLFSDKTGTITKGKLEVVTFIDGNLKEYKNYGDVQGDLKKYLSLSIHQNTDSVISGKKIVGGNATERAVLAFSGSGGEAVNVKTSGKIPFNSTNKYSATTIEGDYSLTLIKGAPEKILQKCKFYYDSDGQKKSYSGYEQLNKNIDPLAERAIRVVALAVSEERINDEAFAGKPIGFGGVRA

SEQ ID NO: 32583 - DNA, 684 bp, Unknown
  Obtained from environmental sample
  misc_feature (1)..(684): n is a, c, g, or t
ttgcctgaaatgtttaaaattaccgtttcccgttttccgcaccgcgcctgtttcaccatttatgaaccaaatagaatcagtctggattacacggaagcgcttaaagtgatagaagccgtcgcccgctggctgcatagtaatggtattcgccgaggcgacagggtcgttgtaacggggaaaaacgcccccgaatggacagtcgcatatcttgccatacttttcgccggcggcgtggttgttccaatagattatcagcttaagaatgaagaaattgaccttttgataaaagcctcaggcgcgcgcatgatttttgttgatgaagaaagacatgaatattaccagtcaaaagccggccttgataaagttctttccctaaaaaaaggagtaggaacttatatttacgatctggacggaccgggggccgaaattgaacaggcggttgagactgacacggcggcgatactttttacgtcgggaacaatgggaatccccaagggagtcatactgacgcacaaaaaccttgtctcggattgttatcttgcccaaggaacgccacttatagttttacataccgacgtattttacgcgatattgccaattcatcattcatacacgatgcttgcggtattcattgaaacaatttcaactggagccgaagttgtttttggaaaacgaagtnggtaa

SEQ ID NO: 32584 - protein, 227 aa, Unknown
  Obtained from environmental sample
  misc_feature (1)..(227): Xaa is any amino acid
MPEMFKITVSRFPHRACFTIYEPNRISLDYTEALKVIEAVARWLHSNGIRRGDRVVVTGKNAPEWTVAYLAILFAGGVVVPIDYQLKNEEIDLLIKASGARMIFVDEERHEYYQSKAGLDKVLSLKKGVGTYIYDLDGPGAEIEQAVETDTAAILFTSGTMGIPKGVILTHKNLVSDCYLAQGTPLIVLHTDVFYAILPIHHSYTMLAVFIETISTGAEVVFGKRSX

SEQ ID NO: 32585 - DNA, 558 bp, Unknown
  Obtained from environmental sample
  misc_feature (1)..(558): n is a, c, g, or t
atgggcggtaaaccaaatgaaataattagcaaccttattaactccggccaagccaaacccatgatagtagttatgccaaacgtgcgggcgatgaaaaatgacagcgttccatccgatcaaatatcagtggaagctgttacggcttttcacaatttcatcaatgatttacgtgacgaccttatgccgtttattaagcaaaattattcggtatcagacagacgtgatcaaaccgccattgccggcctgtcaatgggcgccatggagtctctgcatataggttgccgtatgcctgaaacattcggctatgtcggctctttttctgccgctcccgctatgccgcttacggcagctgaaatgacaattcccgaccaatacaaggaaaatacattcttcatgttatgctgcggtttacaggatgggttgatctctcaaactcaaaattacaacaaaaaccttaatgataacggggtaagaacagcgtattacacaattcccggcggtcatgattttaatgtctggaaaaacggtttgtattacttcgcaaggtgtattttttaa

SEQ ID NO: 32586 - protein, 185 aa, Unknown
  Obtained from environmental sample
  misc_feature (1)..(185): Xaa is any amino acid
MGGKPNEIISNLINSGQAKPMIVVMPNVRAMKNDSVPSDQISVEAVTAFHNFINDLRDDLMPFIKQNYSVSDRRDQTAIAGLSMGAMESLHIGCRMPETFGYVGSFSAAPAMPLTAAEMTIPDQYKENTFFMLCCGLQDGLISQTQNYNKNLNDNGVRTAYYTIPGGHDFNVWKNGLYYFARCIF

SEQ ID NO: 32587 - DNA, 1335 bp, Unknown
  Obtained from environmental sample
  misc_feature (1)..(1335): n is a, c, g, or t
atggaatgggaatggaaaaagcatcctgttatccgtctcgatctgaatgccggagtttattcaaacggaatagaagcgcttcattcagtattatactctgaattacaaaaagaagctgaaaaacaagggattgtattggaacatacggatattacttaccaatttttgtatttaataagaaatgtatacaagaagactggcgagaggtctgttgttattattgatgaatatgataagcccctgcttagcaccattgacgatccgaaacttcatgtcaagattaagaatgaattattagggttttatagtgttttgaaatcgtctgacggatatttaaaatttgtatttctgactggcgttggcgcaatttctcatgtgaacgcattttcagaattaaatcatctcattgacttgacgcttgacccgcgctatgctgacatctgcggcataacccaggaagaagtggaacggaattttgaatctgaaataaaaaatattctggaaaataacgacaagatatgtgaaacttattttgaagaattgcgtcggtattataacggctaccggttttcaggaaaaccgcttactgtgtacaatccgtttagcttactcaatcattttaacaaaaatggcgattttttgccctactggtatgagaccagcacttcatcttttttattaaaccttattatcaagcaaaagataaatattgtagatctgaccaatatgcgggtcgggtatgaagatttccgcaagtatgatattgaaacaatgagggcggaaccgctgctttaccagagcggatacctgacgataaaggattatgacgaagagttgaatcaatttatccttgattatccgaatgaggaagtgcgggtttctttctcaaagtcgctgctggaattgtatttacagccatccggagaagctgcccgggggttgagtaccctgcttccggcggcattagttaaaggcgaagtagacgaggcgatgaatgcgcttaaatcgtttttagcctcaataccctatgacataatcaaggatagggaaaattattacgagacagccatacacttaatatttacgatgctggggcttaactgccgttctgaggtgcgcatagcgtccgggcggatagacacgcttgtggaaacgaaacggtatgtatattgttttgagtttaagctgaatggaaccgccgaagaagcgctggcacagatagacacgaaggaatatttgttaccatggactgtgagcgggaaacagttattcaaagtgggcgttgagtttgattacgggaaacgcaatatcgggaagtggaagagttcatcatga

SEQ ID NO: 32588 - protein, 444 aa, Unknown
  Obtained from environmental sample
  DOMAIN (1)...(440): Protein of unknown function (DUF1703)
  misc_feature (1)..(444): Xaa is any amino acid
MEWEWKKHPVIRLDLNAGVYSNGIEALHSVLYSELQKEAEKQGIVLEHTDITYQFLYLIRNVYKKTGERSVVIIDEYDKPLLSTIDDPKLHVKIKNELLGFYSVLKSSDGYLKFVFLTGVGAISHVNAFSELNHLIDLTLDPRYADICGITQEEVERNFESEIKNILENNDKICETYFEELRRYYNGYRFSGKPLTVYNPFSLLNHFNKNGDFLPYWYETSTSSFLLNLIIKQKINIVDLTNMRVGYEDFRKYDIETMRAEPLLYQSGYLTIKDYDEELNQFILDYPNEEVRVSFSKSLLELYLQPSGEAARGLSTLLPAALVKGEVDEAMNALKSFLASIPYDIIKDRENYYETAIHLIFTMLGLNCRSEVRIASGRIDTLVETKRYVYCFEFKLNGTAEEALAQIDTKEYLLPWTVSGKQLFKVGVEFDYGKRNIGKWKSSS

SEQ ID NO: 32589 - DNA, 594 bp, Unknown
  Obtained from environmental sample
  misc_feature (1)..(594): n is a, c, g, or t
ttgaattcgctcatcgtctcctgtatgggttccactctaaaaattcttttcgctacgctggccgcttatgctttttgctactttgaatttcgcggcaagaaaatactatttatgatcgttctaggtaccatgatgcttcctgcggataccctcgtcataaccaactacataacgattacccgcctcaatttgctggacaattacttgggtctctgcattacttccattgtcggtgcttcccagatgtttatgcttaggcagaattttaaaaccattccgcaggcttttcgcgacgccgcgttcatggacggctgcggggatctgctctacctcatgtttgtaattgcccctctttcaagtccggtcattctgacccttctggtgcagtctttcataaccttttggaacgcttacctgtggccgcttcttgtaacgaatcgtattgaaatgcgcacggttcaaataggaatatcaatgttgactaatccattggataccaattacagcgtggtattggcggcggttacgttgcttctgattccttctttattacttttcagccttttacgaatagctgtttcaaaaggccattga

SEQ ID NO: 32590 - protein, 197 aa, Unknown
  Obtained from environmental sample
  SIGNAL (1)...(21)
  DOMAIN (2)...(195): Binding-protein-dependent transport system inner membrane component
  misc_feature (1)..(197): Xaa is any amino acid
MNSLIVSCMGSTLKILFATLAAYAFCYFEFRGKKILFMIVLGTMMLPADTLVITNYITITRLNLLDNYLGLCITSIVGASQMFMLRQNFKTIPQAFRDAAFMDGCGDLLYLMFVIAPLSSPVILTLLVQSFITFWNAYLWPLLVTNRIEMRTVQIGISMLTNPLDTNYSVVLAAVTLLLIPSLLLFSLLRIAVSKGH

SEQ ID NO: 32591 - DNA, 684 bp, Unknown
  Obtained from environmental sample
  misc_feature (1)..(684): n is a, c, g, or t
gtgatcctgttttatcacggtttaagaaacaccctgacactgactacggtctatgtgatccttaacctgtttctttctttctccctagccgtccttgccgtgaagaaacgcagattcgggatgttgtacgaaacaatgtttatgctgccaatggcggtttccatgcccgcggcttcacagattttcaagctgctccttgaaccgacaatgggaatactcaattacaaactggggcttaacatcggctggtttacggatccccataccgccattttcggaattgtcatggtctgcctctggataggtatgccgtttgatttcctcctctttctttcggcgttgcgcaatatacccgcttctctcatggacgcggctgatattgacggcgccggtttcgctcataatcttttcagtattcagatacccctggccactcctaccatcctcttcgttatctgtaccaacaccgtacttgccatgatgacttccaccccggtgatgatcattacaggggggcagcctggttattccacggcaacccttatttacatgatgtatagctgggggtaccagtcttccaattatagtctggcttcctgtatcagcatcgtaactttcgcgctcaccttcggcatgattctcctggctttttcattcgaacacaagaaggtgcactatcaatga

SEQ ID NO: 32592 - protein, 227 aa, Unknown
  Obtained from environmental sample
  DOMAIN (8)...(225): Binding-protein-dependent transport system inner membrane component
  misc_feature (1)..(227): Xaa is any amino acid
MILFYHGLRNTLTLTTVYVILNLFLSFSLAVLAVKKRRFGMLYETMFMLPMAVSMPAASQIFKLLLEPTMGILNYKLGLNIGWFTDPHTAIFGIVMVCLWIGMPFDFLLFLSALRNIPASLMDAADIDGAGFAHNLFSIQIPLATPTILFVICTNTVLAMMTSTPVMIITGGQPGYSTATLIYMMYSWGYQSSNYSLASCISIVTFALTFGMILLAFSFEHKKVHYQ

SEQ ID NO: 32593 - DNA, 1665 bp, Unknown
  Obtained from environmental sample
  misc_feature (1)..(1665): n is a, c, g, or t
ttgtccggcggcccatttgccaatatcgcccacggctgcaattccgtaatggcgaccaggatggctttgcaatgcgccgattacgctgttaccgaggcgggctttggcgcggacctgggcgcggaaaaattctttgatataaaatgccgcctgggcggtttcaaaccttcggttgttatcatcgtagccactgtccgcgcgctcaaatcccacggcggtgtgaaaaaagccgacctggaaaaagaaaaccttgccgcgctggaagcgggactgccgaacctgcttcaacatatcgagaacatcaccggagtatacaaacttccggctatagttgcgattaacgcttttccaaaagacacaaaggcagaacttgacctggtcgaggcaaagtgcagggccttgggcgtcaatgtcgccctttccgaggtttgggcaaaaggcggagaaggcggggaaaagcttgcgagtgaagttgtgcggctttgcgaacagccaaacggctttgagtttgcatatgatgttaatcgatccgtgagagaaaaaatcgaagccattgccaaaaaaatttaccgagctgatggcgtcacgattcttcccaacgcgcaaaaacaaattgaacagcttgaaaagctcggtctggacaaggttcctgtctgcatggcaaaaacccaatacagcttctccgatgatccttccctgttgggcgctccaaaaggctggacgctgaccgtgcggaacgtaaaactttccgccggcgcgggttttatcgtcgcccttaccggcgacataatgaccatgcccggcctgcccccggtttccggccgcagaaaaaatagacgtagacagtcacggcaggatntcaggtctgttctaattccctcttccccccgaaccccgtaccctgaaccccgtaccctattttccgtttacagaacgctttgcaggaactggcgggtgcgctcgtttgtgggggcgttgaatatgatcttgggcggggcgacttccaggatttttccctcgaacatgaatactaccctgtcggcaacctcgcgggcaaaacccatctcgtgcgataccaccagcatcgtcattccgccgacggcaagctgtttcattacagctaacacttcgccgacaagctcagggtcaagagcgctggtaggctcgtcgaaaagcatgatcctcggctccatcgcgagggcgcgggctatggctaccctctgctgctggccgccggaaagctgggagggaaatgtgtcaaatttatcgcccaggccgacgcgctcaaggatgcttttggatctttcccgcgcctcctcaacggaaagcttacgcacatggacgggggcaagcatcacgttttcaagggccgtcctgtggggaaaaagattgaaacgctggaacaccatgccgacttcaagcagtgttttgctgtgctcgtcatgtctcatcttgacgcggtttgttcccttgtggcagtcaaagaggagtttgtcttctatatatatctgcccttcgtcaatcgtttccagccggttcagggtgcgcaggtatgtcgacttgcccgcgccggagggcccgattatgcagacgacttctttctgctctacggttaaggacacgtccttcagcacctcaagcggccccctgccattagagccgtga

SEQ ID NO: 32594 - protein, 554 aa, Unknown
  Obtained from environmental sample
  DOMAIN (388)...(426): Protein of unknown function (DUF1602)
  misc_feature (1)..(554): Xaa is any amino acid
MSGGPFANIAHGCNSVMATRMALQCADYAVTEAGFGADLGAEKFFDIKCRLGGFKPSVVIIVATVRALKSHGGVKKADLEKENLAALEAGLPNLLQHIENITGVYKLPAIVAINAFPKDTKAELDLVEAKCRALGVNVALSEVWAKGGEGGEKLASEVVRLCEQPNGFEFAYDVNRSVREKIEAIAKKIYRADGVTILPNAQKQIEQLEKLGLDKVPVCMAKTQYSFSDDPSLLGAPKGWTLTVRNVKLSAGAGFIVALTGDIMTMPGLPPVSGRRKNRRRQSRQDXRSVLIPSSPRTPYPEPRTLFSVYRTLCRNWRVRSFVGALNMILGGATSRIFPSNMNTTLSATSRAKPISCDTTSIVIPPTASCFITANTSPTSSGSRALVGSSKSMILGSIARARAMATLCCWPPESWEGNVSNLSPRPTRSRMLLDLSRASSTESLRTWTGASITFSRAVLWGKRLKRWNTMPTSSSVLLCSSCLILTRFVPLWQSKRSLSSIYICPSSIVSSRFRVRRYVDLPAPEGPIMQTTSFCSTVKDTSFSTSSGPLPLEP

SEQ ID NO: 32595 - DNA, 708 bp, Unknown
  Obtained from environmental sample
  misc_feature (1)..(708): n is a, c, g, or t
gtgctgaaggacgtgtccttaaccgtagagcagaaagaagtcgtctgcataatcgggccctccggcgcgggcaagtcgacatacctgcgcaccctgaaccggctggaaacgattgacgaagggcagatatatatagaagacaaactcctctttgactgccacaagggaacaaaccgcgtcaagatgagacatgacgagcacagcaaaacactgcttgaagtcggcatggtgttccagcgtttcaatctttttccccacaggacggcccttgaaaacgtgatgcttgcccccgtccatgtgcgtaagctttccgttgaggaggcgcgggaaagatccaaaagcatccttgagcgcgtcggcctgggcgataaatttgacacatttccctcccagctttccggcggccagcagcagagggtagccatagcccgcgccctcgcgatggagccgaggatcatgcttttcgacgagcctaccagcgctcttgaccctgagcttgtcggcgaagtgttagctgtaatgaaacagcttgccgtcggcggaatgacgatgctggtggtatcgcacgagatgggttttgcccgcgaggttgccgacagggtagtattcatgttcgagggaaaaatcctggaagtcgccccgcccaagatcatattcaacgcccccacaaacgagcgcacccgccagttcctgcaaagcgttctgtaa

SEQ ID NO: 32596 - protein, 235 aa, Unknown
  Obtained from environmental sample
  DOMAIN (1)...(211): RecF/RecN/SMC N terminal domain
  misc_feature (1)..(235): Xaa is any amino acid
MLKDVSLTVEQKEVVCIIGPSGAGKSTYLRTLNRLETIDEGQIYIEDKLLFDCHKGTNRVKMRHDEHSKTLLEVGMVFQRFNLFPHRTALENVMLAPVHVRKLSVEEARERSKSILERVGLGDKFDTFPSQLSGGQQQRVAIARALAMEPRIMLFDEPTSALDPELVGEVLAVMKQLAVGGMTMLVVSHEMGFAREVADRVVFMFEGKILEVAPPKIIFNAPTNERTRQFLQSVL

SEQ ID NO: 32597 - DNA, 1596 bp, Unknown
  Obtained from environmental sample
  misc_feature (1)..(1596): n is a, c, g, or t
ttgccgctatgtaaaattggttttttcactttgggttttattcaggtcaaatggataaaaggggaatatatggctgaaataaaaaaattcacgggatcagatatagaaatcgcgcaggcggtgtatccggaacacgcgctccatatagacaagatcgctgaaaaggccggcatcccggatgagtatatcgaacattacgggaaatacaaggcaaaaatagattacaactttctctctaaagaaggcgtgccttccaaagaaggcgtgccttccaaagaaggcgtgccttccaaagaaggcgtgccttctaaagaaggcaagttgattttggtgacggccataaccccaaccccggcgggtgagggcaagactaccacgacggtcggagtcgcggacgggctttcgagaattgggaaaaaagtgatggtcgcgctgagggagccttcgctggggccggtctttggcgtaaagggcggcgcggcggggggcggctgggcgcagattatcccgatggaggatattaacctccatttcaccggagacttccatgccattggcgcggcgaataatcttctcgccgcgttgatagacaaccacattttccagagcaacagcctcaacattgatccccgcaaaattacctggcggagatgcgtggacatgaacgaccggcagcttcgctttgtcgttgacggcctgggcgggaaattaaacggcattgcccgcgaggacggttatgacattaccgtggcgtcggaagttatggctatactgtgcctttcatcgggtattgacgacctcaaggagcggctggggcgtatcatcgttggttacacttacggcaagcaaaacgacggcagcgagaagccggtcacggcggcgcagcttaacgcgcagggggcgatggcggcgctgctcaaggacgcgctaaagccgaacctggtgcagacactggaaggaacgccggcttttgtccacggcggcccctttgccaatatcgcccacggctgcaattccgtaattgctacgaagatggcgctgcagtgcgccgattacgccgttaccgaggcgggctttggcgcggacctgggcgcggaaaaattcttcgatataaagtgccgcttgggcgggtttaagccctcggctgttatcattgtagccactgtccgggcgctcaagtcccacggcggcgtaaaaaaacaagatctggaaaaggaaaaccttgccgcgctggaagccggcctgccgaacctgcttcagcacattgagaacatcaccgcagtgtacagactgccggccgtagttgcgattaacgctttccccaaagacaccaggcctgagcttgatctggttgaggcgaagtgcagagagttaggcgtaaacgtggccctttccgaagtttgggcaaaaggcggagaaggcggggaacggctcgcgcgggaagttgtgcggctttgtgaccagccaaacgattttaaatttacctacgatgttaatcttccggtacgggcaaaaattgaggctgttgccaggatgatataccgtgcggacggcgtcacgattcttcccaacgcgcaaaagcaaatgaacagctga

SEQ ID NO: 32598 - protein, 531 aa, Unknown
  Obtained from environmental sample
  DOMAIN (31)...(531): Formate--tetrahydrofolate ligase
  misc_feature (1)..(531): Xaa is any amino acid
MPLCKIGFFTLGFIQVKWIKGEYMAEIKKFTGSDIEIAQAVYPEHALHIDKIAEKAGIPDEYIEHYGKYKAKIDYNFLSKEGVPSKEGVPSKEGVPSKEGVPSKEGKLILVTAITPTPAGEGKTTTTVGVADGLSRIGKKVMVALREPSLGPVFGVKGGAAGGGWAQIIPMEDINLHFTGDFHAIGAANNLLAALIDNHIFQSNSLNIDPRKITWRRCVDMNDRQLRFVVDGLGGKLNGIAREDGYDITVASEVMAILCLSSGIDDLKERLGRIIVGYTYGKQNDGSEKPVTAAQLNAQGAMAALLKDALKPNLVQTLEGTPAFVHGGPFANIAHGCNSVIATKMALQCADYAVTEAGFGADLGAEKFFDIKCRLGGFKPSAVIIVATVRALKSHGGVKKQDLEKENLAALEAGLPNLLQHIENITAVYRLPAVVAINAFPKDTRPELDLVEAKCRELGVNVALSEVWAKGGEGGERLAREVVRLCDQPNDFKFTYDVNLPVRAKIEAVARMIYRADGVTILPNAQKQMNS

SEQ ID NO: 32599 - DNA, 492 bp, Unknown
  Obtained from environmental sample
  misc_feature (1)..(492): n is a, c, g, or t
gtgcagaccatcattctgggccacagcgaaaggcggcacgtctacaaggaagacgacgcgctgatcaacaaaaaagtgaagctggccctgaaacacggttttgaagtgattctctgcatcggggaattgctggaagagcgcgaggccggaaaagttgaagcagtctgcgaatcccagaccgtgaaagggcttgaaggtgtcagcgcaactgatctggcgaatgtcgtaattgcttacgagccggtctgggccattggcacaggaaagactgccacgccggaagacgcggaggcggttcacgcctttgtacgcaaggtgatagcgcggctttacgggcaggatgcagcggataaaatcatcatccagtacggcggttcagttaagccggacaacgccgcccagttgatggcaaaagagaacattgacggcgcccttgtcggcggcgcggctcttaaaccggacacctttgtccctattgcgaaatttgcttag

SEQ ID NO: 32600 - protein, 163 aa, Unknown
  Obtained from environmental sample
  DOMAIN (1)...(160): Triosephosphate isomerase
  misc_feature (1)..(163): Xaa is any amino acid
MQTIILGHSERRHVYKEDDALINKKVKLALKHGFEVILCIGELLEEREAGKVEAVCESQTVKGLEGVSATDLANVVIAYEPVWAIGTGKTATPEDAEAVHAFVRKVIARLYGQDAADKIIIQYGGSVKPDNAAQLMAKENIDGALVGGAALKPDTFVPIAKFA

SEQ ID NO: 32601 - DNA, 375 bp, Unknown
  Obtained from environmental sample
  misc_feature (1)..(375): n is a, c, g, or t
atgggacgaacatacaaaaaaagaaacaactctaaaaaatcacatccaagaaatgagcagccgattgatattgccgaactgctggaaaaaacgcattttgaaacaatcatggctttttccgaagcgttggaagccagggaccagtataccgccggacattcacgccgggttatggaatattcaaaaggtatcgggcagcgtatgaaattagataagcaagatattgaagaccttaaaagatctgcgctgctgcatgacatcggaaaaataggaatacctgatattattcttcaaaagaaaacaaaattaaccgatgaggaatatgccacaattaaatcacatccggaaacaggagccgctattcttagtatataa

SEQ ID NO: 32602 - protein, 124 aa, Unknown
  Obtained from environmental sample
  DOMAIN (50)...(124): HD domain
  misc_feature (1)..(124): Xaa is any amino acid
MGRTYKKRNNSKKSHPRNEQPIDIAELLEKTHFETIMAFSEALEARDQYTAGHSRRVMEYSKGIGQRMKLDKQDIEDLKRSALLHDIGKIGIPDIILQKKTKLTDEEYATIKSHPETGAAILSI

SEQ ID NO: 32603 - DNA, 345 bp, Unknown
  Obtained from environmental sample
  misc_feature (1)..(345): n is a, c, g, or t
atgaaaaaagctgcgaaaataattgcggaaaagggagccgcaaatgtatttataaaaggcggttcaaaattgcttgacgcggcagaagctgttgatcttttgtatgacgggaaaaattttgaattaataaaggatcgtcttataaaaaccaattgggtacacggggccggttgtactgtatcagcggccattgccgccggattggcccgcggactttcagtttatgacgcagttattctggcaaaaaaattcattagtcaaagccttgacggaagttttgcccttaacaaatgggtcggtcccggaaatccggcaaattggaggaaaaataatttgttttcataa

SEQ ID NO: 32604 - protein, 114 aa, Unknown
  Obtained from environmental sample
  DOMAIN (1)...(103): Phosphomethylpyrimidine kinase
  misc_feature (1)..(114): Xaa is any amino acid
MKKAAKIIAEKGAANVFIKGGSKLLDAAEAVDLLYDGKNFELIKDRLIKTNWVHGAGCTVSAAIAAGLARGLSVYDAVILAKKFISQSLDGSFALNKWVGPGNPANWRKNNLFS

SEQ ID NO: 32605 - DNA, 570 bp, Unknown
  Obtained from environmental sample
  misc_feature (1)..(570): n is a, c, g, or t
gtgcagaatccggtgttgatagttataggcggttccgtcggctatcgttattttacccattctccgtataaaatactggaaaatttttcttttcatccgcagatacctactgtggaacacgccgcggaagtttccgagtacgtggtttcgcagtatctttggggggtttttgattccatacatattgtgtatacccatatgttcagcatggtaaaacttctgcctaccaagcatcagataattccccttgtaaaggaaaaaatccagaatgacatttttgaaatcggcggcgaaaagagagttgatctgaaattcgaattcctaccgtccacaggagcggtttttgacgtgctggttccccagtatataaaaggcgtaatttacggagcgatggtggaagcgtacgcgagcgaacagagttcgcgtatgaaagcgatggatgaggcttccaaaagcgccgaagatatgctcgcgtctctgaagataagctacaaccgcgcacggcaggcgggcattacacaggaaatggcggaaataacgggcggttctactgcgttagccgatcactag

SEQ ID NO: 32606 - protein, 189 aa, Unknown
  Obtained from environmental sample
  DOMAIN (1)...(186): ATP synthase
  misc_feature (1)..(189): Xaa is any amino acid
MQNPVLIVIGGSVGYRYFTHSPYKILENFSFHPQIPTVEHAAEVSEYVVSQYLWGVFDSIHIVYTHMFSMVKLLPTKHQIIPLVKEKIQNDIFEIGGEKRVDLKFEFLPSTGAVFDVLVPQYIKGVIYGAMVEAYASEQSSRMKAMDEASKSAEDMLASLKISYNRARQAGITQEMAEITGGSTALADH

SEQ ID NO: 32607 - DNA, 813 bp, Unknown
  Obtained from environmental sample
  misc_feature (1)..(813): n is a, c, g, or t
ttgaaagaagaaaaaaatccattccacctgaaatattttgtccgaataaagaaagggaaaacaggcgagaaaatggcggagatagttgtttttcacgccaaaggatactttaattttaaggacactcttaaaaatatatattgccagaaagaaatttttaaaacaaacagctttcttatgaatttttcagaaaaccctttggaaaaagcaaatatagcggggggctatgaatcctggtataaccactacacaaacattaacgaaaaaataattctcgaagatttatacgcattggggaaaacggaaaacctgattaaattatggtttatagacagaaataaaaaagcggtatttcaaattgatgatggctgggaaaaggccgttggcgaatgggaaattgacgtttcgcgcttcccgaatgggcttaaagcaatagcggaaaaaatcgaaggcttagggtatattcccggcatttggctcgccccgtttttggttacacgcagatccaaaatcttttccgagaaacccgaatggatactcaaagaatccaatggcggaaaattagtcgcagcgggctttaatcctctttgggataaacagttttactgtttggatatttccagaagcgacgtccttgaatatatggaaaaaataatagatcgcgcaatagacgaatggggttttcgttatttaaaattggattttctttacgccggaatgttaaatggtttttttgcggaaggcggaagcccgtaccagcattacgaaaaagcctgcgcggttttaacaaaagcggcgcgcaaatgccaataa

SEQ ID NO: 32608 - protein, 270 aa, Unknown
  Obtained from environmental sample
  misc_feature (1)..(270): Xaa is any amino acid
MKEEKNPFHLKYFVRIKKGKTGEKMAEIVVFHAKGYFNFKDTLKNIYCQKEIFKTNSFLMNFSENPLEKANIAGGYESWYNHYTNINEKIILEDLYALGKTENLIKLWFIDRNKKAVFQIDDGWEKAVGEWEIDVSRFPNGLKAIAEKIEGLGYIPGIWLAPFLVTRRSKIFSEKPEWILKESNGGKLVAAGFNPLWDKQFYCLDISRSDVLEYMEKIIDRAIDEWGFRYLKLDFLYAGMLNGFFAEGGSPYQHYEKACAVLTKAARKCQ

SEQ ID NO: 32609 - DNA, 570 bp, Unknown
  Obtained from environmental sample
  misc_feature (1)..(570): n is a, c, g, or t
ttgagagaagaaatcggtatgcagagactttttatatcagtaaactgtgatgaaaaagtaaaaaaacagattctctctgtgcaggaaaaaattaaagcgtcgtctataaaaggaaatttctcattacctgaaaatctgcacctaacgcttgtctttattggtgaaactcccgatgatacaatacagccaataatttctgtaattgacaaagcgcttataccgcctgttgcaccttttgcgcttacctttacgacaacaggttattttaaacacggtaataaagaactatggtggataggaacggatcgaaatgatatgaatcttgatattctaaaaacaatcagacagcgaattacagatgatttaccttcaaaaggcataaattttgacaatagaccttttaatccgcatcttactctcggcagagaaataaagcatgaattacctattattattccaaaacaagaaattatatttccggtaacccgtatcagcctgatgaaatcggaacgtattagcgggaaattaacacatacggaaatatttggaaaggatttaaaaggaaagtaa

SEQ ID NO: 32610 - protein, 189 aa, Unknown
  Obtained from environmental sample
  DOMAIN (14)...(95): 2',5' RNA ligase family
  misc_feature (1)..(189): Xaa is any amino acid
MREEIGMQRLFISVNCDEKVKKQILSVQEKIKASSIKGNFSLPENLHLTLVFIGETPDDTIQPIISVIDKALIPPVAPFALTFTTTGYFKHGNKELWWIGTDRNDMNLDILKTIRQRITDDLPSKGINFDNRPFNPHLTLGREIKHELPIIIPKQEIIFPVTRISLMKSERISGKLTHTEIFGKDLKGK

SEQ ID NO: 32611 - DNA, 669 bp, Unknown
  Obtained from environmental sample
  misc_feature (1)..(669): n is a, c, g, or t
gtggcgcgggttaccgcgtcggaagcttccattataacggcgtccattccggtaataacaatgatcgccgattggttcatggcaaaagcatcattccatgtttcgcataacaatgcgccgcatgaacatgcgccgcatgaacatgcgtcgcagcttggatggaaatcatggttgggggcgtttatttccatcgccggagtcgcgttggtcgccggagtttctttttctctctcggggagcatatccggttatgtttacatgggaggagccgcattgtgctgggttggctacagcctgcttacccgccctctctttgacaggaaaagatcccgcctctatatcgtgttttggcaaaacttttttgggtttcttggattacttccctttgctatgctggaatacaaaagctggggcgatcccacattgccggttatgcttcatgtgatttttcttgctttgggttgttccgctcttgggtactggctctacgctcacgcaatggaaacactgggagtatcaataacgtcggtgtttatcaatttgattccggtagtaacggtaattgccggatacatcgttctgcatgaaaggcttacccttctgcaaggcgcaggagccgcgctggttcttgccggtgtatatttaacaatactgccgcggcgcaaataa

SEQ ID NO: 32612 - protein, 222 aa, Unknown
  Obtained from environmental sample
  DOMAIN (92)...(218): Integral membrane protein DUF6
  misc_feature (1)..(222): Xaa is any amino acid
MARVTASEASIITASIPVITMIADWFMAKASFHVSHNNAPHEHAPHEHASQLGWKSWLGAFISIAGVALVAGVSFSLSGSISGYVYMGGAALCWVGYSLLTRPLFDRKRSRLYIVFWQNFFGFLGLLPFAMLEYKSWGDPTLPVMLHVIFLALGCSALGYWLYAHAMETLGVSITSVFINLIPVVTVIAGYIVLHERLTLLQGAGAALVLAGVYLTILPRRK

SEQ ID NO: 32613 - DNA, 321 bp, Unknown
  Obtained from environmental sample
  misc_feature (1)..(321): n is a, c, g, or t
atggttcccgaaagatatttttttaagggacactttccgcagtaccctgtcgtacccggcgtaatccttgtggaaacaatggcccagtcgggcggcgcggggcttcgcaagtgcggcgcgcttggcgcggattctcttttctttttcgcgtctgtcgataaagtaaagttccgccgtcaggtacgcccgggcgacgaagtccgctgcgaaattaaaaacttgcgggtatcccagaaaatgatcaaacaatccggtatagcatacgtcggcgatgaagtcgccgccgaagcggaatggatgtgccttgtgggaaattcataa

SEQ ID NO: 32614 - protein, 106 aa, Unknown
  Obtained from environmental sample
  DOMAIN (15)...(96): Thioesterase superfamily
  misc_feature (1)..(106): Xaa is any amino acid
MVPERYFFKGHFPQYPVVPGVILVETMAQSGGAGLRKCGALGADSLFFFASVDKVKFRRQVRPGDEVRCEIKNLRVSQKMIKQSGIAYVGDEVAAEAEWMCLVGNS

SEQ ID NO: 32615 - DNA, 1269 bp, Unknown
  Obtained from environmental sample
  misc_feature (1)..(1269): n is a, c, g, or t
atgaagtcgccgccgaagcggaatggatgtgccttgtgggaaattcataaattgattgttaaaccaatggttcgcaacaatatttgcctgaacagccatcccgccggatgcgccgtatctgtgaaaaggcaaattgaatacgcaaagaaaaatttatcgccggttgattataaaactccgaaacttgcgcttattatcggctgttcaaacggttacggacttgcaagtcgtattgccgcggcattcggatacggagccgtaactgtagggctttcaaaagaaaaggcggcttccgataaacacaccgctacgcctggttattacaacaatgaagcgtttgaccgcgaggcggcaaaggcggggcttatttccagaactctggacggcaatgcgtttctgggcgagatgaaagcggaaaccgcaaaggctgtccgcgaggcggcggaagaagcgaagatacagcccaagatcgatttaattatttattcgctggcatctcccgtaagaacctgtccaaagacaggtatcctgtataaatccgcgattaaacctgtgggagaaccttactccggcaagaccctcaacatgatgaacggaacttttacagttaccgaagcggaacccgctaccgaagatgaaatctacaatacaataaaagttatgggcggcgaggactgggagtactggatggaagcgctgtacaaagaaggactgctctcccccaaaacaagaaccgtcgcttattcgtaccttggaccggaacattcatggccgatttacaaaaacggcacgataggaaaagccaaagaagatttggaaagagcctgcgttgaaataaacaaaacatacgcggagccgggcaaaatagcgggcgcgtgggtttccgtaaacaaagcgctcgttacccgttcaagcgcggtaattccgattattcccctttacatttcatgcttgttcaaagtgatgaaagatatgaatcttcacgaaggctgtatccagcagattgtacgcctgtaccgcgaccgcctgtacgccgccgaaagcggcgacccggaaatggtgcctgttgaccgcaaggggcgcatccgcattgacgactgggaaatgcgcgaagacgtgcaaaaggcgactatggaaaaaatgaaaaatgtaacgccggagaatgtttttacacaaaccgatgtcgcggggttcaagcacgatttccttgaagcgcatggttttgatgttgcaggcgttgattacgacgcggatgttaacatagggtaa

SEQ ID NO: 32616 - protein, 422 aa, Unknown
  Obtained from environmental sample
  DOMAIN (18)...(419): Short-chain alcohol dehydrogenase
  misc_feature (1)..(422): Xaa is any amino acid
MKSPPKRNGCALWEIHKLIVKPMVRNNICLNSHPAGCAVSVKRQIEYAKKNLSPVDYKTPKLALIIGCSNGYGLASRIAAAFGYGAVTVGLSKEKAASDKHTATPGYYNNEAFDREAAKAGLISRTLDGNAFLGEMKAETAKAVREAAEEAKIQPKIDLIIYSLASPVRTCPKTGILYKSAIKPVGEPYSGKTLNMMNGTFTVTEAEPATEDEIYNTIKVMGGEDWEYWMEALYKEGLLSPKTRTVAYSYLGPEHSWPIYKNGTIGKAKEDLERACVEINKTYAEPGKIAGAWVSVNKALVTRSSAVIPIIPLYISCLFKVMKDMNLHEGCIQQIVRLYRDRLYAAESGDPEMVPVDRKGRIRIDDWEMREDVQKATMEKMKNVTPENVFTQTDVAGFKHDFLEAHGFDVAGVDYDADVNIG

SEQ ID NO: 32617 - DNA, 843 bp, Unknown
  Obtained from environmental sample
  misc_feature (1)..(843): n is a, c, g, or t
ttggaaggcgaagtttttggggaatgcgctggagacattcagcggcaatacgtccgaccgccgggagttggaatctctgcgccaagagaacgatcggctggtacatatggtcggggaactgacgatcgacaacaacttcttaaaaaaaaacttgaagaagttgaacctgttgtgaggcaaaacatggtggaaaaacaagatgaactgagcctatctcggcagtgccgcctcctttctgtcgggcgtacgtccgtgtactaccgcccccaagaaaacggccggacgctggatttgatgcggcggatagacgaactttacaccgaagacccgacctacggcgcccggcgtatgtgcgccgttttgcgcaacgcgggggttaaaatcgggcggtataaagtacgccggttgatggggaagatggggttggaggccatttatcgcaagcctaaactctcggaaccgcaccccgggcacaaggtttacccctacttgttgcgcggagtgaaggtcacccgtgtcaatcaggtctggagcacggacatcacgtacatccggctgcggcacggctttgtgtatcttacggctgttatcgactggtacagtcgttgcgtgctgtcgtggcgtctctcgacgagccttgacacggcgttttgcgttgaagcgcttgaggaagccgtcgagcgttacggcaccccgaaagtcttcaacaccgatcaaggggcgcagtttaccagcacggcctttacggatgtcttgaagaaacacggcgtgaaaatcagcatggacggcagaggcagggcgtggacaacgtcttcgtcgagcggcttgctcggccgaatctga

SEQ ID NO: 32618 - protein, 280 aa, Unknown
  Obtained from environmental sample
  DOMAIN (169)...(280): Integrase core domain
  misc_feature (1)..(280): Xaa is any amino acid
MEGEVFGECAGDIQRQYVRPPGVGISAPRERSAGTYGRGTDDRQQLLKKKLEEVEPVVRQNMVEKQDELSLSRQCRLLSVGRTSVYYRPQENGRTLDLMRRIDELYTEDPTYGARRMCAVLRNAGVKIGRYKVRRLMGKMGLEAIYRKPKLSEPHPGHKVYPYLLRGVKVTRVNQVWSTDITYIRLRHGFVYLTAVIDWYSRCVLSWRLSTSLDTAFCVEALEEAVERYGTPKVFNTDQGAQFTSTAFTDVLKKHGVKISMDGRGRAWTTSSSSGLLGRI

SEQ ID NO: 32619 - DNA, 330 bp, Unknown
  Obtained from environmental sample
  misc_feature (1)..(330): n is a, c, g, or t
atgccaagaaagaccacaggagcgaagccgttcggtacccggaagacgtatgacgacgcattcaaagtgaaggtcgtcctagaggcgttacgcgagactatgccgctcagcgaacttgcgtcgaagtaccaagtccaccccaatcagatcagccattggaaggcgaagtttttggggaatgcgctggagacattcagcggcaatacgtccgaccgccgggagttggaatctctgcgccaagagaacgatcggctggtacatatggtcggggaactgacgatcgacaacaacttcttaaaaaaaaacttgaagaagttgaacctgttgtga

SEQ ID NO: 32620 - protein, 109 aa, Unknown
  Obtained from environmental sample
  DOMAIN (14)...(99): Transposase
  misc_feature (1)..(109): Xaa is any amino acid
MPRKTTGAKPFGTRKTYDDAFKVKVVLEALRETMPLSELASKYQVHPNQISHWKAKFLGNALETFSGNTSDRRELESLRQENDRLVHMVGELTIDNNFLKKNLKKLNLL

SEQ ID NO: 32621 - DNA, 564 bp, Unknown
  Obtained from environmental sample
  misc_feature (1)..(564): n is a, c, g, or t
atggttatgccctttgttaaacgtcctcaccccgattattaccaagccgccatagccagctacattttaggcggcagctcattttcttctagacttacaaacacagtcagaacccaaaacgggcttgcatattccatttacagctttgccaaatccgattacgaagatgttgctctctctggaataagtttgcaaacaaaggtggaatctgccaaaactgctttgcagttgataagggaagaggtgctaaaactcggaaaagaaggaccaacagacgaagaacttaattttgcaaaaaaatctcttatagaatctatgcccgctatgtttgaaaacgcagaaacaacagcaaacacttttgcggtgtctgaattcaatggtcgcagtttggagcattacagggaatatcccgaaaaattaaaagctgttactaaagaacaagttaaggcaatgactgcaaaatattttaatcccgattcattcaaagttagcattgttggaaccgctaacaaaatgggtttggacagcgtgacgattatccctatttctgcgcttgaattttaa

SEQ ID NO: 32622 - protein, 187 aa, Unknown
  Obtained from environmental sample
  DOMAIN (4)...(102): Peptidase M16 inactive domain
  misc_feature (1)..(187): Xaa is any amino acid
MVMPFVKRPHPDYYQAAIASYILGGSSFSSRLTNTVRTQNGLAYSIYSFAKSDYEDVALSGISLQTKVESAKTALQLIREEVLKLGKEGPTDEELNFAKKSLIESMPAMFENAETTANTFAVSEFNGRSLEHYREYPEKLKAVTKEQVKAMTAKYFNPDSFKVSIVGTANKMGLDSVTIIPISALEF

SEQ ID NO: 32623 - DNA, 1170 bp, Unknown
  Obtained from environmental sample
  misc_feature (1)..(1170): n is a, c, g, or t
ttgtggatctcgggctttgaatatgtggggcccattaacgggcataatatcctccagttggagagggtgttaagggatgtaagccagcttgagcgtccggtagtaatccacatagtcaccagtaaaggcaaggggtacgcttttgccgaggatgatccgggaagctatcacggcgtagggacattttcaataagcggcgggcttccttccaacggcatcaaagatactgcccgtcttacatttacagactctttcgccgaagccctgcttgcggcggcgggccgggaaaaaaccgttgtcgcgttaaccgcggccatggaacagggcaccgggctttcgcttttcaaaaagacatatccaaaccgctttttcgacgtgggcatcgcggagggccatgccgtcactttttccgcgggactggcggcgcaggggcttaaaccggttgtggcaatttactctacttttatacagcgcgcgattgatcaggcgatccacgacgtatcactgcagaaactgcctattgtgtttgtccttgaccgaagcggttttgtaagcggagacggtgagacccatcaggggctttttgacatcgctctgttccgcatgatccccaacatggttatccttgccccggcaagcggcggcgaacttgctcttatgctggattacgcaatcagcctggatgtccccgccatgatccgctacccaaaacacccctgccccgccgaactgcctgtgttttcgcttcccctggaaaaaggcaggggggtatggctcacgcgtaatcagaacagccgcatctgcctggcctttaccgggagcctttatccgcaggcgctcggcgcgctgcagatcctgaaagacaaggggaaaatggcggacgcgtacaatctccgcttcctaagcctggttgatgaggattacctggccgatatcctgaacagttacgaccttgtggcatttgccgaggaaggggtgaaacagggcggcttcggcgaatatgccgccgccctggcccgctgccggaactgcagggcgcggataattattttggcggcggacgcggatttcgccgcccgcggccgcgccctgggaaccagggaggaactgctaaaagagaatggccttgatggcgaagggattgcggacaaaataataaataacaggtaa

SEQ ID NO: 32624 - protein, 389 aa, Unknown
  Obtained from environmental sample
  DOMAIN (256)...(381): Transketolase, C-terminal domain
  misc_feature (1)..(389): Xaa is any amino acid
MWISGFEYVGPINGHNILQLERVLRDVSQLERPVVIHIVTSKGKGYAFAEDDPGSYHGVGTFSISGGLPSNGIKDTARLTFTDSFAEALLAAAGREKTVVALTAAMEQGTGLSLFKKTYPNRFFDVGIAEGHAVTFSAGLAAQGLKPVVAIYSTFIQRAIDQAIHDVSLQKLPIVFVLDRSGFVSGDGETHQGLFDIALFRMIPNMVILAPASGGELALMLDYAISLDVPAMIRYPKHPCPAELPVFSLPLEKGRGVWLTRNQNSRICLAFTGSLYPQALGALQILKDKGKMADAYNLRFLSLVDEDYLADILNSYDLVAFAEEGVKQGGFGEYAAALARCRNCRARIIILAADADFAARGRALGTREELLKENGLDGEGIADKIINNR

SEQ ID NO: 32625 - DNA, 972 bp, Unknown
  Obtained from environmental sample
  misc_feature (1)..(972): n is a, c, g, or t
atgaaaaaagtttacagcaagatagaatccataactggaagtgttattaccgtccgcgccgagggggttcgctacggagacctcgcggaggttgatacggtgttcggctcatctctcgccgaagtgaaccggcttgaaaaagacgttgtttcattacaggtattcgcaggcggccgcggtatttccacaggcgacacagtccgcttcctcgggcgccccatgcaggttccgttctccgagaatcttatgggcagagtgttctcaggttccggcaaaccgcgcgacaacggtcctgcgttgcacgaaaacttaatcccaatcggcggcccatctgtaaatccgtcccagcgcattatcccgcgcaagatgatccgcacaggtatccccatgatcgacctctttaacacactggtcgtatcgcagaaactccctatcttctccgtatcaggcgaaccttacaacgaactgcttgcgcgtatcgcgatgcaggcggaagttgacgtaatcgtcctcggcggcatgggtcttaaatacgacgactatctttactttaaggatactcttgaaaacggaggcgctcttgcgcgcaccgtaatgttcatacataccgcaagcgaccccacggtcgaatgtcttatgataccggacatgtccctcgcggtagccgaaaagttcgcccttcagggtaaggacgttttagtactccttaccgacatgacaaacttcgcggacgccatgaaagaaatctcgattattcaggaacaggtaccaagtaaccgcggttatccgggcgatctttacagccagcttgccagccgttacgaaaaagccgtagactttgaaacagccggttccatcaccgtcctcggagttaccactatgccgggcgacgacgtaacgcaccccgtaccggacaataccggatacattacggaaggccagtactatctaagaacggctcggccgatctga

SEQ ID NO: 32626 - protein, 323 aa, Unknown
  Obtained from environmental sample
  DOMAIN (8)...(71): ATP synthase alpha/beta family, beta-barrel domain
  misc_feature (1)..(323): Xaa is any amino acid
MKKVYSKIESITGSVITVRAEGVRYGDLAEVDTVFGSSLAEVNRLEKDVVSLQVFAGGRGISTGDTVRFLGRPMQVPFSENLMGRVFSGSGKPRDNGPALHENLIPIGGPSVNPSQRIIPRKMIRTGIPMIDLFNTLVVSQKLPIFSVSGEPYNELLARIAMQAEVDVIVLGGMGLKYDDYLYFKDTLENGGALARTVMFIHTASDPTVECLMIPDMSLAVAEKFALQGKDVLVLLTDMTNFADAMKEISIIQEQVPSNRGYPGDLYSQLASRYEKAVDFETAGSITVLGVTTMPGDDVTHPVPDNTGYITEGQYYLRTARPI

SEQ ID NO: 32627 - DNA, 606 bp, Unknown
  Obtained from environmental sample
  misc_feature (1)..(606): n is a, c, g, or t
ttgggttcggttacaatcggcggaaccgtcagccctgcgggcggtaactttgaggagccggtaacacaggcgacactgaaagttgtcggggctttccacggactctccagggaacgttctgacgcgcgaaagttcccggcgattcatcctttggattcatggtcaaagtacaaggggatcatctcaggcgagaaagtcgcctatgcccacagcttcatgcgccgcgggacagaagtcgagcagatgatgaaagtcgtaggcgaggaaggcacgagtatagaagactacataatatttttgaagggcgatcttatcgactcggtttacttccagcaaaactcgtttgacgaagtagacgcggcggttaaaccggataggcaaaagtacactttcgataaactgcttgtgatattggcttcgaagttcagctttcccgacaagaacgaggcacgaagctggtttaaccggttaaggcagaaattcctggattacaatggttccaaatggaaggaagaacgcttcaacacccttgaaagagaaatcgaggatacggtgaagactcaatcgcagggcctggataaggccgccgaaaaaatcttgggttag

SEQ ID NO: 32628 - protein, 201 aa, Unknown
  Obtained from environmental sample
  misc_feature (1)..(201): Xaa is any amino acid
MGSVTIGGTVSPAGGNFEEPVTQATLKVVGAFHGLSRERSDARKFPAIHPLDSWSKYKGIISGEKVAYAHSFMRRGTEVEQMMKVVGEEGTSIEDYIIFLKGDLIDSVYFQQNSFDEVDAAVKPDRQKYTFDKLLVILASKFSFPDKNEARSWFNRLRQKFLDYNGSKWKEERFNTLEREIEDTVKTQSQGLDKAAEKILG

SEQ ID NO: 32629 - DNA, 423 bp, Unknown
  Obtained from environmental sample
  misc_feature (1)..(423): n is a, c, g, or t
atggtgacaatttttaaacttacaagcaacatagaaaggataggcgatcatgccgtacaccttgcgcgcgccgccagaaaacttgctaaaaagggcgattcgcttttcatgacgcagggacattttgaagctatggcggtaacgggacaggaaatgattcgcgccgctatttcggcatttatggcgcaggacgcgcaggcggcgcgggaagccgcggcaatggacagcaagattgacgacgaacataaggcgcttaccgaagaaattttaaaactaatgaaaaaaaatcccgacatggttaaagacgcgcttcagatcattcatacgtcaaaccagcttgaacggcttggagatcacataactaatatttgcgaagcgattatctatatgatagaaggaaaacacgaggaattaaatgagtaa

SEQ ID NO: 32630 - protein, 140 aa, Unknown
  Obtained from environmental sample
  DOMAIN (42)...(127): PhoU family
  misc_feature (1)..(140): Xaa is any amino acid
MVTIFKLTSNIERIGDHAVHLARAARKLAKKGDSLFMTQGHFEAMAVTGQEMIRAAISAFMAQDAQAAREAAAMDSKIDDEHKALTEEILKLMKKNPDMVKDALQIIHTSNQLERLGDHITNICEAIIYMIEGKHEELNE

SEQ ID NO: 32631 - DNA, 648 bp, Unknown
  Obtained from environmental sample
  misc_feature (1)..(648): n is a, c, g, or t
atgagtaaggctgtaattcttatcatagaagacgatcccgaaattcaggagttgctttctcacacaatggaaaaagaaggatggaaactcttacaggtaaaaacaggcgaagacggcataaaaattttaaggacaaaaaaagtaaattgcattttacttgatattatgcttcccggtatggatggtttaaacgtattaaaaaaaataaaagagattgaacaatgcaaatatattccggttatcatggcgaccgcaaagggcgaagaagcggatattgtaacagggctggaattaggcgcggatgattatgttgttaagccgtacagcccgaaagtattgattgcgagaatacgggtcgctctgcggcggcaggaagaaaacggggttccgcagtctgttactgtttggcagcagggggaactgaaattagacgccgcccgtcataccgcgtataacggcgataaacaactcgaccttttcgccacggaattcgccctgcttaaacattttctttctaatcctgaaattgttttttcgcgtaaccagattattgccgccatacacggacaggactacccggttacagaccgttccgttgacgtgcagatattgngtctgcgtaaaaacttggggactcaggggatatga

SEQ ID NO: 32632 - protein, 215 aa, Unknown
  Obtained from environmental sample
  DOMAIN (154)...(215): Transcriptional regulatory protein, C terminal
  misc_feature (1)..(215): Xaa is any amino acid
MSKAVILIIEDDPEIQELLSHTMEKEGWKLLQVKTGEDGIKILRTKKVNCILLDIMLPGMDGLNVLKKIKEIEQCKYIPVIMATAKGEEADIVTGLELGADDYVVKPYSPKVLIARIRVALRRQEENGVPQSVTVWQQGELKLDAARHTAYNGDKQLDLFATEFALLKHFLSNPEIVFSRNQIIAAIHGQDYPVTDRSVDVQILXLRKNLGTQGI

SEQ ID NO: 32633 - DNA, 894 bp, Unknown
  Obtained from environmental sample
  misc_feature (1)..(894): n is a, c, g, or t
atggccatgaaaattgaaaactgtcggaatttgctcccgtttttgccggttatatcagcctgtctgctcctccttctgggctgcggattattatcaggctgctacacattaaaacagggcgttaccttgctggggtatcttaacagcgcagtccctctggaacagattgacaacgaagactttatacggcttgttaaggaaatccgcgcttttgcaatggatgaattgggacttaaagaaagccgcaactacacgcgttttgtaaaacttgatagaaactaccttgccgcggtcgtctccgcctcggctaaggattcgttccgccgtcatgaatggaattatcccgttgtaggacggatgccctacaagggtttttttaatattgaagatgcgcgtaaggaacgggcaaaactggaaaaaaaagaccttgatgtctggattaggggggttagcgcctttagcacgctgggctggtttaaagaccctctttattcctatatgacggattatcctccggcaaacctggcggatttgatcattcatgagcttgttcacgctacggtattcattaaagagcaggtcaagttcaacgaagaactggcggaatttataggcagcgaaggggcaaggcttttcataatagcgcgtttcggggaagattccgacgaataccggcaaatattttcatcagacaaagacagccaaaattatgttgagtttcttcaggaattgatcgcggaacttaatgttctttataacagtgaaatcagcagggcggaaaaattaatggaaaaggcgcggataattaattccgcgaaagagcggtttaacgcgaagtatgacagccgtttttcaagcgataattacaggggggtttgcgggaattaccgataa

SEQ ID NO: 32634 - protein, 297 aa, Unknown
  Obtained from environmental sample
  misc_feature (1)..(297): Xaa is any amino acid
MAMKIENCRNLLPFLPVISACLLLLLGCGLLSGCYTLKQGVTLLGYLNSAVPLEQIDNEDFIRLVKEIRAFAMDELGLKESRNYTRFVKLDRNYLAAVVSASAKDSFRRHEWNYPVVGRMPYKGFFNIEDARKERAKLEKKDLDVWIRGVSAFSTLGWFKDPLYSYMTDYPPANLADLIIHELVHATVFIKEQVKFNEELAEFIGSEGARLFIIARFGEDSDEYRQIFSSDKDSQNYVEFLQELIAELNVLYNSEISRAEKLMEKARIINSAKERFNAKYDSRFSSDNYRGVCGNYR

SEQ ID NO: 32635 - DNA, 666 bp, Unknown
  Obtained from environmental sample
  misc_feature (1)..(666): n is a, c, g, or t
atgttattcattatgattaaattgatgcgtaaaacgataggcgctctgttgccgtgcgttgcgattactatattagtcatcaacgggtgcgcggataagaagaaaattgagatgaaagccgccgctttggatgagcgggttgccgttacgacgaccgtgaccgatacggaatctcaaactatagataaggatatggctttgccatgtgttagcgctaaggaaaagaggttaacgtgcaaaagaaacgcgaatgggttgcttgaatgtctcgacgcgagtaatttccgtatgctcgaaaagggcgtaccggaaaaaaatcgtgacacgtggtatcgcttttttgtcggagacaatgactcttgccttagatccgccggattcaaagataaaaattgggttacaaggtatgaagtgaggaatgattggatagatccgagatttggagcgtataggtttgacgacttaacaatcgccgacggctattatcacacgagaacagggaaaaaagtcggaaaagacagcgtattatacgttctcgatcaggagggttgcatccccaactgcgagagcgagggttttattgtttttaatgatagaaaacgcgatagacagggggtgtttaaccgtaacggcgatgtcgccatacctgccgaatataatgagtga

SEQ ID NO: 32636 - protein, 221 aa, Unknown
  Obtained from environmental sample
  SIGNAL (1)...(29)
  misc_feature (1)..(221): Xaa is any amino acid
MLFIMIKLMRKTIGALLPCVAITILVINGCADKKKIEMKAAALDERVAVTTTVTDTESQTIDKDMALPCVSAKEKRLTCKRNANGLLECLDASNFRMLEKGVPEKNRDTWYRFFVGDNDSCLRSAGFKDKNWVTRYEVRNDWIDPRFGAYRFDDLTIADGYYHTRTGKKVGKDSVLYVLDQEGCIPNCESEGFIVFNDRKRDRQGVFNRNGDVAIPAEYNE

SEQ ID NO: 32637 - DNA, 879 bp, Unknown
  Obtained from environmental sample
  misc_feature (1)..(879): n is a, c, g, or t
atgaagacggtggccgacgggtcgaaccccaaggccccggagagattcgtctgccccggggagctgggctcctgcggcggctgccactacaacccgtggctcgacgtggaggaggacgcccggatgagctacgtctacaagggcgccaagaacaccatcgacaacatgctgctgccggcgtcgctcttcgacggcgaagggtactcctacctccgcggctccttccaagccttcacctgggacgggcggctgctgaaagacggcgtaccctaccgccggcagatgtactacaagggaaaggagaggtaccacaaggcagagggctactccgaccacctcccgataaccgccaaatttgtcaggtcaaagctcctctcagccgacagcgtcaacgccccctgcgcccagatcaaccccaatctggcgataggcgacttcgccgcctcgaccgacggctggctgaacggcgacagccgcttctccgtcgaacgcgacggcaaacacgccaaaaccggctcccacagcctgaaaataagcggcctgcacgaatcggaaaaccacaccgccgccaaggcgacgcttacctcggcgccgtcgcaaaaattcctaacgctgaacgcccgaggcgagggaaagctgtcaatccgcctgagacgcccccaaggaaaatggatctaccacaacgccccggatttcgcgcaaaaaaagacccccaagtacaacgcttggaaatccgacaagtggacagcacttaaactgccgctaccgccacaacagcaaggggtaagcgatatcaataataatgacatagaggtggaaatccgtgccggtaagggggataagtttttagtgtggattgaccgggtgaggttggaataa

SEQ ID NO: 32638 - protein, 292 aa, Unknown
  Obtained from environmental sample
  misc_feature (1)..(292): Xaa is any amino acid
MKTVADGSNPKAPERFVCPGELGSCGGCHYNPWLDVEEDARMSYVYKGAKNTIDNMLLPASLFDGEGYSYLRGSFQAFTWDGRLLKDGVPYRRQMYYKGKERYHKAEGYSDHLPITAKFVRSKLLSADSVNAPCAQINPNLAIGDFAASTDGWLNGDSRFSVERDGKHAKTGSHSLKISGLHESENHTAAKATLTSAPSQKFLTLNARGEGKLSIRLRRPQGKWIYHNAPDFAQKKTPKYNAWKSDKWTALKLPLPPQQQGVSDINNNDIEVEIRAGKGDKFLVWIDRVRLE

SEQ ID NO: 32639 - DNA, 741 bp, Unknown
  Obtained from environmental sample
  misc_feature (1)..(741): n is a, c, g, or t
atgccaatggtcctcgatgatggccgcgtaatagcgctgggccaagtagtccaatttgaagaagccagaaccccaacgctgatccgccgcgaattcggacagccctacatcggcctaaacatcaggacagacggcgaccttggcggcgcggcatcaaagatagacaaactgctaaaggctaccaagatgccccaaggcacccacgcagcctttggcggcaaaattgtcgaggctagagagacaaacaggcgcttggccatagccgtgggcatctctgcgctgctggtggccggcctattgtatttcgccctcaagcgctggcgggaagtattgattgtcttggccacgctgccggacgcattcgcagggggcatcgtcgccctgtggctcttcggcgagacttggaacataagttcaatcgttggcatgatcggactctttggcgttgcagtgcaaaatagcctagtgctgatcagccaggcgcggggcttcatggcaaagggcctgccctttcacgacgcattggaagaagccagccttggcaggctgcggcccaaattgatgacagccggggcaaccatattggggctgcttcccatactcttgggtttcagcggctccgaattggaacgccccttggctgtagtccttattggcggcctgatgaccagcacattctttaccctattggccctccccagcttttacgcttgggtgggaacccccaaggaaaggggctag

SEQ ID NO: 32640 - protein, 246 aa, Unknown
  Obtained from environmental sample
  misc_feature (1)..(246): Xaa is any amino acid
MPMVLDDGRVIALGQVVQFEEARTPTLIRREFGQPYIGLNIRTDGDLGGAASKIDKLLKATKMPQGTHAAFGGKIVEARETNRRLAIAVGISALLVAGLLYFALKRWREVLIVLATLPDAFAGGIVALWLFGETWNISSIVGMIGLFGVAVQNSLVLISQARGFMAKGLPFHDALEEASLGRLRPKLMTAGATILGLLPILLGFSGSELERPLAVVLIGGLMTSTFFTLLALPSFYAWVGTPKERG

SEQ ID NO: 32641 - DNA, 471 bp, Unknown
  Obtained from environmental sample
  misc_feature (1)..(471): n is a, c, g, or t
ttgttatatcatcagtttcaaaataactgtcagccatttgccaccgccccggattccagcttctggaaagccgccatcctgctgaagaaaccgccctccgttacaaggcgcgacgggcttccgtactccaagattttccccttatctaaaacaagcacattatcagcgtattttaaggaagaaaccctatgcgaaataataatcgtagtccgtccctttctttcccttcttaacgcttccagtatttttaactccgtttcattatcaaccgcggacagggaatcgtctaaaacaaggaattcgctgttcatgatgactgcccttgcgattgcggtcctttgcttctgtccccccgacaacgttaaaccgcgctcccctacaagggtattttttccatcgcggaaaanacccaaatctttgttcaagaagcgaagganatggcgttgtcaaccgccgaatcttttgcngtag

SEQ ID NO: 32642 - protein, 156 aa, Unknown
  Obtained from environmental sample
  DOMAIN (94)...(136): Protein of unknown function (DUF1602)
  misc_feature (1)..(156): Xaa is any amino acid
MLYHQFQNNCQPFATAPDSSFWKAAILLKKPPSVTRRDGLPYSKIFPLSKTSTLSAYFKEETLCEIIIVVRPFLSLLNASSIFNSVSLSTADRESSKTRNSLFMMTALAIAVLCFCPPDNVKPRSPTRVFFPSRKXPKSLFKKRRXWRCQPPNLLX

SEQ ID NO: 32643 - DNA, 396 bp, Unknown
  Obtained from environmental sample
  misc_feature (1)..(396): n is a, c, g, or t
ttgaacaaagatttgggtnttttccgcgatggaaaaaatacccttgtaggggagcgcggtttaacgttgtcggggggacagaagcaaaggaccgcaatcgcaagggcagtcatcatgaacagcgaattccttgttttagacgattccctgtccgcggttgataatgaaacggagttaaaaatactggaagcgttaagaagggaaagaaagggacggactacgattattatttcgcatagggtttcttccttaaaatacgctgataatgtgcttgttttagataaggggaaaatcttggagtacggaagcccgtcgcgccttgtaacggagggcggtttcttcagcaggatggcggctttccagaagctggaatccggggcggtggcaaatggctga

SEQ ID NO: 32644 - protein, 131 aa, Unknown
  Obtained from environmental sample
  DOMAIN (5)...(96): ABC transporter
  misc_feature (1)..(131): Xaa is any amino acid
MNKDLGXFRDGKNTLVGERGLTLSGGQKQRTAIARAVIMNSEFLVLDDSLSAVDNETELKILEALRRERKGRTTIIISHRVSSLKYADNVLVLDKGKILEYGSPSRLVTEGGFFSRMAAFQKLESGAVANG

SEQ ID NO: 32645 - DNA, 474 bp, Unknown
  Obtained from environmental sample
  misc_feature (1)..(474): n is a, c, g, or t
ttgtcaatgatagaatcttttaatcaggatcagagatacaacttgatttgcaaaatggggcttgccattgatatgctggagcaggcttacggcgataattcaaaatggagatggacatttgtcgatatcgaaggccgttttgccgttactgcaaaaaatataattgatttaaaaagcgtatacgagaacatggctcccggagccgaatattatgattccaccgtgtatcaccttcgattggtaaaaaaacttatagcccaggcagcggatcgttaccgtgaaaaatacgagctgagtaccgggcagattcttgattttaaaacggggataaactttcttggcgcgttacgccgcctgcacattgttttgtctgaaagcgaagaagccaatgaaataaaaaagaaattggcaatctggtcaacaaaacttgaaaccgatcataaaaagcaggaagaagccaaaaagagatcatga

SEQ ID NO: 32646 - protein, 157 aa, Unknown
  Obtained from environmental sample
  misc_feature (1)..(157): Xaa is any amino acid
MSMIESFNQDQRYNLICKMGLAIDMLEQAYGDNSKWRWTFVDIEGRFAVTAKNIIDLKSVYENMAPGAEYYDSTVYHLRLVKKLIAQAADRYREKYELSTGQILDFKTGINFLGALRRLHIVLSESEEANEIKKKLAIWSTKLETDHKKQEEAKKRS

SEQ ID NO: 32647 - DNA, 1107 bp, Unknown
  Obtained from environmental sample
  misc_feature (1)..(1107): n is a, c, g, or t
atgagccgtcccaatatctctttaaaggaatacaaggcgcttcttccgtatctgtcgcgttataaagctcagtatataacaggcgttatcttccttataattgtagacgccgctcagattgcgattccccaatttctccgcgccgcaatagacattatttcaagcggtaatttccagtggcggcagataataattttatcgctgtggatgactggcattatggcggttatttcgctggggcgttttttatggcgctattttatcagcggctcttccaggcgcatagaaaccgagttacgcgaagcgttgtacgcccatctgcagaaactctcctgggatttttatcagaaaaataaaatcggcgatatgatggcgcgttttataaacgatcttaacgctatacgaatggcaataggaatgggggttgtcgctctttttgattttattttcatggctacctctattttaattatcatttttattcaggacgctcgttccgcccttgtttcaataatcccattgccccttgttactgttttaattcttcttttcggaagtctggtaggcaaaaaattcttcgccgttcagggaacctattcaaaaatgagcgataacgcgcaggaaacttttgccggtatcagcgtgattaaatcctttgttaaggaatggtggttcattaaaaaattcgccgattcaaatgaagattaccagaaagccaacatggaacttgtgcgcctgtttggtttctttttcccttttatcagttttctttcagggcttacagtcttgattatgattggcatcggcggcttgcgcgtaatgaacggtttaatgactccgggaagccttgtcgcgatgttcaggtatctgtccatgctgatatggccgcttatgggtgcgggttttatggtaaacatgatccagcgcggagcggtcagtcttggaagaataaacgaagttttaaatacaacgccttctatccgcgacagtgaaaatgcgtcaacggctcagcctgaggaaggagttcccgccctggaaatctcaaaccttgaattttcgtaccgaggggaagataccgtcttaaaaggaattaaatttaaaaattga

SEQ ID NO: 32648 - protein, 368 aa, Unknown
  Obtained from environmental sample
  DOMAIN (25)...(297): ABC transporter transmembrane region
  misc_feature (1)..(368): Xaa is any amino acid
MSRPNISLKEYKALLPYLSRYKAQYITGVIFLIIVDAAQIAIPQFLRAAIDIISSGNFQWRQIIILSLWMTGIMAVISLGRFLWRYFISGSSRRIETELREALYAHLQKLSWDFYQKNKIGDMMARFINDLNAIRMAIGMGVVALFDFIFMATSILIIIFIQDARSALVSIIPLPLVTVLILLFGSLVGKKFFAVQGTYSKMSDNAQETFAGISVIKSFVKEWWFIKKFADSNEDYQKANMELVRLFGFFFPFISFLSGLTVLIMIGIGGLRVMNGLMTPGSLVAMFRYLSMLIWPLMGAGFMVNMIQRGAVSLGRINEVLNTTPSIRDSENASTAQPEEGVPALEISNLEFSYRGEDTVLKGIKFKN

SEQ ID NO: 32649 - DNA, 729 bp, Unknown
  Obtained from environmental sample
  misc_feature (1)..(729): n is a, c, g, or t
ttggctgacgggccgccggacgacgacaaaaccggcccgccggtcaaggtggtctcggccgaaggccgggccgccgttctcagccggccggtcttgagcgcccttatcgccgagctttatgtcaaggtgaaggaaaaaccgggcgaaaccctggaacacagcgaccttctggatttccccggctaccgggcccgggaaaagctggaaaacctggacgaggacttgcggaaaccggaaatccttaaaaattgctttctgcggggcaaggtggcctatcttttcgagcgttatatggcccgccgggaaatagcggccatgctcttatgtatcggttactcggtgcagaacaatcccgacctgccccatatcgtcagcgcctgggtccgcgacacccacggggagaacccggcccggcgggccggccggccggtgagcctgttcctggtgctgaccatgttcgaccagcatctgccgcagggcaccagcagcagcgacaccgtcacccgctgggagacgcgccttaacgcctctcttctggatttcttcaagggccacgactggccgcggcaatggtccgaatccgccggccgggcggtgcccttcaacaatgtcttctggctgctgaacttgagctacgcctcctcctttctcgaactggacgagatggatgaccaaggctccaagttttaccgggccaaaggcgtgaggcccgaccaagcccgcggatag

SEQ ID NO: 32650 - protein, 242 aa, Unknown
  Obtained from environmental sample
  misc_feature (1)..(242): Xaa is any amino acid
MADGPPDDDKTGPPVKVVSAEGRAAVLSRPVLSALIAELYVKVKEKPGETLEHSDLLDFPGYRAREKLENLDEDLRKPEILKNCFLRGKVAYLFERYMARREIAAMLLCIGYSVQNNPDLPHIVSAWVRDTHGENPARRAGRPVSLFLVLTMFDQHLPQGTSSSDTVTRWETRLNASLLDFFKGHDWPRQWSESAGRAVPFNNVFWLLNLSYASSFLELDEMDDQGSKFYRAKGVRPDQARG

SEQ ID NO: 32651 - DNA, 489 bp, Unknown
  Obtained from environmental sample
  misc_feature (1)..(489): n is a, c, g, or t
ttggcacaaaaactgccgcgggcggctattttgccggcggtcagcacttcgcaggcggcgcagcggatctgccgggaaaatttgcgcgactatgcggtaatcggttcaaaatttgctgcggctaaatacaatttgtccgtcctgcacgagaacattgccaaacgcgcggacaatatgacgcgttttgtggtcctggccaaggagattcagtacccggcgcgcgggacgattacttcgtttgttttttcctgccgcaaagacaagcccggcggtttgtatgaaattttgggttttttggcccaggataaaattaatatgactaaaatcgagtcgcggccgagtaaaacagcgatgggcgattatattttctttgtggacatcgccggcagtccgcaggataaaaaagtcgccgccgcgttgcgcagtattgagcagcacagcgcgccggatagttttaagatacttggtgtctatcaacgccgcaaatga

SEQ ID NO: 32652 - protein, 162 aa, Unknown
  Obtained from environmental sample
  SIGNAL (1)...(19)
  DOMAIN (78)...(157): ACT domain
  misc_feature (1)..(162): Xaa is any amino acid
MAQKLPRAAILPAVSTSQAAQRICRENLRDYAVIGSKFAAAKYNLSVLHENIAKRADNMTRFVVLAKEIQYPARGTITSFVFSCRKDKPGGLYEILGFLAQDKINMTKIESRPSKTAMGDYIFFVDIAGSPQDKKVAAALRSIEQHSAPDSFKILGVYQRRK

SEQ ID NO: 32653 - DNA, 756 bp, Unknown
  Obtained from environmental sample
  misc_feature (1)..(756): n is a, c, g, or t
atggccgaggggggctttattgtagcgaaagccggcggcggaatagaccgcgtcctttttgccgtttccggccgggaaaaggagcttggcgaagccatgctctccgaagccgcgttatacgacattcaatcctccctggttctgaccggttcaaagtaccctcaaaggaattacagggaactggagcttgttttacgcaattacgggaaaaaggaagaaattaatttaggaccgcttctggttttgggtccggcgacgcttgccgccgtgcatgacgcggcaatataccgccggccgatccttgagcgctatgtggctgtcggcggttcggccgtggcaaaaccccaggtgatgagagtccgcatcggcaagcgcataggcgacctttttgaggaatgcggcggttttacagaccaacctttccgtattgccgtcggctccccgttcctgggaagaacggtgcgcagccttgacgagcctgtgacaaaaaccagttacgcgatatttgccatgctgaaatcccagacaggctatcaccccgaaagggactgcatctgctgcggggaatgcaggcgcgtatgcccggtcggcctggatccggaagagatgtataagcggataattgctcattccgcgttacagggcgcgtcgcacccacagggttcgttggaatgtcatggctgcggctgctgcgaattggtatgcccttccagtctgccgctctccgatataatcatggggagggagcggaaatga

SEQ ID NO: 32654 - protein, 251 aa, Unknown
  Obtained from environmental sample
  misc_feature (1)..(251): Xaa is any amino acid
MAEGGFIVAKAGGGIDRVLFAVSGREKELGEAMLSEAALYDIQSSLVLTGSKYPQRNYRELELVLRNYGKKEEINLGPLLVLGPATLAAVHDAAIYRRPILERYVAVGGSAVAKPQVMRVRIGKRIGDLFEECGGFTDQPFRIAVGSPFLGRTVRSLDEPVTKTSYAIFAMLKSQTGYHPERDCICCGECRRVCPVGLDPEEMYKRIIAHSALQGASHPQGSLECHGCGCCELVCPSSLPLSDIIMGRERK

SEQ ID NO: 32655 - DNA, 609 bp, Unknown
  Obtained from environmental sample
  misc_feature (1)..(609): n is a, c, g, or t
atgctcggtgatcattatttcatgtccgacattcccgggcgtgatacgatcaagggcatttccatgaccggcggaacttttgcgtcttataaacaggtattgtccttgtactgtaaagacgttgatgaacggctgccgctccttgaaaaaacgcatgaagagaatatgaacatgtttgttacgcatgtccatgcccttaaaagcgcttccgcttccatcggggcggctgacctttcggcccaggccgccgaacttgaagccgccggcaaggcggggaacatggcttatatcatgacaaatctgccttcctttacgtggcaaatttcagaaacaagcaaaaaaataagcgccgccctcggaacaaacgaggacgcggggcagacaagcctaacaacagaaattccggaagaactggcgaatctgttacgcgatctaaaatccgctttagaagacaaaaaaacctcggagatcgacacggttcttgacgaactgaaccaaaagcagcatggcacacaaatcaaagaattgctggaaaaaatatcggatgacgtgcttatgaccgagtttgaaagcgccgtcaaaaagattgatgaggcgctggggacatga

SEQ ID NO: 32656 - protein, 202 aa, Unknown
  Obtained from environmental sample
  DOMAIN (32)...(104): Hpt domain
  misc_feature (1)..(202): Xaa is any amino acid
MLGDHYFMSDIPGRDTIKGISMTGGTFASYKQVLSLYCKDVDERLPLLEKTHEENMNMFVTHVHALKSASASIGAADLSAQAAELEAAGKAGNMAYIMTNLPSFTWQISETSKKISAALGTNEDAGQTSLTTEIPEELANLLRDLKSALEDKKTSEIDTVLDELNQKQHGTQIKELLEKISDDVLMTEFESAVKKIDEALGT

SEQ ID NO: 32657 - DNA, 843 bp, Unknown
  Obtained from environmental sample
  misc_feature (1)..(843): n is a, c, g, or t
ttgacgccgctctatctcgcgcaggctatatgctggtctttggaaaacatggacgttccgtactgtttagtaaaaaatgagaaagattttgccgaagccttataccgtgaagaatggttttatatattttccggctatgggctttatgatgaaatcaagcccttaatggacaagcccgacagcgctttcgcgggcgggaaaaaaccgtccctcgcgctgatggtagaatggggaaccgaggactacatacccaacgtgcggcttttgtccataccggtacagtccctgtcaatctcaaacaccctgaacggcaaagaagacagcaaggaatacgcggaaagttccggcttaatccgtttcagtttcccgggcgcccgtctgttggtggtagacgacattgccacaaacttaaaagtagccgaaggtcttcttgcgccttacaaaacaacaattgacacatgcctgggcggacgccgggccgttgaactggtaaaacagcataattacgatatgatactcatggatcacatgatgcccgaaatggacggtattgaagcaacggcagtcataagggcatgggaagaagaagaacagaaaatggacgacggcttaaagaagcatgttcctataatcgccttgaccgctaatgcggtcgtgggaatgaaagaaatgtttattcaaaacggttttgacgattttctggcaaagcccatagacgtttccaaactggatggaatccttaaccggtggataccgaaagagaaaagggcaaggaaagactccaagaaaagcgtcaagagaaatgagaaattagcaatgaacaanncatcattacccggatag

SEQ ID NO: 32658 - protein, 280 aa, Unknown
  Obtained from environmental sample
  DOMAIN (125)...(248): Response regulator receiver domain
  misc_feature (1)..(280): Xaa is any amino acid
MTPLYLAQAICWSLENMDVPYCLVKNEKDFAEALYREEWFYIFSGYGLYDEIKPLMDKPDSAFAGGKKPSLALMVEWGTEDYIPNVRLLSIPVQSLSISNTLNGKEDSKEYAESSGLIRFSFPGARLLVVDDIATNLKVAEGLLAPYKTTIDTCLGGRRAVELVKQHNYDMILMDHMMPEMDGIEATAVIRAWEEEEQKMDDGLKKHVPIIALTANAVVGMKEMFIQNGFDDFLAKPIDVSKLDGILNRWIPKEKRARKDSKKSVKRNEKLAMNXXSLPG

SEQ ID NO: 32659 - DNA, 891 bp, Unknown
  Obtained from environmental sample
  misc_feature (1)..(891): n is a, c, g, or t
atgcaacggcataccgaaaaagacgcgaatcagggcgacggcgcgggcgctaaaagcttcggccgctaccgggttatcaggcttctcggcgagggggccatggggcgggtttacctctccgaagacccgatcctgaagcgccgcgtggcggtgaaagtcatacccaccgaccgcaacatagagccggcggttcagcgcgagtttctggagcgcttcgccgtagaggctcaggcgtgcgccatgctcaaccacccgtccatcgtctccatctacgacgcgggagaggagggcggcgcgccttggatagccttcgagtacgtctctggcgagcacttggatcggctcatagcgcagaaaactccgctgccgtttgaccggatactgcgtatcgccggggacatcgccgcggctatgcgccacgcgcacggcatgggcatagtccaccgcgacataaaaccggcgaatatccttatagacgaatcgtcgggcatcgcgaaactcgccgacttcggggtggtgaagtcgccgcacgcggccataacgcagagcggcacggcggtgggatcgcccggatatatgtcgcccgaacagatagacgaccttgaggtggacgcccgctccgacatcttctctttcggcatcgtgctctacgagatgctcaccggaacccacccgtttatacgcgaaaccgtgcaggccaccttctacgctacgctgagctgcaactacaaaccggtacgcgagcttagggcggacgccccggagaatctcgtgaaaatcgtggagatgtccctgatcgccgacagaaacctgcgcataataaactcggacgagctttgctcgatgatcgcggagtgcctgagcgacgaccacgagacaaaacgcggatga

SEQ ID NO: 32660 - protein, 296 aa, Unknown
  Obtained from environmental sample
  DOMAIN (23)...(283): Protein tyrosine kinase
  misc_feature (1)..(296): Xaa is any amino acid
MQRHTEKDANQGDGAGAKSFGRYRVIRLLGEGAMGRVYLSEDPILKRRVAVKVIPTDRNIEPAVQREFLERFAVEAQACAMLNHPSIVSIYDAGEEGGAPWIAFEYVSGEHLDRLIAQKTPLPFDRILRIAGDIAAAMRHAHGMGIVHRDIKPANILIDESSGIAKLADFGVVKSPHAAITQSGTAVGSPGYMSPEQIDDLEVDARSDIFSFGIVLYEMLTGTHPFIRETVQATFYATLSCNYKPVRELRADAPENLVKIVEMSLIADRNLRIINSDELCSMIAECLSDDHETKRG

SEQ ID NO: 32661 - DNA, 330 bp, Unknown
  Obtained from environmental sample
  misc_feature (1)..(330): n is a, c, g, or t
ttgatcagtaatttccgcgaagaggatgataagtccctcgcatggatacttccccgtattgagaaacgccatttgcttctattggtcagttttcgcgaaaatgaggcggaagatatggcttttcccaaagcccccgatgcctcctcaaaaattaaaaccgatgaagaaatactggaaacagcttcggcgtttgcctatcttgccaaccggcgccgcctgtaccgcaaatgggaacattcaggacttcttgttcttgacacttcgcctcagtacataacgacagcgcttattaacaaatatctaagcgtgaaaaaatccgggaagctttaa

SEQ ID NO: 32662 - protein, 109 aa, Unknown
  Obtained from environmental sample
  misc_feature (1)..(109): Xaa is any amino acid
MISNFREEDDKSLAWILPRIEKRHLLLLVSFRENEAEDMAFPKAPDASSKIKTDEEILETASAFAYLANRRRLYRKWEHSGLLVLDTSPQYITTALINKYLSVKKSGKL

SEQ ID NO: 32663 - DNA, 552 bp, Unknown
  Obtained from environmental sample
  misc_feature (1)..(552): n is a, c, g, or t
atgaacagcaaaaaaatgttggttctttcagatacacatggcagcctgtctgctttaaaaacagtaatgaactgggcgaaggaccgtatgccgccgaacgatacaatttgcgatgctgtcttccttggagacggagtgtctgacctgcgccttgcggcggacgcagcaggcttttacggtaactggaatgttgtgcgcggaaacaacgattacgaacatacaatacaagacagcgcagtttttgattttgccgattacagattttttatttgccacggtcatcgtcatagtttgtacagcggacatcatacgcttgtttccgcagggcgcagcaataacgccgatgttgtaatgtttgggcacactcatgttccttttttaaaaaacgaaggcggcatactgcttattaaccctggcagcgttggaagaccgcgtagtagaacaggggcgacgtttgccgttattgaatgtatacagggagaaccattgaaagtaaaattttacggaattggcggcggcggaatcctggaaataaaatttaaaattgattag

SEQ ID NO: 32664 - protein, 183 aa, Unknown
  Obtained from environmental sample
  DOMAIN (4)...(125): Calcineurin-like phosphoesterase
  misc_feature (1)..(183): Xaa is any amino acid
MNSKKMLVLSDTHGSLSALKTVMNWAKDRMPPNDTICDAVFLGDGVSDLRLAADAAGFYGNWNVVRGNNDYEHTIQDSAVFDFADYRFFICHGHRHSLYSGHHTLVSAGRSNNADVVMFGHTHVPFLKNEGGILLINPGSVGRPRSRTGATFAVIECIQGEPLKVKFYGIGGGGILEIKFKID

SEQ ID NO: 32665 - DNA, 447 bp, Unknown
  Obtained from environmental sample
  misc_feature (1)..(447): n is a, c, g, or t
ttggatttttacaatgacattaaccgcttaaccccggcaaatgctctggaacgcattcagcatttctctcacgccgtccactcccgtctacgctacgagcgcggcgcgacggagaattcaacttccgcggcaaaggcgttcgacatcggcgcgggcgtctgtcaggactacgcgcatattctgctcgccctccttcgccttgacaaagtcccctgccgctacgtcgccggcctcgcctccgattacggcgaaacccacgcctgggttgaggcatggacaggagatcggtactgcgcagtagaccccacacgcgacaaacttatagattccggctacatcgccctgtcaaggggccgcgactttgccgacagttccatagaacgcgggatattcaagggcgcatgcggtggaacgcagacggtgagtctgaacatggaaatttcatga

SEQ ID NO: 32666 - protein, 148 aa, Unknown
  Obtained from environmental sample
  DOMAIN (49)...(103): Transglutaminase-like superfamily
  misc_feature (1)..(148): Xaa is any amino acid
MDFYNDINRLTPANALERIQHFSHAVHSRLRYERGATENSTSAAKAFDIGAGVCQDYAHILLALLRLDKVPCRYVAGLASDYGETHAWVEAWTGDRYCAVDPTRDKLIDSGYIALSRGRDFADSSIERGIFKGACGGTQTVSLNMEIS

SEQ ID NO: 32667 - DNA, 804 bp, Unknown
  Obtained from environmental sample
  misc_feature (1)..(804): n is a, c, g, or t
gtggcaaggaaaaacttaagacccgtaatcgatcaggcggaaaacgccctgaagctttcgatggcgcaatttgccatgttcctgggattggactacaacacgccgtttgagcttgaacctgtaaaaggaaacacaaactatatttccattgacgtggcgcaaatgatttcaaaggcggcttcgggaaaaccggacattcaggaattaaggcaggacatattaacattaaacagcgttaaaaagtccacatggtacagattgtacacgcctaccctttctttaagctggaacgccgatccctctttccaaaaagatccatggaaagattcatggttcggcgataaggataattggaaacaacagtcgggaagcttcaggatttctgtgggattcaggttaaacgggcttataccctacaccgccgaacatcagggattaaaaactctggacgatcaaatatcgacaattacccttggattaacgcagatgattcgcggaacggaaattgaaatttacaatacggtgcttgcgctggaaagggcgcgtgtcagcgcgcaggctcaggcgcagactgtaagtttggcggaacagtcctaccgtcttaccgaacaggcgtatcaggctggcttgcaggattattttcaggttcaaaacgcggaacaatccttgaggcaggcgcgcgtacaaatgcttgaacagcagtttatttaccttaacggtcttatcgaccttgaatattccaccggggttccgttcggaaccttaagttcgatgaactttagttcaaaggagaatcagcaatga

SEQ ID NO: 32668 - protein, 267 aa, Unknown
  Obtained from environmental sample
  misc_feature (1)..(267): Xaa is any amino acid
MARKNLRPVIDQAENALKLSMAQFAMFLGLDYNTPFELEPVKGNTNYISIDVAQMISKAASGKPDIQELRQDILTLNSVKKSTWYRLYTPTLSLSWNADPSFQKDPWKDSWFGDKDNWKQQSGSFRISVGFRLNGLIPYTAEHQGLKTLDDQISTITLGLTQMIRGTEIEIYNTVLALERARVSAQAQAQTVSLAEQSYRLTEQAYQAGLQDYFQVQNAEQSLRQARVQMLEQQFIYLNGLIDLEYSTGVPFGTLSSMNFSSKENQQ

SEQ ID NO: 32669 - DNA, 321 bp, Unknown
  Obtained from environmental sample
  misc_feature (1)..(321): n is a, c, g, or t
ttggagaatcgcgaggagatgaagagcgatccgtttctatcccaagtgaagtgcgagatagtgaagcgtccatcgttttggaagaaaaaagagttgagcaagattgcggaggaatttgacagaaatgatgagcgcaggctcataagcaaaaggcagaaagtggaatatgtgttccatgtcatcaaggatatattcaaattcaaaaagcttccctacaagggcattgccaagaacgcggaacgccttttggcatcatttgccaatgccaatctttatatgcttgccatagcagaccgcaggttctgccagcagacgggttga

SEQ ID NO: 32670 - protein, 106 aa, Unknown
  Obtained from environmental sample
  misc_feature (1)..(106): Xaa is any amino acid
MENREEMKSDPFLSQVKCEIVKRPSFWKKKELSKIAEEFDRNDERRLISKRQKVEYVFHVIKDIFKFKKLPYKGIAKNAERLLASFANANLYMLAIADRRFCQQTG

SEQ ID NO: 32671 - DNA, 1476 bp, Unknown
  Obtained from environmental sample
  misc_feature (1)..(1476): n is a, c, g, or t
gtgcgcttcaagacgctcttcaaccttgcgagcgacgttctcctcatccacgaccgcgacggcaagatcgtagactgcaacgaagccgcgtttcacagcaccggctacagccgcaagcagttgctcgaaatgaatatgcgcgacctaattctgcccgacgacgcggggcactttgagcacattatggcgcggctgccgcgcacaagcagcttgatgtacgagttgcgctacgcccaccgcagcggcgcggtctccgttatggagctgcacgccacaatgatcaccacagaggccgtaccgctcgtcttcgttatctgccgcgacgtctccgagaggcggcggatggaacaggagcgcgaggagcttaaagcccaagtggaggcggcgcagagggtggagcttgtggggatgctcgtaagcgggatagctcacgacttcaacaacgtgctcacggcgctgagcggctatgcctccctattgcagatggacgcggccaaagttggcgcgccgcttttgggctacgccgagaagataacggacatagcggcaaaggggcaggggcttaccgcccgcctgatgtcgttcatacgcaaaagacgcgaagagctggtccccgtggacatccacaagatactgacggagacggagctgcttctgcgtcccaacagcaagagtataaggatcgatctcgacttcggcgccgagaagaccgtcgttttgggtggcgactcgcagatacagagcgtgttcctcaacctaggcctgaacgccagggacgctatgccgaacggtggcaccctcactttcaagacctacaacgaggagcggtgcttaggctcgcagcgcaagggctgcggcttcataaggatagacgtcatcgatacggggacgggcatagacgataagatcataggcaaaatcttcgagccgctcttcaccacgaaacctcagggcgcgggaacggggataggcctccccagcgtcctctactgcgtaaagagtttgcacgggagcattgaggtagacagcaaagcgggcgccggcacaatgttcaaaatatcgctcccgctctacgacggcgacgcccccaaggatgtggatctcagcggaaaacaggtgctcttaatcaccgaagacgacgaaatcgttaagtccatggacgagcgcctcgcgcgggagggtatcggcgttcggcacgtcgacgagccggaagcggcgctcgactgggtgcaggacaacgcggaaaaaacggcggcggtcatagtcgactacgacctgcagatgtacgacgaaaacagcttcgtaagcgcggtcgcggacgccgcgccgggcatgctcatcataaaaatgctctccaaggagcgcatagcgctgggttccaacaaaaactacctggcgttcgcagacgtgtccacggactcggagatgttctttgagtcgcttgttatgtacatacgcgatagggccggaggttga

SEQ ID NO: 32672 - protein, 491 aa, Unknown
  Obtained from environmental sample
  DOMAIN (134)...(201): His Kinase A (phosphoacceptor) domain
  misc_feature (1)..(491): Xaa is any amino acid
MRFKTLFNLASDVLLIHDRDGKIVDCNEAAFHSTGYSRKQLLEMNMRDLILPDDAGHFEHIMARLPRTSSLMYELRYAHRSGAVSVMELHATMITTEAVPLVFVICRDVSERRRMEQEREELKAQVEAAQRVELVGMLVSGIAHDFNNVLTALSGYASLLQMDAAKVGAPLLGYAEKITDIAAKGQGLTARLMSFIRKRREELVPVDIHKILTETELLLRPNSKSIRIDLDFGAEKTVVLGGDSQIQSVFLNLGLNARDAMPNGGTLTFKTYNEERCLGSQRKGCGFIRIDVIDTGTGIDDKIIGKIFEPLFTTKPQGAGTGIGLPSVLYCVKSLHGSIEVDSKAGAGTMFKISLPLYDGDAPKDVDLSGKQVLLITEDDEIVKSMDERLAREGIGVRHVDEPEAALDWVQDNAEKTAAVIVDYDLQMYDENSFVSAVADAAPGMLIIKMLSKERIALGSNKNYLAFADVSTDSEMFFESLVMYIRDRAGG

SEQ ID NO: 32673 - DNA, 606 bp, Unknown
  Obtained from environmental sample
  misc_feature (1)..(606): n is a, c, g, or t
atgggacgaatcacgacggagctggcgcgccggggttttgccatgaccggagtggacatcaccgagtcgcttttggaaacagcccgcgaagacgcgctctacgagggccttgatatcgaatatgttcaggccgacgcccgttcttttgtccggcccgctttttttgatatggcggtgaacctatatatttcctttggctattttgaaaatcccgaagatgatctacagatggcgcggaatgtgcatgaatccctaaagccgggcggagctttcattgttgaaactctgggcaaggaaatcgccgtcagggattttacgccgggggaatggtttgaaagggccggttacgcggtgcttaccgaatacgaagcggtggattcctgggcggctcttaaaaaccgctggatactgatccccaacgccgaaaggcccaatggagcgagaattgagaaaacctttacccagcggctgtacgcgggaacggaactgcgggccttgctctttgaggcgggcttcgcgggcgtggaactttacggcggttgggacgagcggccatacgatcaggatgcggaaattctaatcgccgtcggcaggaaaaaaggctga

SEQ ID NO: 32674 - protein, 201 aa, Unknown
  Obtained from environmental sample
  DOMAIN (2)...(93): Methyltransferase domain
  misc_feature (1)..(201): Xaa is any amino acid
MGRITTELARRGFAMTGVDITESLLETAREDALYEGLDIEYVQADARSFVRPAFFDMAVNLYISFGYFENPEDDLQMARNVHESLKPGGAFIVETLGKEIAVRDFTPGEWFERAGYAVLTEYEAVDSWAALKNRWILIPNAERPNGARIEKTFTQRLYAGTELRALLFEAGFAGVELYGGWDERPYDQDAEILIAVGRKKG

SEQ ID NO: 32675 - DNA, 465 bp, Unknown
  Obtained from environmental sample
  misc_feature (1)..(465): n is a, c, g, or t
gtgaacaaacaattcgttcttacatgggcggacaacttcagcgcacagcagagaatcggcgcgatgctccgcaccaacattgaaagcgaatatcaggcgcgggtaaagggcatggcgacatcgacaggcggcgcaaatgcgacagcatcgcaagcggcaagcacaggcgaacttaacaatcagattaacagcgtaattaacgcggttgtgaacgtgagctactcaggagcgcagagagaagcggactggtggagccttcgcagacgctatgatcccgacaacaaaggagaattcaccgatgaatacaccgcttatgtactctacacaatccccaaaaaggaactgaacacgcaggtggcgaatgcgatgacaaccgcaatcaaaaaagattcggcgttatacgacatcaccattcagatagcgcaggatatgcttcaaaaaggcataatgaactggggcgaataa

SEQ ID NO: 32676 - protein, 154 aa, Unknown
  Obtained from environmental sample
  misc_feature (1)..(154): Xaa is any amino acid
MNKQFVLTWADNFSAQQRIGAMLRTNIESEYQARVKGMATSTGGANATASQAASTGELNNQINSVINAVVNVSYSGAQREADWWSLRRRYDPDNKGEFTDEYTAYVLYTIPKKELNTQVANAMTTAIKKDSALYDITIQIAQDMLQKGIMNWGE

SEQ ID NO: 32677 - DNA, 336 bp, Unknown
  Obtained from environmental sample
  misc_feature (1)..(336): n is a, c, g, or t
gtgtccgtaaccaaagaaattacccgccttgaaaaatcaaatgtcaaactcagcctgactgtcccgaaagaggaagtacaggcccagtatcaggatgtactgaaggattacgccaaaaatgcccatatacccggtttccgcaagggcaaagtgccgcaagaggtgctgttgcggaaattcggcgatacgctcaagggagcggcattggggaaaattctcgaaaatgccattggcgaggtttttcaggatgaaaaactcccccgtaatgagcggcctctgccgtactcccagccggtgatgcaggaagagccactcgtgccgctcggccgattctga

SEQ ID NO: 32678 - protein, 111 aa, Unknown
  Obtained from environmental sample
  DOMAIN (1)...(109): Bacterial trigger factor protein (TF)
  misc_feature (1)..(111): Xaa is any amino acid
MSVTKEITRLEKSNVKLSLTVPKEEVQAQYQDVLKDYAKNAHIPGFRKGKVPQEVLLRKFGDTLKGAALGKILENAIGEVFQDEKLPRNERPLPYSQPVMQEEPLVPLGRF

SEQ ID NO: 32679 - DNA, 546 bp, Unknown
  Obtained from environmental sample
  misc_feature (1)..(546): n is a, c, g, or t
atgaaaaagtatacgcttttttttatctgctgtttgatgtcgcttatgttngtagtaaccgcttgttccccgggcctttnagacctcgacgctgactcatccacgcggtcgctctctaatcatgacgttaactcgtcaacgccggagacctccgattgcggctgttccgacccggccgtcgacccgtcatcgccgccgtcctccggctccggtactaatccgtcaacaccaccacttcctggtcctggcgtaaaaccgccgccgccgccaccccacgaccacggcgctaacccgccgccaccgccaccccacgaccacggcgctaacccaccacaacctcacgaccatggcgctaacccgccaccaccgccgtcccacggccccggcgctaagccatctacaccgccttcctccggctccggtggtaacccatctacaccgccttcctccggctccggcgataatccaccgccgcaacagggaacagatactgagcagccgccggaaactgaagaaccttcagaggagatagaagtatgcaactaa

SEQ ID NO: 32680 - protein, 181 aa, Unknown
  Obtained from environmental sample
  SIGNAL (1)...(21)
  misc_feature (1)..(181): Xaa is any amino acid
MKKYTLFFICCLMSLMXVVTACSPGLXDLDADSSTRSLSNHDVNSSTPETSDCGCSDPAVDPSSPPSSGSGTNPSTPPLPGPGVKPPPPPPHDHGANPPPPPPHDHGANPPQPHDHGANPPPPPSHGPGAKPSTPPSSGSGGNPSTPPSSGSGDNPPPQQGTDTEQPPETEEPSEEIEVCN

SEQ ID NO: 32681 - DNA, 795 bp, Unknown
  Obtained from environmental sample
  misc_feature (1)..(795): n is a, c, g, or t
atgaatctaaagaactatgaatactggtttattgtaggaagccaggacctttacggggatgaaactcttaaacaagtcgcgagtaatgcccgaataatgacggatgaattcaacaaggacgcgttgctttcaggaaaggtggtattaaaacctacggcaataacgccgcaggcgatacgcggtctttttgaggaagccaacgcctcgaaagattgcgccggtatcattacatggatgcataccttttcaccttcaaaaatgtggatacaggggcttgctttaaaccgcaaaccgcttttacacctccacacccagttcaacagggatatcccctggtcttcaatagacatggactttatgaacctgaaccaatccgcccacggcgaccgcgaacacggttatatccatacgcggatgaaactgccccgtaaagtagtggcaggtttctggcaggataaagaactgcgccgccgtatagacgtatggatgagagccgcagccgcgagaaaagacggcatggactctaccattatgcggctgggagacaatatgcgggaagtggcggtaacagagggcgacaaagtcgaagctcaaattatatttggctggcaggtgaatacatggggcatcggcaaccttgccgcccgcttcgcaaaaatcaacgatacgcaggcggaaaaattggctgaagaatacgctgccttttacgaacttgcccctgatcttaaacagagcggcaaagcaaggacagcaatgcttgaacaggcaaaaatagaaatcgccctaaagaaatga

SEQ ID NO: 32682 - protein, 264 aa, Unknown
  Obtained from environmental sample
  DOMAIN (1)...(264): L-arabinose isomerase
  misc_feature (1)..(264): Xaa is any amino acid
MNLKNYEYWFIVGSQDLYGDETLKQVASNARIMTDEFNKDALLSGKVVLKPTAITPQAIRGLFEEANASKDCAGIITWMHTFSPSKMWIQGLALNRKPLLHLHTQFNRDIPWSSIDMDFMNLNQSAHGDREHGYIHTRMKLPRKVVAGFWQDKELRRRIDVWMRAAAARKDGMDSTIMRLGDNMREVAVTEGDKVEAQIIFGWQVNTWGIGNLAARFAKINDTQAEKLAEEYAAFYELAPDLKQSGKARTAMLEQAKIEIALKK

SEQ ID NO: 32683 - DNA, 615 bp, Unknown
  Obtained from environmental sample
  misc_feature (1)..(615): n is a, c, g, or t
ttgatctgggtttttccccggacggcagaacttatatgttcggtcaatacggagtcttattaccctctctcaggccctggggccgatttgtttgtcgtagatgtagccagtaacacttttgttcaaaacggcagggtatcacttatagagaacactccgataaaggcgggacaagacggttcgggtattttacacagattagtcgccaataattcaaatctttcaagccgatactgtatagattttcaaaatcaaggactcccactttacatctccagagacgaaaaccctccaccgcgcggagaaaaaattgattttcgggactttctttcaggaaaatcatataaggcgcaattaatttccacaattacaggcagagggcaggccacaaaatcgcaattctatattaatttggaagttaactctccaaacggccaatttagaacatataaagtgggcaccccgaattttgtccgccaggggattgtacaatacaactttaaaagagtcctaattgacccaaccggaaactcggtcatttttgtaatagaaatgatgctagcctccaacaacggggtcgatatccgttatatggtagaagctataaggctataa

SEQ ID NO: 32684 - protein, 204 aa, Unknown
  Obtained from environmental sample
  misc_feature (1)..(204): Xaa is any amino acid
MIWVFPRTAELICSVNTESYYPLSGPGADLFVVDVASNTFVQNGRVSLIENTPIKAGQDGSGILHRLVANNSNLSSRYCIDFQNQGLPLYISRDENPPPRGEKIDFRDFLSGKSYKAQLISTITGRGQATKSQFYINLEVNSPNGQFRTYKVGTPNFVRQGIVQYNFKRVLIDPTGNSVIFVIEMMLASNNGVDIRYMVEAIRL

SEQ ID NO: 32685 - DNA, 492 bp, Unknown
  Obtained from environmental sample
  misc_feature (1)..(492): n is a, c, g, or t
ttggctgaatgtttcaaagggcttcacaaggaatacatcaaactgataaagcgttacgagcttaacattgaagcgggcgggcgcgagctgtctttatttgttccgagaaaattgtttttattccatcgtgagcttttccgtatggagcagggcagacggaaaaaaaagcatcatttttgcccgaccaatcctaagtcaactgccgttatcgcggaaaacgcgcaaaaaatatttgaaagttccatgcaatttgttacccagcggcgtgtttttcacctgtggcccgaagaagggcacgagaacacatggtgcgcgtgtccggcctgccgcgctttcagtcccgccgaacagtacattatcgcggtaaataccgtggcggacgtgctcgctaagctcgatcccaacgctcggctttcgtatcttgattacggggaagagcaggggaagaccgggattttaccgagaaagaatatgtataaggttaagaaatag

SEQ ID NO: 32686 - protein, 163 aa, Unknown
  Obtained from environmental sample
  misc_feature (1)..(163): Xaa is any amino acid
MAECFKGLHKEYIKLIKRYELNIEAGGRELSLFVPRKLFLFHRELFRMEQGRRKKKHHFCPTNPKSTAVIAENAQKIFESSMQFVTQRRVFHLWPEEGHENTWCACPACRAFSPAEQYIIAVNTVADVLAKLDPNARLSYLDYGEEQGKTGILPRKNMYKVKK

SEQ ID NO: 32687 - DNA, 390 bp, Unknown
  Obtained from environmental sample
  misc_feature (1)..(390): n is a, c, g, or t
atggaacaagccctgcatattgccaaaccttacggatttatacagttgtttattaacgaaggcaaagaaattctgcctttgttatggatgatccgcaaaaaaacggacatggattcgcagttggcgcaatttattgacacgcttacgcacagaatctccgggtttgacgaagggcggaaggaacctgaacaagcgccgcgtctttccgttatgcgccgtaaaatgcttgagtatctgaacaagggtatgtcttataacgaaattgccgacaaaaccggcattgtacgcggaacggtaaaaaggcatatccttcttttatataaacaattaggggtaaacagcggcgaggaagctgttataaaagcaaaaatgctgggcttgctggagtaa

SEQ ID NO: 32688 - protein, 129 aa, Unknown
  Obtained from environmental sample
  DOMAIN (65)...(122): Bacterial regulatory proteins, luxR family
  misc_feature (1)..(129): Xaa is any amino acid
MEQALHIAKPYGFIQLFINEGKEILPLLWMIRKKTDMDSQLAQFIDTLTHRISGFDEGRKEPEQAPRLSVMRRKMLEYLNKGMSYNEIADKTGIVRGTVKRHILLLYKQLGVNSGEEAVIKAKMLGLLE

SEQ ID NO: 32689 - DNA, 381 bp, Unknown
  Obtained from environmental sample
  misc_feature (1)..(381): n is a, c, g, or t
ttgatggccgagttttctggctggcctaaggcagattcccagacttattacgaggccgcctccattgacggggcaggctggttcagccagtttttccgcatcactttgccccagatgacgcctataatcttttttaacctaatcatgcagttaatcaacgggattcaccgatttttagccagaggttttattatttcgggaggaaagggagagccgatggacagtactctggtttatgcgttgtacctgtatatacagtctttttcgtactatcgaatgggttatggttccgcgctggcgtgggtgctggtgattatcatagcggttttgaccgcctttatcttcaagacccaggaccgctgggtctactacgaatcatag

SEQ ID NO: 32690 - protein, 126 aa, Unknown
  Obtained from environmental sample
  misc_feature (1)..(126): Xaa is any amino acid
MMAEFSGWPKADSQTYYEAASIDGAGWFSQFFRITLPQMTPIIFFNLIMQLINGIHRFLARGFIISGGKGEPMDSTLVYALYLYIQSFSYYRMGYGSALAWVLVIIIAVLTAFIFKTQDRWVYYES

SEQ ID NO: 32691 - DNA, 855 bp, Unknown
  Obtained from environmental sample
  misc_feature (1)..(855): n is a, c, g, or t
atgaccaggactcaggcacgccgtttaaagaatgtcagggatactgtaatttttcatgcagttgtggttgcgttaggcttttttatgctctatcccatgctctggatggtctttggttcctttaagcctacggcggagatcttcggaactatttccctgataccaaaaaattttactctggataatttcgccagagggtggcgttataacggctcaaccagcttttccactttttacaaaaattcttttataattaccggattatccaccgtgggagctgtgctaatgtcttccctggtggcctatggtttctcccggatacatttccggggaaacaaattctggtatagctgtatgttcattacccttatgctgccgtaccaggtggtcatggttccccagttcatcctctttcgcaaactagggtgggtgaataccttccttccccttattgtaccccagtggggcggacaggctttttttatttttctgatgacacagtttttccggggcattcccatagagctggacgagtccgccatgctcgacggctgcaacaagtttaccgtttacaggcgtattctcttccccctgataaagcctgcccttataacttctaccattttcagtttctactggcgctgggacgactttctgggcgctctgctctaccttaaccggacgcagaattttacagtatcccttgctatacgtatgttcgccgatccaagccagacagattggggcgctatttttgccatgggaaccgtgtccctgctgccgtcgttgattattttctttgtcttccagaaatacgtagtagaaggtatcgcgactaccggccttaaaggataa

SEQ ID NO: 32692 - protein, 284 aa, Unknown
  Obtained from environmental sample
  DOMAIN (75)...(279): Binding-protein-dependent transport system inner membrane component
  misc_feature (1)..(284): Xaa is any amino acid
MTRTQARRLKNVRDTVIFHAVVVALGFFMLYPMLWMVFGSFKPTAEIFGTISLIPKNFTLDNFARGWRYNGSTSFSTFYKNSFIITGLSTVGAVLMSSLVAYGFSRIHFRGNKFWYSCMFITLMLPYQVVMVPQFILFRKLGWVNTFLPLIVPQWGGQAFFIFLMTQFFRGIPIELDESAMLDGCNKFTVYRRILFPLIKPALITSTIFSFYWRWDDFLGALLYLNRTQNFTVSLAIRMFADPSQTDWGAIFAMGTVSLLPSLIIFFVFQKYVVEGIATTGLKG

SEQ ID NO: 32693 - DNA, 1272 bp, Unknown
  Obtained from environmental sample
  misc_feature (1)..(1272): n is a, c, g, or t
gtgcatgcccatgaactgcgccccctgtcgtttgaggacgcggcgctttttcttgatagggcggtgcaggcaaaacagcgccgggcagcagcgtattttttagccgccgcccagaaggtcggatctgttgccaaaattcccgcgcctgtcattgaatatgccaggggttctgacagcgttgccgcaatgatcaatggggttgccacggtattggttgaccggggcataaaaattgagcgcggcatgggttacgcggacaagattttgggatccgccttttttatcgattcaaccggcttgttaataaccaactaccatgtaatctcaagcgaggtagaccccaagtatgagggatattcccgcatgtacattaggatgggcgacagctcaagcccccgttttccggcgcgggtaataggctatgatcaggctctggatctcgcgttgattaaaacagagcataaaagcgaattcgtgttttccatagtggacagggttattccccaggtgggagataaagtcatcgctatagggtcgccggtaggcgtggagataacagttacttccggcatggtgttattgcttagccgccgcttctttcaaatcggagatgtgtatcagatagacgtcgcggttaaccccggcaattcaggcggtccggttgtggatatgtcgggccggcttgtgggcattgtttttgcgggcgcggagcagttccaggggcttaattttgccatacccgcgcagcggcttgtgatcgcgctccccgccatgataaagggcggtaaggcccagcgttcttggcttggtataaccctcagcgaaagctccggcaacgcggaaataatgtacaccgcgcccaataccccggcgtccaggcaccgtgtgacggaaggcgctaaaataatgacgattaacggccgaaaaattacagcctcccagagtatgctgatccctgccatgcaggacgcgatcttccaatccctccccggtgagcttgttgccctggaaacccaggattccaatggtattacaaagaagtacctggtgatgaccgttccacgccccgaacttccgcttgttgacgcggcaaaactggacagccgtgaacggcttgcggcgcctttctttggattgattctttcacccagccagggaaaatccagatccgccaattatctggtaaaaaaaataatccggggctcaatcgccgatgaggcaagcatttcggatcatgactctgtttatatccaggggcttccgcatttatga

SEQ ID NO: 32694 - protein, 423 aa, Unknown
  Obtained from environmental sample
  DOMAIN (72)...(255): Trypsin
  misc_feature (1)..(423): Xaa is any amino acid
MHAHELRPLSFEDAALFLDRAVQAKQRRAAAYFLAAAQKVGSVAKIPAPVIEYARGSDSVAAMINGVATVLVDRGIKIERGMGYADKILGSAFFIDSTGLLITNYHVISSEVDPKYEGYSRMYIRMGDSSSPRFPARVIGYDQALDLALIKTEHKSEFVFSIVDRVIPQVGDKVIAIGSPVGVEITVTSGMVLLLSRRFFQIGDVYQIDVAVNPGNSGGPVVDMSGRLVGIVFAGAEQFQGLNFAIPAQRLVIALPAMIKGGKAQRSWLGITLSESSGNAEIMYTAPNTPASRHRVTEGAKIMTINGRKITASQSMLIPAMQDAIFQSLPGELVALETQDSNGITKKYLVMTVPRPELPLVDAAKLDSRERLAAPFFGLILSPSQGKSRSANYLVKKIIRGSIADEASISDHDSVYIQGLPHL

SEQ ID NO: 32695 - DNA, 1104 bp, Unknown
  Obtained from environmental sample
  misc_feature (1)..(1104): n is a, c, g, or t
atgaggaaattgattgtttgcgtgagcttgatttttgttttgctttttgcggttggttgtaaaaagaaacaggtcgtgggcgcggatgcgggagttactgtcaggcttcttaccgacgctacgggaattgatgataagtcttttaatgcggcggcatggagaggtattttggaattttacggggatacctgggacgctccgaagcagagaggaaaggcttatgactttattaccgcgcaaacacaggatatgtatattcctaatcttaggcaggctacggacgaaggctacaatttaattgtcgccacgggttttacctgggatcaatcgcttgaaaaagtagcttctgaaaatccgaatcagaagtatatgatagtcgatgttagttggcttagcccgtcaaatgtaatgcaggccatttatgccgaacatgaaggttcctaccttgtcggcgttgctgcggcgttaaaagccaaagaagacggcatcgctaatccgcgctttggttttatcggcggtgttccgggcgctaccattacaaagtttgaagtcggttatgtgcaagggattctttccgtaatacccaacgctcaaattgttgattattatgtaaacagctggggcgaaccggctcttgcgaaaacacaggcgaaaaactggtacgattccggagtatatgtgatttattccgcggccggcggaagcggcaacgggacaatcgcgcaggcgaaggaataccgcgcgtccggcagaaatgtctgggctatcggcgtggattccgaccagcatgaagaaggcatttacaacgataagggcgattccgccgtacttacgtccatgcttaaaaaggttgagagttccatagtttacgcgcttaacgccgttaaaaataaaacttttaagggcgaaattattacattcgatttaaaagcggacggcgtaggctattctgccgttaactccgccatgagccccgccatcaaaagcaagcttgaggaagttaagaaacaaattgccaacggcgaaattaaaattgcccctactctttcaagcgccatgagtctgccgggctttccgcaaaatttaagagcaattgacgattaa

SEQ ID NO: 32696 - protein, 367 aa, Unknown
  Obtained from environmental sample
  SIGNAL (1)...(19)
  DOMAIN (7)...(349): Basic membrane protein
  misc_feature (1)..(367): Xaa is any amino acid
MRKLIVCVSLIFVLLFAVGCKKKQVVGADAGVTVRLLTDATGIDDKSFNAAAWRGILEFYGDTWDAPKQRGKAYDFITAQTQDMYIPNLRQATDEGYNLIVATGFTWDQSLEKVASENPNQKYMIVDVSWLSPSNVMQAIYAEHEGSYLVGVAAALKAKEDGIANPRFGFIGGVPGATITKFEVGYVQGILSVIPNAQIVDYYVNSWGEPALAKTQAKNWYDSGVYVIYSAAGGSGNGTIAQAKEYRASGRNVWAIGVDSDQHEEGIYNDKGDSAVLTSMLKKVESSIVYALNAVKNKTFKGEIITFDLKADGVGYSAVNSAMSPAIKSKLEEVKKQIANGEIKIAPTLSSAMSLPGFPQNLRAIDD

SEQ ID NO: 32697 - DNA, 330 bp, Unknown
  Obtained from environmental sample
  misc_feature (1)..(330): n is a, c, g, or t
ttggtaagccttgccctttactggattataaaactttctgttcaccgcaagcggccctatgatttgctggaggatgtaaaggcaaaagttcctcctttggataaatatagctttccaagcgggcataccatgaataatttgtcggttgggttcattatttttgcggaagctccggctataggctgggttgtggtagctatgcctataacgtggggccttttaagggtttattacggggtacattggctttctgacgttattggcggggcttgccttggatttttaagtttttggttagggcagatgatttttgttttgttttctcaataa

SEQ ID NO: 32698 - protein, 109 aa, Unknown
  Obtained from environmental sample
  DOMAIN (1)...(109): PAP2 superfamily
  misc_feature (1)..(109): Xaa is any amino acid
MVSLALYWIIKLSVHRKRPYDLLEDVKAKVPPLDKYSFPSGHTMNNLSVGFIIFAEAPAIGWVVVAMPITWGLLRVYYGVHWLSDVIGGACLGFLSFWLGQMIFVLFSQ

SEQ ID NO: 32699 - DNA, 1128 bp, Unknown
  Obtained from environmental sample
  misc_feature (1)..(1128): n is a, c, g, or t
atgcccattcgtttaagagtcattcttgtcatagctttcatcaatctgctcataattctattcagtgttcttttcggtaccgcttatgttaataacaggctggaaagctacgtagagacagaaataagcatgacggccaagaaggaggttgacagggggctttggctggttgggcttatctgctttggccttggtgttatagccgcaattgtaggctcaaatgtaatcaagaaaccttacaaagaaatagaggccctgaagataaaggcggaggaaagttcaaaatccaaaagcacttttctcactaccatgagccatgaaatgcgtaccccactgaacgccgtaatcgggctgtcggaattaaccctggacggaaaaatctcgggcgaggaaaaagagaacatcgaaaaagtatataccgccgggatggttctcctgggaataataaacgacatccttgatatttcaaaaattgaaacgggaacatttgatttgaatccggtggtatatgatttgcccagtcttatcaatgacacgataacgcttaacaccatgcgcatagaagaaaagcccatcaccttcaagttatttattgaagaaaccctcccttccgaactgcgcggggacgatctcagaataaagcagatttttaacaatattatttcaaacgccattaaatataccaaagccgggacagtcgaatggcacatagcctgggaaaaaagcggcgacgatatatggcttatatcaagcgtcaaagacagcggcatcggcatacgcaaggaagacatggataagctgtttcaagattacagccaggtcgatacaaaatcgcacaacaagattgaaggaaccggccttggcctgtcgctaaccaagcgcatggtagagatgatgggcggaactattgccattgaaagcgaatacggcaagggcagtacctttaccattcaaatcaagcagggctatgtcaatgacatcccgattggtccaacggtcgcggaaaagctaaagaatttccaatttatcgacgaaaagcaccagcaacatgccaggctggttcgtctgccgcttccctacgcaagggtgctggtagtggacgatgtcgagccgaacctggtgtcgtaa

SEQ ID NO: 32700 - protein, 375 aa, Unknown
  Obtained from environmental sample
  SIGNAL (1)...(28)
  DOMAIN (96)...(161): His Kinase A (phosphoacceptor) domain
  misc_feature (1)..(375): Xaa is any amino acid
MPIRLRVILVIAFINLLIILFSVLFGTAYVNNRLESYVETEISMTAKKEVDRGLWLVGLICFGLGVIAAIVGSNVIKKPYKEIEALKIKAEESSKSKSTFLTTMSHEMRTPLNAVIGLSELTLDGKISGEEKENIEKVYTAGMVLLGIINDILDISKIETGTFDLNPVVYDLPSLINDTITLNTMRIEEKPITFKLFIEETLPSELRGDDLRIKQIFNNIISNAIKYTKAGTVEWHIAWEKSGDDIWLISSVKDSGIGIRKEDMDKLFQDYSQVDTKSHNKIEGTGLGLSLTKRMVEMMGGTIAIESEYGKGSTFTIQIKQGYVNDIPIGPTVAEKLKNFQFIDEKHQQHARLVRLPLPYARVLVVDDVEPNLVS

SEQ ID NO: 32701 - DNA, 315 bp, Unknown
  Obtained from environmental sample
  misc_feature (1)..(315): n is a, c, g, or t
atgaagagcaacgttctggggactgccgtgacaataggcggggttgtgtacggcaacgtgatcgcgggggaatccctcgtcgtcctctccacggcgcttgtcctgggcgatatcataacgcgccggataaaagcggaggagggctgccttatccacggcaggataaaggtttgccccgacgaggaaagctgggccagcgccgtcagcgagtaccgcgacgcccagaaggtaaaatctactttgcctgttttctcaaagaaagcggccaaggacgggtcatcaaaagacaagtccccgtccaggggcgaggtatga

SEQ ID NO: 32702 - protein, 104 aa, Unknown
  Obtained from environmental sample
  SIGNAL (1)...(22)
  misc_feature (1)..(104): Xaa is any amino acid
MKSNVLGTAVTIGGVVYGNVIAGESLVVLSTALVLGDIITRRIKAEEGCLIHGRIKVCPDEESWASAVSEYRDAQKVKSTLPVFSKKAAKDGSSKDKSPSRGEV

SEQ ID NO: 32703 - DNA, 558 bp, Unknown
  Obtained from environmental sample
  misc_feature (1)..(558): n is a, c, g, or t
ttggctaatattgaaacggacgtacagtctttttacatgaaccccgccgcgtatacgcacgtaaaagacgacgcaaaaaaaacaaaagttcacagaacgccccccggcgccaagaccgggttttcgcggatatttgaccagatgagggccaagacggccggggatataggccccctgaaggacttgcccgtatccgaggaaaccgtcaattacctgattgacgaggtgcgcagtacgggggacgcgttacgcgaaaggcctttcccggacgagattctccgttacaaacaggccgtgcgcaatttcatgcattatgttgtcgagaacgcatacggcaaaagtaccgaagcggggattcccagcttcctcaaaccgggcttcaaaggaccgcgcggcacatctgaatcacggaagcagttggcttatacaaaggtgcaggttatcgatacaaagctggaagatctcgcgaagcgccttcttaccagccagatgccccagatggagattgcctcgcgtcttgaggaaaataaggggcttctgatagacttaatgcagtaa

SEQ ID NO: 32704 - protein, 185 aa, Unknown
  Obtained from environmental sample
  DOMAIN (11)...(185): Protein of unknown function (DUF327)
  misc_feature (1)..(185): Xaa is any amino acid
MANIETDVQSFYMNPAAYTHVKDDAKKTKVHRTPPGAKTGFSRIFDQMRAKTAGDIGPLKDLPVSEETVNYLIDEVRSTGDALRERPFPDEILRYKQAVRNFMHYVVENAYGKSTEAGIPSFLKPGFKGPRGTSESRKQLAYTKVQVIDTKLEDLAKRLLTSQMPQMEIASRLEENKGLLIDLMQ

SEQ ID NO: 32705 - DNA, 1413 bp, Unknown
  Obtained from environmental sample
  misc_feature (1)..(1413): n is a, c, g, or t
atgccgctggataaaaatataaagaaaatcatggtcataggctccggtccgatagtgatcggccaggcggcggagtttgactacgccggaacgcaggcttgtcgcgtgctgcgcgaagacgggattgaaattgtcctggtaaactccaatcccgccacaattatgaccgacaaaaacatcgccgacaggatttacatcgagcctcttacccttaccaccgttaagcggattatcgaaaaagaacgccccgacagcatcctttcgggacttggcgggcagacgggccttacactgtgtatgcagttggcccgcgacggctaccttgaaaaaatgaacgtgcgcctgctcggttcttcccccgaaacgattgacaaagcggaagacaggcgcattttcaaggaaaccatgcagagcataggccagccggtgatcccttcggaaatcgcgaacgatgttgatacggcgcttaaatttgcggatgagataggttatccggtcatcgtgcgtcccgcttttacactgggaggctcaggcggcggcatcgcggcggatgaaaacgcccttcgtgaaatcgcaacaaacggcctgtccatttcgccgatatgccagattctggtagagagatctgtcgccggatggaaggaaattgaatacgaagttatgcgcgaccgcaacgggaacgtgataactgtctgctccatggaaaactttgatccggtaggcatacacaccggcgatagcatcgttatcgcgcccgccgtcacgctggcggacaaagagtaccaaatgctccgccttgccgctttggatattatccgcgcccttggcgtagaaggcggctgcaacgtccagtttgccctgcacccccacagctttgaatacgcggtcatcgaagtaaacccgcgcgtttcgcgctcttcggcgctggcgagcaaagcgacaggctacccaatcgcgaaagtcgcgactaagatcgccatcggctacaccctggacgaaattatcaacgccgttacgggcaacaccttcgcggcgtttgagcccacgatagactatgttgcggtaaaattccctaaatggccctttgacaaattcgtatacgcccaaaaggatctgggcacgcagatgaaagcgacaggcgaagtaatggcactcgcggacaccttcgaggaagcgattttaaaagccgtgcgcggcgcggaaataggccttaacagcctagacctgccccggctgtcggcgaaaacagacgacgagatacgggccctgctcggcaccgtaaccgacgagcgcctgttcgtgctgtacgaggccattaaacgcggcgtcggcgtggacgagctgcacctgacaaccaaagtagaccgctggtttttgcacgggcttgccaatatcgcttccgggcggtattaa

SEQ ID NO: 32706 - protein, 470 aa, Unknown
  Obtained from environmental sample
  SIGNAL (1)...(23)
  DOMAIN (128)...(327): D-ala D-ala ligase C-terminus
  misc_feature (1)..(470): Xaa is any amino acid
MPLDKNIKKIMVIGSGPIVIGQAAEFDYAGTQACRVLREDGIEIVLVNSNPATIMTDKNIADRIYIEPLTLTTVKRIIEKERPDSILSGLGGQTGLTLCMQLARDGYLEKMNVRLLGSSPETIDKAEDRRIFKETMQSIGQPVIPSEIANDVDTALKFADEIGYPVIVRPAFTLGGSGGGIAADENALREIATNGLSISPICQILVERSVAGWKEIEYEVMRDRNGNVITVCSMENFDPVGIHTGDSIVIAPAVTLADKEYQMLRLAALDIIRALGVEGGCNVQFALHPHSFEYAVIEVNPRVSRSSALASKATGYPIAKVATKIAIGYTLDEIINAVTGNTFAAFEPTIDYVAVKFPKWPFDKFVYAQKDLGTQMKATGEVMALADTFEEAILKAVRGAEIGLNSLDLPRLSAKTDDEIRALLGTVTDERLFVLYEAIKRGVGVDELHLTTKVDRWFLHGLANIASGRY

SEQ ID NO: 32707 - DNA, 447 bp, Unknown
  Obtained from environmental sample
  misc_feature (1)..(447): n is a, c, g, or t
ttgctcgccagcgccgaagagcgcgaaacgcgcgggtttacttcgatgaccgcgtattcaaagctgtgggggtgcagggcaaactggacgttgcagccgccttctacgccaagggcgcggataatatccaaagcggcaaggcggagcatttggtactctttgtccgccagcgtgacggcgggcgcgataacgatgctatcgccggtgtgtatgcctaccggatcaaagttttccatggagcagacagttatcacgttcccgttgcggtcgcgcataacttcgtattcaatttccttccatccggcgacagatctctctaccagaatctggcatatcggcgaaatggacaggccgtttgttgcgatttcacgaagggcgttttcatccgccgcgatgccgccgcctgagcctcccagtgtaaaagcgggacgcacgatgaccggataa

SEQ ID NO: 32708 - protein, 148 aa, Unknown
  Obtained from environmental sample
  misc_feature (1)..(148): Xaa is any amino acid
MLASAEERETRGFTSMTAYSKLWGCRANWTLQPPSTPRARIISKAARRSIWYSLSASVTAGAITMLSPVCMPTGSKFSMEQTVITFPLRSRITSYSISFHPATDLSTRIWHIGEMDRPFVAISRRAFSSAAMPPPEPPSVKAGRTMTG

SEQ ID NO: 32709 - DNA, 333 bp, Unknown
  Obtained from environmental sample
  misc_feature (1)..(333): n is a, c, g, or t
gtgtgctacacgcctgaagcaaaagtctccatgttggacatcgacatggctattatttcaatacacggtgcggttagcagagaaacggcctcttctatggcgcttggcgcactgcaaaaaagcggctcaaatttagctgctgctgttacagggcttgcgggacctgacggggacggcagcaatgtaccgcttggaactgtctggattgcagctgttcaaaaaggaggaatattaaaagtaaacgaacatcattttacagattgcagagaggctgtccgcatccgctcagctatcgcggtacttgaaactattttaagtattttacccggttga

SEQ ID NO: 32710 - protein, 110 aa, Unknown
  Obtained from environmental sample
  DOMAIN (2)...(108): Competence-damaged protein
  misc_feature (1)..(110): Xaa is any amino acid
MCYTPEAKVSMLDIDMAIISIHGAVSRETASSMALGALQKSGSNLAAAVTGLAGPDGDGSNVPLGTVWIAAVQKGGILKVNEHHFTDCREAVRIRSAIAVLETILSILPG

SEQ ID NO: 32711 - DNA, 621 bp, Unknown
  Obtained from environmental sample
  misc_feature (1)..(621): n is a, c, g, or t
atggaacgcacagttcgcgccgaggttgtctcatcaacctttgatgaacaggctacacgccatgtacaggttactgaaatggttcttgaaaaagcaaaacgccttgttgagcataaaagggatgttgtcattttacttgactcaatcacccgtttggcgcgcgcttataaccagacagtgcctacatcgggaaaaatcctttcaggcggcgttgattccaatgctctgcataaaccaaagcgctttttcggcgcagcccgcaatattgaggaaggcggcagccttacgatcatctcaacagccttggtggaaacaggcagtcgtatggacgaagtaatttttgaagaattcaaaggcactggcaatatggaaatcaaccttgacaggcgcatttctgaccgacgcctgtttccggcaattaatattaaaaaatccggtacaaggaaagaagaactccttctttccgaagaagaaatgcagaaaatctggattttacggaaagttatcaactcaatggacgatatcgaaatcattgaactgctggttgacaagatgaaaaaaagcaagaataatgaagcgttccttaaatccatgaataccggaaccggaggcatggattag

SEQ ID NO: 32712 - protein, 206 aa, Unknown
  Obtained from environmental sample
  DOMAIN (3)...(147): ATP synthase alpha/beta family, nucleotide-binding domain
  misc_feature (1)..(206): Xaa is any amino acid
MERTVRAEVVSSTFDEQATRHVQVTEMVLEKAKRLVEHKRDVVILLDSITRLARAYNQTVPTSGKILSGGVDSNALHKPKRFFGAARNIEEGGSLTIISTALVETGSRMDEVIFEEFKGTGNMEINLDRRISDRRLFPAINIKKSGTRKEELLLSEEEMQKIWILRKVINSMDDIEIIELLVDKMKKSKNNEAFLKSMNTGTGGMD

SEQ ID NO: 32713 - DNA, 462 bp, Unknown
  Obtained from environmental sample
  misc_feature (1)..(462): n is a, c, g, or t
atgaccataacaattgactgtcggatgataaactcaagcggtgggattagcgtatatttgcgcggtattctgccttgtctgcttaaatcgccacatgatttcttgctcttggggaattctgcgcaattggaaccttttaaacaaaatattaatgtaagtgtaattgaatgtgatgtaaagccattttccctgcgcgaacaattttttttcccaaaaaaaatattggaaaaaataaacctgtcatatttattctattcgccttattttaacattcctgacggtataataatccccgtctataccactattcacgacattattttccctgatatgcctgaactggtatcgcgtaccggccttgccgcgcggatgtggttttaccggagagcgtataaaaaatccctaataatcttacggtttccaatttttcaaaatccaggattgaacaccacctcggaataa

SEQ ID NO: 32714 - protein, 153 aa, Unknown
  Obtained from environmental sample
  misc_feature (1)..(153): Xaa is any amino acid
MTITIDCRMINSSGGISVYLRGILPCLLKSPHDFLLLGNSAQLEPFKQNINVSVIECDVKPFSLREQFFFPKKILEKINLSYLFYSPYFNIPDGIIIPVYTTIHDIIFPDMPELVSRTGLAARMWFYRRAYKKSLIILRFPIFQNPGLNTTSE

SEQ ID NO: 32715 - DNA, 408 bp, Unknown
  Obtained from environmental sample
  misc_feature (1)..(408): n is a, c, g, or t
ttgacaaaaaagcctgtattcaccgctatcgtatttgacgagccggatactaccggacatgcaaagggttggggctcaaaggcttactacgataagcttaccattttagataatttcgtctctattatagaacaggcagttaaagattccggaatatatgacaacacggtttttgttttttcagccgaccacggtggcagttttaaaggccatggacttaacactgccaaacatcgaaaaattccattggtattttacggagcgggcataaaaaaaggctatgtcatttcttttcccactgatatttacgatataacgccttccatggccgcaattctggggcttcaagcgccccaagaatggaccggtagacccatattcgaaatttttgataatttgaaacaatga

SEQ ID NO: 32716 - protein, 135 aa, Unknown
  Obtained from environmental sample
  misc_feature (1)..(135): Xaa is any amino acid
MTKKPVFTAIVFDEPDTTGHAKGWGSKAYYDKLTILDNFVSIIEQAVKDSGIYDNTVFVFSADHGGSFKGHGLNTAKHRKIPLVFYGAGIKKGYVISFPTDIYDITPSMAAILGLQAPQEWTGRPIFEIFDNLKQ

SEQ ID NO: 32717 - DNA, 450 bp, Unknown
  Obtained from environmental sample
  misc_feature (1)..(450): n is a, c, g, or t
gtgccgctggtcgaggagggcctgatagacagcgacatcacgcgcctcgccgtacagcattacttatatgagatggtggatttggggattgactgcctgatattgggttgcacccactatccaatactgatggaagttatccagagcacggtggggaaccgcatacaattggtggacagcgcgttgtggacggccaaagaagcgcagcacataatgaaggcgatggggacggagtacccgccgccgcagggggggccgctaggtcaaaaagagcagcccaaacggtcggatcagttcacggtggaggcctcggagggtttcgccgcgagcagattcttggtctccgacgtaacgccgaacttcgagtcggtagccgagacgcttctgggggcggggttgcctagtatagaaaaggtgtcggtggaggaacttgaggaaaaagaggcgtaa

SEQ ID NO: 32718 - protein, 149 aa, Unknown
  Obtained from environmental sample
  misc_feature (1)..(149): Xaa is any amino acid
MPLVEEGLIDSDITRLAVQHYLYEMVDLGIDCLILGCTHYPILMEVIQSTVGNRIQLVDSALWTAKEAQHIMKAMGTEYPPPQGGPLGQKEQPKRSDQFTVEASEGFAASRFLVSDVTPNFESVAETLLGAGLPSIEKVSVEELEEKEA

SEQ ID NO: 32719 - DNA, 747 bp, Unknown
  Obtained from environmental sample
  misc_feature (1)..(747): n is a, c, g, or t
atgtcaggccactccaaatgggctacaatcaagcgggcgaaaggcaagaccgacgccgcccgcgggaagctgtttaacaggctgattcgagagattaccatcgcggctcgtatgggcgggggtgacatttcggcgaatccgcgtctgcgtaccgccgtctccgcggcgcgggcggccaatatgcctagcaagaacgtcgattcggctataaagaagggcaccggccaactcgacggcgtgaactacgaggagattacctttgagggctacgggccgggcggcgtggcattcctcattgaggccgtgaccgacaaccgcaaccgcacggtggcggaggtgcgccacctgctgaccaagtacggcggcaacctgggccagaccaactccgtagcgaggatgttcaagtccacgggcatcataaccgtggccaaagaggccgttgaagaggacaaactcatggaactggcactggaagccggcgccgacgacatgtccgccgagggcgaagagtacgaaatcaccgcgtcggtagacgccttcgacgccgtgcgcgaggcgatagtgaacgccaaaattgagccgacctcggcggagatcacaaaggtagtcgacactcctgtcaacttagacgccggcgccgccgtcaagataatgaagttggtcgacgccttggacgaactcgacgacacccagcacgtctacgcggggtttgacgtcagcgacgaagaagcggctaagatggattaa

SEQ ID NO: 32720 - protein, 248 aa, Unknown
  Obtained from environmental sample
  DOMAIN (5)...(238): Domain of unknown function DUF28
  misc_feature (1)..(248): Xaa is any amino acid
MSGHSKWATIKRAKGKTDAARGKLFNRLIREITIAARMGGGDISANPRLRTAVSAARAANMPSKNVDSAIKKGTGQLDGVNYEEITFEGYGPGGVAFLIEAVTDNRNRTVAEVRHLLTKYGGNLGQTNSVARMFKSTGIITVAKEAVEEDKLMELALEAGADDMSAEGEEYEITASVDAFDAVREAIVNAKIEPTSAEITKVVDTPVNLDAGAAVKIMKLVDALDELDDTQHVYAGFDVSDEEAAKMD

SEQ ID NO: 32721 - DNA, 504 bp, Unknown
  Obtained from environmental sample
  misc_feature (1)..(504): n is a, c, g, or t
ttgcctgataaacgccgcccgacccatattgtagaagtcgcacatcgcaacggccagcgcgtcgtaggcgtctgggcgcattttgccgccgctcggccgcagcagcgtctttatcatgtactccacctgctccttggaggcgttgccgttgccggtcaccgcctttttaatctcgcgcggactgtactcaaacacgccgcacccccgccgcgccgccgccagcatagccaccccgcgggcgtggccgagaaccagggtagtgtggacgttcttgccgtaaaacgcctcttccacggccacgcggtcgggagagcgttcatcgattttctcagaaagcccgtcgtaaatcataagcaaccgctgactgagcggttcggaagtatcggtaacgatcaccccggagtcgacccaagcgacggagttgccggagacgcttaccacgccgtacccggtgacggcggtgccggggtctatgcccattattatcatgttaatccatcttag

SEQ ID NO: 32722 - protein, 167 aa, Unknown
  Obtained from environmental sample
  misc_feature (1)..(167): Xaa is any amino acid
MPDKRRPTHIVEVAHRNGQRVVGVWAHFAAARPQQRLYHVLHLLLGGVAVAGHRLFNLARTVLKHAAPPPRRRQHSHPAGVAENQGSVDVLAVKRLFHGHAVGRAFIDFLRKPVVNHKQPLTERFGSIGNDHPGVDPSDGVAGDAYHAVPGDGGAGVYAHYYHVNPS

SEQ ID NO: 32723 - DNA, 930 bp, Unknown
  Obtained from environmental sample
  misc_feature (1)..(930): n is a, c, g, or t
ttggcgtgcctttcaaaacagcagaccacggagactattgagtacctgaacttcgcgttatcaaacgcggaaaaaacaggaaactaccatgaaatgggaataacgtcctactacgcggcggcgtctttgtttttgtacggcgacgtatttaaagcgctgcagcttgcgaaaaaatcggtagagcagtcaattgccgccggccgtcccgattgggccgaccgttcacgttttcttgaaggccgcataaattttgaacttggctattataagatagcgcatgatatttttgacgcgctgaaaaaaaacccttacggcaataacacaaaagaaaaagaaggccttttcgcggcatggatttacagggcaaaaatatatttacaggatatcaatgccaaaaaaccggatcttataagccacgacgctgatttatttgaaattgaggccgcttatttggaaggcaattaccagaaagccgtcgaattatccggcattttaaccaatcctttttccaacgacaatttcctttacaccgaacagccgaattggagcagcggtttcgcccaatgcgaacatttgtactttacccacggtgagattcaggacagaatgatctgcctgtttaactcgctcgcgttaagttttctgtcaagcgatacggacgcggttcaaaaaatacagaagatactgcgcgacgaacgcctctgcgagatggacccctgggacgcgttttatttttacgcanagtacataatcctgaaacagacaaactcaagccttgtagacaaaagcaccgccgtcagcatggcgttcaagcggatgcagcgccgcgccagcagaattgacgacatagaaacccgccgccagtaccttaaaggcccccgctggaaccgcgagttatacaataccgccaaagaatttaagctgatataa

SEQ ID NO: 32724 - protein, 309 aa, Unknown
  Obtained from environmental sample
  misc_feature (1)..(309): Xaa is any amino acid
MACLSKQQTTETIEYLNFALSNAEKTGNYHEMGITSYYAAASLFLYGDVFKALQLAKKSVEQSIAAGRPDWADRSRFLEGRINFELGYYKIAHDIFDALKKNPYGNNTKEKEGLFAAWIYRAKIYLQDINAKKPDLISHDADLFEIEAAYLEGNYQKAVELSGILTNPFSNDNFLYTEQPNWSSGFAQCEHLYFTHGEIQDRMICLFNSLALSFLSSDTDAVQKIQKILRDERLCEMDPWDAFYFYAXYIILKQTNSSLVDKSTAVSMAFKRMQRRASRIDDIETRRQYLKGPRWNRELYNTAKEFKLI

SEQ ID NO: 32725 - DNA, 1101 bp, Unknown
  Obtained from environmental sample
  misc_feature (1)..(1101): n is a, c, g, or t
atgggagggcgttccgaaggcatggcgggagcgttttccgcggtttcggacgacgtttcctttcttgaatttaatccggcgggctcgtcaatgctggaaaaatcggaattggcgttttttcacaataactggatagcggatgtaaagattgagggtatcgcctatgccgcgcgttttggaaatttcggttttgccgccggagcgaaatggctctacacgccgtttaccgaatacaactattacggcgatagggtgtccggcggctattattcggagggcgcggcgattataaacgcttcctataattttttctccggttattacttttccgggctatccctgggagtgaacgtaaaaggcgctttccgctccatgcccgattttaccgacgatcatgacaatataatcaaagattccggcatggatcaatccgcggcaatggttatggctgatgtcggactgcttacaaggtttaattttttaaaggggtattcttcaagggaaaataacgcgtccattgcccttgtcgtccgcaaccttggtccgcccgttatggatgaacctctgcctacagtagctaacgcggcaatttcgtacaagcccattcgtccgctgactttcggcgttgatttttctatgccggttaatataacggatttttctctctccgaatcgccttacggggctgtaggtatggcggttaacgttacaaagtttttctctatgcgcgccggcgtgatggtaaaaccgggaagcagccgcattactgtcggcagcgccgtcaacatggataaaatttcttttgatataaactatactctggatttacttacgcagttacagcctcttaacaggatcagtcttgcggtgcgttttgatttaggcgacggaggcagagggcttttggaaaaaaaagtggatgaattgtatctcttgggtcttgaggcttattcaaagggaaatctggatgacgcgaagttgtgctgggaagaggcgcttaaacttaatccaaaatacgaccctgcccgcgaaagtcttgatatgctggaaaaccgcgaaggttttaaaacanctcgtgccgaattctgtcccatggnntaa

SEQ ID NO: 32726 - protein, 366 aa, Unknown
  Obtained from environmental sample
  DOMAIN (1)...(269): Uncharacterised protein family (UPF0164)
  misc_feature (1)..(366): Xaa is any amino acid
MGGRSEGMAGAFSAVSDDVSFLEFNPAGSSMLEKSELAFFHNNWIADVKIEGIAYAARFGNFGFAAGAKWLYTPFTEYNYYGDRVSGGYYSEGAAIINASYNFFSGYYFSGLSLGVNVKGAFRSMPDFTDDHDNIIKDSGMDQSAAMVMADVGLLTRFNFLKGYSSRENNASIALVVRNLGPPVMDEPLPTVANAAISYKPIRPLTFGVDFSMPVNITDFSLSESPYGAVGMAVNVTKFFSMRAGVMVKPGSSRITVGSAVNMDKISFDINYTLDLLTQLQPLNRISLAVRFDLGDGGRGLLEKKVDELYLLGLEAYSKGNLDDAKLCWEEALKLNPKYDPARESLDMLENREGFKTXRAEFCPMX

SEQ ID NO: 32727 - DNA, 774 bp, Unknown
  Obtained from environmental sample
  misc_feature (1)..(774): n is a, c, g, or t
ttgatcgcgggccgtctggactggatacagcacaaggaagttcattccgcctgcataagttccatcggcgagggagacggcggcggcgggactttccgcgccgatctggaaatggcccgcaggttaggggatctggaaggaacgccgcgcgcggcgtggaagaaggtcagtgccgcgttaggcgaaatatttgccggaggcgaattccccgaatggcggggcgagctgtatctggaactgcaccggggcacctataccacccagtccaggaccaagcgcaataaccgcctgatggaatttgccctgcgcagggcggaattattctgttccatagccctgtttaaaggcaggggcgaatatccccgcgacaccctgctggactgctggaaacgcgccctgacctatcagtttcacgatgtcatccccggttcgtctatcgggaaggtgtatgccgagactgaagcggattccgcgaaaatattaaccgcgcttgcgcaaaccattgccaacgcaaagagctgtctggtcgcggcggcaaacacgttcgggggcgcgtccgcgtccgcgtccgcagacgcgggtgtttttgtgttcaacgatctgtcctgggaaagggaaagcggcgtgataatttccggggaccaggccggcggggccgcagccctgcgaagcgcggacggcgcagtatatccggcacagcggtacattgattttgacggaaacaagaaagtagtattttcccaaaagcgccgtccctgggctggactcggttaa

SEQ ID NO: 32728 - protein, 257 aa, Unknown
  Obtained from environmental sample
  misc_feature (1)..(257): Xaa is any amino acid
MIAGRLDWIQHKEVHSACISSIGEGDGGGGTFRADLEMARRLGDLEGTPRAAWKKVSAALGEIFAGGEFPEWRGELYLELHRGTYTTQSRTKRNNRLMEFALRRAELFCSIALFKGRGEYPRDTLLDCWKRALTYQFHDVIPGSSIGKVYAETEADSAKILTALAQTIANAKSCLVAAANTFGGASASASADAGVFVFNDLSWERESGVIISGDQAGGAAALRSADGAVYPAQRYIDFDGNKKVVFSQKRRPWAGLG

SEQ ID NO: 32729 - DNA, 834 bp, Unknown
  Obtained from environmental sample
  misc_feature (1)..(834): n is a, c, g, or t
atgaaagcgatgaatcttcccaatacctgcttctgcgattgtacggcaagcaacgaggtagccgctttgtacgcggagatactgcaatcttccattcctgtagtaactccaaacaagcgggccaattccggttcgcttgattattacaaaacccttacaggatttttcagaacaaggggcattccctatctgtacgaaaccacagtctgcgccggccttccggtaatatcgaccctaagggatctctttctttccggggacaaggtaaggcgcattgaggcagtgctttccggaaccctgagctacatcttcaacaattttgacggctccaaatctttctccgccctgctacgggaagcaaaggacaaaggctttaccgaacctgaccccagagatgatctaaacgccgtggacgccgcgcggaaggctgttattctggcgcgggaatgtggtttaaacatggaatttgcagaagtcgaaatcgaacctattttaccccgcgcctgctttgaagcggacggggtggaagcttttttcaaagagctggaaaaatccgacgctgattttgaaaagcgtcgccgtgaagccgccaacgatggtaaagccctgcgttacgtagcagtgatcgaaaacggctgcgcaaagttgtcccttcgcaaggagcaggcgggcagtcccttcctcaccctgaccgatgcggataacattgtcgtcataaccaccgatcgctattcaacccttccaatggtgataaagggccccggggcgggcgcacaggttaccgccgggggagttttcgcggacatagtgcgcatagcaagaactttggtataa

SEQ ID NO: 32730 - protein, 277 aa, Unknown
  Obtained from environmental sample
  DOMAIN (74)...(270): Homoserine dehydrogenase
  misc_feature (1)..(277): Xaa is any amino acid
MKAMNLPNTCFCDCTASNEVAALYAEILQSSIPVVTPNKRANSGSLDYYKTLTGFFRTRGIPYLYETTVCAGLPVISTLRDLFLSGDKVRRIEAVLSGTLSYIFNNFDGSKSFSALLREAKDKGFTEPDPRDDLNAVDAARKAVILARECGLNMEFAEVEIEPILPRACFEADGVEAFFKELEKSDADFEKRRREAANDGKALRYVAVIENGCAKLSLRKEQAGSPFLTLTDADNIVVITTDRYSTLPMVIKGPGAGAQVTAGGVFADIVRIARTLV

SEQ ID NO: 32731 - DNA, 519 bp, Unknown
  Obtained from environmental sample
  misc_feature (1)..(519): n is a, c, g, or t
gtgtgcgtccaatccggtacgcccggcatagccataggcgggctttcagtaggggagcccgctgaagtatttacggaagccttggcatatacaacggaggcgcttccggatgacaagccgcgttatgttatgggaatagggacgccccagtacattttaaccgctattgagcatggaattgacatgtttgactgcgttcttcttacaagagaggcccgaaacggcagggtatacacgcgaaaagggccgtttgcgcttaaaaaacgcgaaaacaccctcgatttttcgccgatagataaggagtgcggctgtaaagtttgcagggattattcccgcgcctatttacgccacctttttaagacaaaggagattctttgttccatgttggcaagttaccataatttgtattttatcaatgatcttgttacaaactgccgtaacgctatcaaggaaggaaggtttttacaatataagaaggaattcttgtccgcctacacggaggaagggattaatgaatag

SEQ ID NO: 32732 - protein, 172 aa, Unknown
  Obtained from environmental sample
  DOMAIN (1)...(163): Queuine tRNA-ribosyltransferase
  misc_feature (1)..(172): Xaa is any amino acid
MCVQSGTPGIAIGGLSVGEPAEVFTEALAYTTEALPDDKPRYVMGIGTPQYILTAIEHGIDMFDCVLLTREARNGRVYTRKGPFALKKRENTLDFSPIDKECGCKVCRDYSRAYLRHLFKTKEILCSMLASYHNLYFINDLVTNCRNAIKEGRFLQYKKEFLSAYTEEGINE

SEQ ID NO: 32733 - DNA, 1146 bp, Unknown
  Obtained from environmental sample
  misc_feature (1)..(1146): n is a, c, g, or t
gtgggggcgtacctgatcaaacccttcgccctcccggaactgcgtaactgcgtggaaaagatgatggccatgagggcgttccacctcaaaagcctgatgctcatgagggactccgacctcgtggacccggcggctaaagggcacgtggacgacctcgcctcgctctaccacttcacccgcaaacttatgctgaccctcgaaatatcggaggtgatgcggataacgctcgaagaggccaacggcaaggccgatgccaagttctgcaccatagaggtctgcatgccggactacaaggagatctactccatgccgcaggccggcgagatcgacaaggcggcgcagagcgctgtattcgccgaaaactgggaggacgccttcgtcggtatagacaaagagcgcttccggagcggcgccgtcccgcactacgcgtacaagggccgcagcggcgagtttaatgccgccgccgcctacaagtgtatcaacttcccgctcgtggtgacaggcaaaaccatcggcagcctgaccgtctggatcgccgccaacgccggcatcgacgagaggcagcgcagatacctgcacatcctgacctccttcacgtcgcccgtcatagagcacgtctacctagacctgcaagtgcgcttccaagccaaaaccgacaacctgacgggcattgcgaaccaccgctacttctacgagaccttggaacgcgagatagccagggccaaccgcaaaaaaagctccttcgccctgctcttggccgatatagacgacttcaaggcgatgaacgacacctacggtcaccaaatgggcgacgcggtgataattgacttggcgaaacgcgtatccgcaaacatccgcaccggcgacgttgtggcccgctacggcggcgaagagttcggcgtcatactccccgaatcggacgaggtcggggcgctggccatgtcaaaacgcatctgcgagtctttgtccaaggccccatacgccggcgcgaaacacataatcccgtacacggcaagtttcggtctggcctactacgatggaaataatccggtaaaaaaagatgaattaatactctcggcggatcaggcgctgtacaagtcaaaagccgaggggaaaaatagagttactgtggctggaaagtgttag

SEQ ID NO: 32734 - protein, 381 aa, Unknown
  Obtained from environmental sample
  DOMAIN (212)...(374): GGDEF domain
  misc_feature (1)..(381): Xaa is any amino acid
MGAYLIKPFALPELRNCVEKMMAMRAFHLKSLMLMRDSDLVDPAAKGHVDDLASLYHFTRKLMLTLEISEVMRITLEEANGKADAKFCTIEVCMPDYKEIYSMPQAGEIDKAAQSAVFAENWEDAFVGIDKERFRSGAVPHYAYKGRSGEFNAAAAYKCINFPLVVTGKTIGSLTVWIAANAGIDERQRRYLHILTSFTSPVIEHVYLDLQVRFQAKTDNLTGIANHRYFYETLEREIARANRKKSSFALLLADIDDFKAMNDTYGHQMGDAVIIDLAKRVSANIRTGDVVARYGGEEFGVILPESDEVGALAMSKRICESLSKAPYAGAKHIIPYTASFGLAYYDGNNPVKKDELILSADQALYKSKAEGKNRVTVAGKC

SEQ ID NO: 32735 - DNA, 1386 bp, Unknown
  Obtained from environmental sample
  misc_feature (1)..(1386): n is a, c, g, or t
gtggtttcagatgtccgcgaaacggataaaacgatccgtccaaaagcgccgtttaccacgtcgcaattacagcagactgcggcaaacaggcttggttacacatcgcgtaaaacaatgcaggtggcgcagcagctttacgaaggcgtaagcatcggcgcaagccgcgtcggtcttattacttacatgcgtacagatagcgtccgcatttcaaataccgcgctggaagacgtgcgcgcgtggcttggaaaaaatttccccggtgagttgcctgaaaaacccgttgaatacacggtaggcaaaaaggctcaggacgcgcatgaggcgataagacccacatacacggaatatactcccgattcggtaaaggagtctcttacaaaagatcaacttcgcctttatacgatcatctgggaaagatttgtttccagccagatgaataacgcgaaaagcagaaccgtcagcgtcgatataaaagttacggaaggacaggacgaagggctgttccgagtcagcgggacaaaacttcttgaaaaagggttttataaagcaattaaacttctttcctcgaaagatgaaagcggaaacacctgcccttcgttaaaaacaggcgatagagtaaacgtagataaatttaaaccggaacagcattttactcagggtcccgcccgttattccgacgcttcaatcgttcgtattcttgaggaaaagggcatagggcgtccgtccacttacgcgtcaattatttcggtgctgctggatcgctactatgttacccgatcgaacaagcagcttgttcccactttgctgggaaggaagatcaacgacgtactggtggaatattttccccagtatgttgatgccgcctttaccgcgtcaatggaaaccaaacttgacgaggtagaagaaagccagttgaaatggcccgatatgctgcaggaattttgggggccgttcaaagcgcaggtggacgaggtcggcaagactctggaatcgtttaaaggctcgctggacgagccgactgattatgtgtgcgaaaaatgcggcaagcctctggtaaagaaactgggacgttttggttttttccttgcctgtaccggtttccccgaatgtcgcaatacccgctcggttccccttgccaaatgccccaaatgcggcggtgacgtagtggcccgcaaaacaaaaggccggggaaaagaattttacggctgtaccaattaccccgaatgtgattttctcagccactttaagccgattaatcaggattgtcccaaatgcggtcagttcatggtagagaaatacgacaaaaagaatggcagtcataaggcctgtattaatccaaattgtgactacctgcacagcgcggaggatgaggaaagcgagaaatga

SEQ ID NO: 32736 - protein, 461 aa, Unknown
  Obtained from environmental sample
  DOMAIN (419)...(457): Topoisomerase DNA binding C4 zinc finger
  misc_feature (1)..(461): Xaa is any amino acid
MVSDVRETDKTIRPKAPFTTSQLQQTAANRLGYTSRKTMQVAQQLYEGVSIGASRVGLITYMRTDSVRISNTALEDVRAWLGKNFPGELPEKPVEYTVGKKAQDAHEAIRPTYTEYTPDSVKESLTKDQLRLYTIIWERFVSSQMNNAKSRTVSVDIKVTEGQDEGLFRVSGTKLLEKGFYKAIKLLSSKDESGNTCPSLKTGDRVNVDKFKPEQHFTQGPARYSDASIVRILEEKGIGRPSTYASIISVLLDRYYVTRSNKQLVPTLLGRKINDVLVEYFPQYVDAAFTASMETKLDEVEESQLKWPDMLQEFWGPFKAQVDEVGKTLESFKGSLDEPTDYVCEKCGKPLVKKLGRFGFFLACTGFPECRNTRSVPLAKCPKCGGDVVARKTKGRGKEFYGCTNYPECDFLSHFKPINQDCPKCGQFMVEKYDKKNGSHKACINPNCDYLHSAEDEESEK

SEQ ID NO: 32737 - DNA, 582 bp, Unknown
  Obtained from environmental sample
  misc_feature (1)..(582): n is a, c, g, or t
atgaatatcatggcaacccgcgtcattccaattactcatagcactcatccgctagtggaagtgtttggtttccccattgacaatttttcaagcgaagcgaagcgttttaggaataaccggctctgtcccttcaacaacaaggtgccaaattgcacgaaagataaagcaaatgacccattaggtacatgttcgatattttcagatgccggcatttgcataacttgcccaatacgtttcagagaaaactggatggttgtaggtactgcggcagagtttcttttcccaagcggttcaaattggacatctctgaccgaagtcagattaaaagataaacatggtcaatcagcaggtaatattgacattgtgttagtcgcctatgatgaattaggacgtgttattgactttggcgcattggaaattcaggcagtttacatatcggggaatattcgtaacccatttaagcattatattgatgaccccaagaaaaatattcaaatggattggacaaatcagccaaatttacctagacccgattttctttcttcatcgagaaaacggttagcacccccatttaatatttag

SEQ ID NO: 32738 - protein, 193 aa, Unknown
  Obtained from environmental sample
  misc_feature (1)..(193): Xaa is any amino acid
MNIMATRVIPITHSTHPLVEVFGFPIDNFSSEAKRFRNNRLCPFNNKVPNCTKDKANDPLGTCSIFSDAGICITCPIRFRENWMVVGTAAEFLFPSGSNWTSLTEVRLKDKHGQSAGNIDIVLVAYDELGRVIDFGALEIQAVYISGNIRNPFKHYIDDPKKNIQMDWTNQPNLPRPDFLSSSRKRLAPPFNI

SEQ ID NO: 32739 - DNA, 429 bp, Unknown
  Obtained from environmental sample
  misc_feature (1)..(429): n is a, c, g, or t
atgaaatacggcaggttgtacgattgggagacggcgaagaatgcctgtccgtccggctggcatcttcctactcgcgatgagtgggctattcttgaggaggaggtgggcggcattgccacggccggcaaggcgttgaaaatgagaagcggttggacgaaaaacctcaaagcctccgatgattacgggttttcggccatgccgggcggttaccgccgctacgccaacggcggcagtttccacgatgtccaaaacctcggtttgtggtggacggccacggagtacgatgataccaaggccactcatttcgagaataaggcgtacaatgtgggctacgcgtatctccggctcatggattatcgttacgcgaaagtgagcaagtacgacgactttaggcccaccggcctttccgtccgttgcgtccaagactga

SEQ ID NO: 32740 - protein, 142 aa, Unknown
  Obtained from environmental sample
  misc_feature (1)..(142): Xaa is any amino acid
MKYGRLYDWETAKNACPSGWHLPTRDEWAILEEEVGGIATAGKALKMRSGWTKNLKASDDYGFSAMPGGYRRYANGGSFHDVQNLGLWWTATEYDDTKATHFENKAYNVGYAYLRLMDYRYAKVSKYDDFRPTGLSVRCVQD

SEQ ID NO: 32741 - DNA, 375 bp, Unknown
  Obtained from environmental sample
  misc_feature (1)..(375): n is a, c, g, or t
ttgatgtttgacggcaaagtcttgggtatagggggcaacgcctcccttttggcctatatcggtcacaacggactaatgaattttgaactgccagaaacgtatataaacagcgataataagaaacgcgatataattattcttgcctgttacagcaaactgtacttcagttactatttaaagagcgcaaacgtaaacccgttgctttggacgaccaattttatggccccggaagcgtacacgttgcacgacgccctctccgggtacgtaagcggtgaaaccaacgaacagatccgcgagaaaggcgcggccgcttacgccaaatatcaaaactgtagttttaaagcggcaaaaggattgctggtaacgggttggtga

SEQ ID NO: 32742 - protein, 124 aa, Unknown
  Obtained from environmental sample
  misc_feature (1)..(124): Xaa is any amino acid
MMFDGKVLGIGGNASLLAYIGHNGLMNFELPETYINSDNKKRDIIILACYSKLYFSYYLKSANVNPLLWTTNFMAPEAYTLHDALSGYVSGETNEQIREKGAAAYAKYQNCSFKAAKGLLVTGW

SEQ ID NO: 32743 - DNA, 966 bp, Unknown
  Obtained from environmental sample
  misc_feature (1)..(966): n is a, c, g, or t
ttgactaaacaggaaggatggggctatctggtttcgttctatattccccttataaattcagccggaaagacagtaggaatagccgcttgcgattatgacggagaggaccttcacaataccattattacgaatatacggcggcagttagtcatcgggtgtatttccgttgtaatttgtattgtactaatttttatcataagcaaacctattcaaaaattaacaaaagtagtggcggaaatcggtgcaggcaatttagacaccattattgagggcagctacaataacgaatatgacataatcaaagactctgtaaactctatggcaacggaaataaaaaaatatatagaaggcaagcttcaggcggaacgcaagcttgccgaaagccgcatctccatcatgctttcccagatacagccgcatttcctatacaacgccctggcagtcatttcaaggctttgcgataaagacccggcccaggcaaaggaagcgacaaaaagcttttccgattacctgagggggaatatgaatttattggagcgcactgatacgattccctttcaaaatgagctaaaccataccataggctttttgaacctggaaaaagctatgtacggcgaagcgctaaatgtagtatatgacatacaaacaatagagtttaagcttcctgcccttagcgtacagcccatcgttgaaaacgcaatcaagcacggcataggcaaaaaagaagacggcggcgctgttgccatttcaacaaaagaaactgacagaagttatatgataattgttacagatgacggcgtaggttttgaacaggataaaattaacgatgacggacagcagcacatcggaattaacaatgtccgtctcaggctatccgcacaatgcggcggatcgcttgaaataaaaagcaaaccgggaacagggacaaccgccacgataaaaattccgaaacaggaagcgctgtag

SEQ ID NO: 32744 - protein, 321 aa, Unknown
  Obtained from environmental sample
  DOMAIN (48)...(113): HAMP domain
  misc_feature (1)..(321): Xaa is any amino acid
MTKQEGWGYLVSFYIPLINSAGKTVGIAACDYDGEDLHNTIITNIRRQLVIGCISVVICIVLIFIISKPIQKLTKVVAEIGAGNLDTIIEGSYNNEYDIIKDSVNSMATEIKKYIEGKLQAERKLAESRISIMLSQIQPHFLYNALAVISRLCDKDPAQAKEATKSFSDYLRGNMNLLERTDTIPFQNELNHTIGFLNLEKAMYGEALNVVYDIQTIEFKLPALSVQPIVENAIKHGIGKKEDGGAVAISTKETDRSYMIIVTDDGVGFEQDKINDDGQQHIGINNVRLRLSAQCGGSLEIKSKPGTGTTATIKIPKQEAL

SEQ ID NO: 32745 - DNA, 345 bp, Unknown
  Obtained from environmental sample
  misc_feature (1)..(345): n is a, c, g, or t
atgaataaagacataggtattattaagcttattcttgaatatattgaaagcattattagaacacaaaataggtttggcaatgatgcctcaatatttagttctgacagagactattttaactcggtttgcatgaatttgcttcaaattggagagctttcccatcatttgacttctgaatttatcaaaagccacacagatattccctggaaaaatattgtcggattgcggaatgtggttgttcatggatatgggcaattggatatagaaacagtttgggcaaccgttataagcgatttacctgatttgcgtcttaaatgtatggcaataattaactcgggtatttag

SEQ ID NO: 32746 - protein, 114 aa, Unknown
  Obtained from environmental sample
  DOMAIN (30)...(106): Protein of unknown function DUF86
  misc_feature (1)..(114): Xaa is any amino acid
MNKDIGIIKLILEYIESIIRTQNRFGNDASIFSSDRDYFNSVCMNLLQIGELSHHLTSEFIKSHTDIPWKNIVGLRNVVVHGYGQLDIETVWATVISDLPDLRLKCMAIINSGI

SEQ ID NO: 32747 - DNA, 432 bp, Unknown
  Obtained from environmental sample
  misc_feature (1)..(432): n is a, c, g, or t
ttgctttttacgcaccaaaacgcgccatggattgacaatcctgaaattaagacggcaaggccgtatccgggcgattacggctctggccttgtccgtaaatacggtatgaggatgtcagccgacatctggaacagggagcggctcgcgatggaattcgcgcctgtcaacgcgttcaggaaaaagtacaacgcgcgggttatctgtaacgagttcggcgtttacacgcccgtcgagcttcagtcgcaattgcgctggtatgacgatttgctctcaattctcaatgagatggggatcggtttctcgtactggaactataaaaatctggacttcgggataatttccatcggggagaagctgcacgaattccttccgcagtacgacaacgccgacaggataaatcacccggttcttgaagtgttaaggaaatattaa

SEQ ID NO: 32748 - protein, 143 aa, Unknown
  Obtained from environmental sample
  misc_feature (1)..(143): Xaa is any amino acid
MLFTHQNAPWIDNPEIKTARPYPGDYGSGLVRKYGMRMSADIWNRERLAMEFAPVNAFRKKYNARVICNEFGVYTPVELQSQLRWYDDLLSILNEMGIGFSYWNYKNLDFGIISIGEKLHEFLPQYDNADRINHPVLEVLRKY

SEQ ID NO: 32749 - DNA, 699 bp, Unknown
  Obtained from environmental sample
  misc_feature (1)..(699): n is a, c, g, or t
atggataaggaaattgaatacgctgaaagcgcagctggaagcgccgctgtaagcgcagcgacaggcgcggatgacgacgttgccgcagacgttcagacagaagccgcgggagctgaggtttcaggaacagaagcggcccccggcagacgatcttacggacgcggcggcagggaaggcaaggggcgagggcgcgaccgtgacagggacagggactcgtccgaaaaagaatttgtcgaaaagctggtaaagctgaaccgcaccgcgaaggttgtcaagggcggccggcgtttttccttctccgcccttactgtaatcggcgaccgcaaaggcaatgtgggttacggcttcggcaaggccaacgacgtttcggaggccatacgcaagagcattgacaaggcgaagcgcaatatggtgaagctgccggttatcaaaggcacgattccccacgaggtgacggggtacttcaaggcttcgcaggtattgctcaagccggcgcgttcggggaccgggatcatcgccggagggccggtgcgcgccataatggaagcgggcggcgttaccgacatactttcaaagtcaatcggcgcggcgagccagtataacgtggtcaaggcgacattcgactgcatcagcaggatgatggacgcgaagacgatagcgaaaaacaggggcaagtccctgaacgagctgtggggttga

SEQ ID NO: 32750 - protein, 232 aa, Unknown
  Obtained from environmental sample
  DOMAIN (151)...(224): Ribosomal protein S5, C-terminal domain
  misc_feature (1)..(232): Xaa is any amino acid
MDKEIEYAESAAGSAAVSAATGADDDVAADVQTEAAGAEVSGTEAAPGRRSYGRGGREGKGRGRDRDRDRDSSEKEFVEKLVKLNRTAKVVKGGRRFSFSALTVIGDRKGNVGYGFGKANDVSEAIRKSIDKAKRNMVKLPVIKGTIPHEVTGYFKASQVLLKPARSGTGIIAGGPVRAIMEAGGVTDILSKSIGAASQYNVVKATFDCISRMMDAKTIAKNRGKSLNELWG

SEQ ID NO: 32751 - DNA, 408 bp, Unknown
  Obtained from environmental sample
  misc_feature (1)..(408): n is a, c, g, or t
atgatggccgagcaagtcggcaatcgggtgttaataggaagaaatatgctgaagaagatgttggaaaaggaccggaaacggcttaaaagaaaagtgcatatccgcaaaaagatctccggcacggcgcttaggccgcggatgacggttacgcggagcaaccgcaggctgtccgtacagatcattgacgacgacaagggccacactctggcttccgcttccaccctggaaaaggaactgcgcggcattaaggccaccgtagccggcgcggcccagcttggcgaattattcggcaagcgtcttctggaaaaggatattaagtccgtggtctttgaccgcaacggatatttgtaccatggcataatcaaggctttggccgatggaacccggaaagccgggatacagttctaa

SEQ ID NO: 32752 - protein, 135 aa, Unknown
  Obtained from environmental sample
  DOMAIN (22)...(135): Ribosomal L18p/L5e family
  misc_feature (1)..(135): Xaa is any amino acid
MMAEQVGNRVLIGRNMLKKMLEKDRKRLKRKVHIRKKISGTALRPRMTVTRSNRRLSVQIIDDDKGHTLASASTLEKELRGIKATVAGAAQLGELFGKRLLEKDIKSVVFDRNGYLYHGIIKALADGTRKAGIQF

SEQ ID NO: 32753 - DNA, 585 bp, Unknown
  Obtained from environmental sample
  misc_feature (1)..(585): n is a, c, g, or t
gtggcattcctcaatgtagtgataggtatcttttacggtatgatatggggctatgtccgtaaagtggactggtttcttacggaattttggaacgtcattaacaacataccaagcactatcatactgatattggtatccttcatactaagacctggtgtcggcccgataatattcgccatgtgcttatacggctgggtaggaatggcgcgtttgattcgtaacctcaccgtaatacttagagatcgggaattcaacatggcttcaagctgccttggcagcggcactctaaaaatcatagtccgcaatttgctcccgcaaatgatctcggtcataacgcttcagttcgcccttgccattccaggagctatcgggtctgaagtgttcctggcctaccttgggcttggtctggacgttaaaaccccatccctcggcaacctcctgaacaccggacgcggtattatgatggcgccaacccttcggtaccagcttttcttcccggccattgtcctctgcgtaatatcagtcagtttctatttgatgggcagcgccttcgccgattcggctgatcccagaaatcacgtttag

SEQ ID NO: 32754 - protein, 194 aa, Unknown
  Obtained from environmental sample
  DOMAIN (1)...(194): Binding-protein-dependent transport system inner membrane component
  misc_feature (1)..(194): Xaa is any amino acid
MAFLNVVIGIFYGMIWGYVRKVDWFLTEFWNVINNIPSTIILILVSFILRPGVGPIIFAMCLYGWVGMARLIRNLTVILRDREFNMASSCLGSGTLKIIVRNLLPQMISVITLQFALAIPGAIGSEVFLAYLGLGLDVKTPSLGNLLNTGRGIMMAPTLRYQLFFPAIVLCVISVSFYLMGSAFADSADPRNHV

SEQ ID NO: 32755 - DNA, 831 bp, Unknown
  Obtained from environmental sample
  misc_feature (1)..(831): n is a, c, g, or t
gtgtatagcggggacaatcttgtgtctgtaaaggacaaggaaggggacacaaataaatacaattataaccaagacaggctaagcgagatggtgaagcctgacggaagcgctataaggattgaatacggctatgccagttccggcggtgcactgcttgtaacagccacaacccacgaggaaggggcgagcgaaaagtttgagtataaccctgcacaaaaaacaactacatacacaaactactccgggataattacgaggtactggtatgataacaagcaccggacaattcgtgaagaacactcagacggcagggttaaaacttttgcctacaatggagccgatttattggaacgggagactcttaacggttttgagatacgttacagctacgatggacggggcaatgttacagaaaagcaatactctgacgggaaaaaggaaagctggcagtggagcggcaacgaccaactgctaagatactccgaccgcgatgaggtaacgactgaactgcattacgacagccgatggaattgcatagagatcaggcggggcgggcagatgatttacacagccaggtatgatcaacagaacaggcttacgacaagcagagagggaaaccgttcagagatacgatacgaatatgacgaccgtgattttattggatcagagagcattacaataaacggcaaagagataagggaagaatggaaatatgatgcgcttggccgagtgctaaaatacaccgacgcccttggaagggtctgggaatacacttactatgacagggaaaactatagaaaaaacgcctttgggactggaaaggcgatatga

SEQ ID NO: 32756 - protein, 276 aa, Unknown
  Obtained from environmental sample
  misc_feature (1)..(276): Xaa is any amino acid
MYSGDNLVSVKDKEGDTNKYNYNQDRLSEMVKPDGSAIRIEYGYASSGGALLVTATTHEEGASEKFEYNPAQKTTTYTNYSGIITRYWYDNKHRTIREEHSDGRVKTFAYNGADLLERETLNGFEIRYSYDGRGNVTEKQYSDGKKESWQWSGNDQLLRYSDRDEVTTELHYDSRWNCIEIRRGGQMIYTARYDQQNRLTTSREGNRSEIRYEYDDRDFIGSESITINGKEIREEWKYDALGRVLKYTDALGRVWEYTYYDRENYRKNAFGTGKAI

SEQ ID NO: 32757 - DNA, 798 bp, Unknown
  Obtained from environmental sample
  misc_feature (1)..(798): n is a, c, g, or t
atggctacgaatataaatgcaatagccggcggcgcagagcaggctagccataacgcaagcgaagtagctggtgcggcagggcaaatgagttcaaatataaatacaatagccgctgctgttgaagaaatgagctcaagcataagacagattgcgggcaatgctctcgatacgcgaaaaatcacggaagatgcaatctccaaaagcagcgatgcaaccaaggttatggacaaacttggcatagccgccaaggaaatagggaaggtaacagatgttataaaaaagatagccgataaaactagccttttggcactcaatgccaccattgaagctgcaagtgcaggcaaagctggcaaaggattttccgttgttgccgaagaaatcaaagcacttgcgcaccaaagcgcaaacaatgcagacgatattgcccgcaaaatagagaacattcaagaaggcacaggtgaggcggcaaaagcgataaacggcgtatctggaataattgcccaaataaaccaaagcgttgaagccatagccggatacgttgagcaacaaaccaaggcgagcaatgaaatagcaagcaatgtggctcaaacaaatacggaggcaacacgagtggcttcggccatcggagaggtggctaaaggtgccaacgaaatagcaagcaatgttacgctggcaaatgcaggggcaaagcgagtggtttctgccataggcgaggtaaccaaaggtaccaatgatgtttcaaaaaacgcaagcgatgcggcaaaaggtgttggaagcgttgggccacaatattgttag

SEQ ID NO: 32758 - protein, 265 aa, Unknown
  Obtained from environmental sample
  DOMAIN (13)...(240): Methyl-accepting chemotaxis protein (MCP) signaling domain
  misc_feature (1)..(265): Xaa is any amino acid
MATNINAIAGGAEQASHNASEVAGAAGQMSSNINTIAAAVEEMSSSIRQIAGNALDTRKITEDAISKSSDATKVMDKLGIAAKEIGKVTDVIKKIADKTSLLALNATIEAASAGKAGKGFSVVAEEIKALAHQSANNADDIARKIENIQEGTGEAAKAINGVSGIIAQINQSVEAIAGYVEQQTKASNEIASNVAQTNTEATRVASAIGEVAKGANEIASNVTLANAGAKRVVSAIGEVTKGTNDVSKNASDAAKGVGSVGPQYC

SEQ ID NO: 32759 - DNA, 669 bp, Unknown
  Obtained from environmental sample
  misc_feature (1)..(669): n is a, c, g, or t
atgcaaaataagtataaattaggagattgcgttatgggcaaaaaagaaaccgtaaatgtgcagggcagggaaattgtccttataaaaaaagaacttgaagattatatttcgcttacagatatagcaaaagttcgtgacacagaaaatccctctcagattattagcttgtggttaagaacttacagcacgattgaatatctaggcttgtgggaaatgttgaataacccgaattttaaaccccacatttatgaggggtttaaaaaagattccgctaaaccgcatttttggatgtctccgcaaaaatggattaacgaaacaaacgccataggcattacttcaaaatctggtcgctatggtggtggtacttttgctcattcggacatagcttttaaatttgccgcttggatttccgctgaatttgaattataccttgtaatggaattcaaacgcttaaaaattgaagaacaaaaacaactaggctggtcggcaaagcgagaacttgcaaaaataaactaccacattcataccgatgctattaaacacaacctcattccagcaaagctcacaccccagcaaacttccattatctacgcaagcgaagccgatgtcttaaacgtagctctctttggaatgaccgcaaagcaatggcgagtaaaaataacgatttga

SEQ ID NO: 32760 - protein, 222 aa, Unknown
  Obtained from environmental sample
  misc_feature (1)..(222): Xaa is any amino acid
MQNKYKLGDCVMGKKETVNVQGREIVLIKKELEDYISLTDIAKVRDTENPSQIISLWLRTYSTIEYLGLWEMLNNPNFKPHIYEGFKKDSAKPHFWMSPQKWINETNAIGITSKSGRYGGGTFAHSDIAFKFAAWISAEFELYLVMEFKRLKIEEQKQLGWSAKRELAKINYHIHTDAIKHNLIPAKLTPQQTSIIYASEADVLNVALFGMTAKQWRVKITI

SEQ ID NO: 32761 - DNA, 345 bp, Unknown
  Obtained from environmental sample
  misc_feature (1)..(345): n is a, c, g, or t
gtgttgaacagtttgaaagattctcataacgtttatgccgccagggtcggcggagaggaattcgccctgctgtggtttgaaaccgaagcctcgcatgtggacgttgtcatttcccatttgcagaaattaataaaagaactcaaaattccgcatgaaaaatcaaaagtctcgccgtatgtgtctatcagcataggggtatttgtagaacgaagcggcgcgcccaccgatacgcagaccatgtatgatatggctgacaaagcgctgtacaacgccaaggaaggcgggcgtaattgcgcggttatatttggtaataagattgaacaatacaaaataacgccgctttga

SEQ ID NO: 32762 - protein, 114 aa, Unknown
  Obtained from environmental sample
  DOMAIN (2)...(98): GGDEF domain
  misc_feature (1)..(114): Xaa is any amino acid
MLNSLKDSHNVYAARVGGEEFALLWFETEASHVDVVISHLQKLIKELKIPHEKSKVSPYVSISIGVFVERSGAPTDTQTMYDMADKALYNAKEGGRNCAVIFGNKIEQYKITPL

SEQ ID NO: 32763 - DNA, 594 bp, Unknown
  Obtained from environmental sample
  misc_feature (1)..(594): n is a, c, g, or t
atggagttaagcgcgaccatgctggaagacgaacgcgacatctattttgatcaaagtattatagacgaattaactcagctaaaaaaccgccgagattttcagcagacattcaagagatacttgtccaactgcagaacttcggataattggctgtgtattgccatcatcgacattgatttcttcaaattctacaacgatcattacggacactccgagggtgacgaatgtctgcgcgccctgggccgggtattgaacagtttgaaagaatctcatgacatttattcagccagggttggcggggaagaatttgccctgctgtggttcgaggtagaaatcccgcatgtggacgttgttgtttcatatttacagggattaataaaaaaactcaggattccgcatgcaaaatcaaaagtcgcgccgtatgtgtctgtcagtatgggagtatttgtagaaaaatgcggcgcatccaccgatacgcagaccatgtatgatatggcggacaaagcactgtacaacgccaaagaaggcgggcgcaattgcgcggttatctttggcagtatgattgaacaatacaaaataacaaataacaaataa

SEQ ID NO: 32764 - protein, 197 aa, Unknown
  Obtained from environmental sample
  DOMAIN (15)...(180): GGDEF domain
  misc_feature (1)..(197): Xaa is any amino acid
MELSATMLEDERDIYFDQSIIDELTQLKNRRDFQQTFKRYLSNCRTSDNWLCIAIIDIDFFKFYNDHYGHSEGDECLRALGRVLNSLKESHDIYSARVGGEEFALLWFEVEIPHVDVVVSYLQGLIKKLRIPHAKSKVAPYVSVSMGVFVEKCGASTDTQTMYDMADKALYNAKEGGRNCAVIFGSMIEQYKITNNK

SEQ ID NO: 32765 - DNA, 357 bp, Unknown
  Obtained from environmental sample
  misc_feature (1)..(357): n is a, c, g, or t
gtggtcgttgttggaaaatgcgggggggattataatgatcagaaaaaaaattttgaatattttaagttggatgtcagcggttggagggacattgctgcgatttctgtaagtccatggtgtacagtcggcttgaaagcggacagcatggtagtcgcggttgggaataataaagatggtaagtgcaatataggaagttggcggtacattgggcctgtgtctgaagaaaagcgtattaaatggaaacgccgtgcggaacaatcaagacgttggcagcaacaaggcttgtgcaaatactgcggtggcaaactcggcggtttgttcaacaagaagtgcaaggcttgcgggagggagaattaa

SEQ ID NO: 32766 - protein, 118 aa, Unknown
  Obtained from environmental sample
  misc_feature (1)..(118): Xaa is any amino acid
MVVVGKCGGDYNDQKKNFEYFKLDVSGWRDIAAISVSPWCTVGLKADSMVVAVGNNKDGKCNIGSWRYIGPVSEEKRIKWKRRAEQSRRWQQQGLCKYCGGKLGGLFNKKCKACGREN

SEQ ID NO: 32767 - DNA, 1221 bp, Unknown
  Obtained from environmental sample
  misc_feature (1)..(1221): n is a, c, g, or t
ttgttccgcacggcgtttccatttaatacgcttttcttcagacacaggcccaatgtaccgccaacttcctatattgcacttaccatctttattattcccaaccgcgactaccatgctgtccgctttcaagccgactgtacaccatggacttacagaaatcgcagcaatgtccctccaaccgctgacatccaacttaaaatattcaaaattttttttctgatcattataatcccccccgcattttccaacaacgaccaccgtaccatttgccagggcaaccgcattataaaaaggctaaagaaaaagaaaaaagggacgatagggaagagcaggagggggcgcatggacataagagccaaccttgcattaatcccggatccgcggatcgaacgctgtaaaaagcatcttttaaccgacattctgcttctttgcatcatcgcgatggtcagcggtgtcggatcggtggaagacatcgctttttttggcatggcccacgtccaatggctgaaacaataccttgccctgccaaacggcattcccagcgcggataccattctgcgggtattgggccgtatcgaccataacaagtttgaggaatgctttctcaattgggcgcggggatacttccgaaagctggcgaagccgggttcggtcatcggcgtagacgggaagacggccaggggaagcgcgacggataccgaaaggggcatccatctggtaagtgcctgggcggacacattgggcctggtactcgcccagctaaagacgcaggagaaatccaacgagattaccgccattccccagttgcttgccgccctggacatagcaggctgcatcgttaccattgacgctatggggtgtcagaagcagatagccgccgatataatccgggggaaaggggattatgtcctggccctcaaggaaaaccatcctgaagtctatagggaagtcgaggaactgtttccggagaaatggcttggcaaaccagaatataccgatgttaccaaggatcacggccgtattgagaagagggaagcatggcttgataccgacatctcatggtttgagggcagggaagagtgggctgggcttaagggttntggctgcgttcgttccacccggacggtaaaagaagcaactaccgttgagtgccggtatttccttacagcctccacgatacggccccagttgcccagtcggtcagaagccactgggggatag

SEQ ID NO: 32768 - protein, 406 aa, Unknown
  Obtained from environmental sample
  DOMAIN (218)...(371): Transposase DDE domain
  misc_feature (1)..(406): Xaa is any amino acid
MFRTAFPFNTLFFRHRPNVPPTSYIALTIFIIPNRDYHAVRFQADCTPWTYRNRSNVPPTADIQLKIFKIFFLIIIIPPAFSNNDHRTICQGNRIIKRLKKKKKGTIGKSRRGRMDIRANLALIPDPRIERCKKHLLTDILLLCIIAMVSGVGSVEDIAFFGMAHVQWLKQYLALPNGIPSADTILRVLGRIDHNKFEECFLNWARGYFRKLAKPGSVIGVDGKTARGSATDTERGIHLVSAWADTLGLVLAQLKTQEKSNEITAIPQLLAALDIAGCIVTIDAMGCQKQIAADIIRGKGDYVLALKENHPEVYREVEELFPEKWLGKPEYTDVTKDHGRIEKREAWLDTDISWFEGREEWAGLKGXGCVRSTRTVKEATTVECRYFLTASTIRPQLPSRSEATGG

SEQ ID NO: 32769 - DNA, 558 bp, Unknown
  Obtained from environmental sample
  misc_feature (1)..(558): n is a, c, g, or t
atgaatattttagaccttgtcggcaacaccccggtaatcgaattgaaaaaaatatttaattcaacaaacggagtatccctgtttgccaaagcggaatattttaacccaagcggttccgttaaagaccgcgccgcaaaagccatgatgctgcgcggcataaactcagggaagcttaccaaagataaaattttattggactccacaagcggcaatacgggcatcgcgtacgccatgttcggcgcggcgcttggttatcgtgtaaaattattcatgccggcaaacgccagcgcggaaaggaaaaaacttatacgcgcttacggcgccgaaattatagaaacagacccgcttgaaggctccgacggcgcgtatcgcatagtaacggagttggccaaaaaagagccggatctgtatttcttccccaatcaatacgacaattttgaaaatccgaatacgcattatgaaacaaccggagttgaactgtacaagcaatgtaaacctacgcattttgccgcgggaacaggcacatcgggaacttttatggggtttccagacggctaa

SEQ ID NO: 32770 - protein, 185 aa, Unknown
  Obtained from environmental sample
  DOMAIN (3)...(185): Pyridoxal-phosphate dependent enzyme
  misc_feature (1)..(185): Xaa is any amino acid
MNILDLVGNTPVIELKKIFNSTNGVSLFAKAEYFNPSGSVKDRAAKAMMLRGINSGKLTKDKILLDSTSGNTGIAYAMFGAALGYRVKLFMPANASAERKKLIRAYGAEIIETDPLEGSDGAYRIVTELAKKEPDLYFFPNQYDNFENPNTHYETTGVELYKQCKPTHFAAGTGTSGTFMGFPDG

SEQ ID NO: 32771 - DNA, 309 bp, Unknown
  Obtained from environmental sample
  misc_feature (1)..(309): n is a, c, g, or t
atgctcatgcagccggactcgccgtttcacgggctggagggaatgaagcacatggaatcaaccataacgccgaaaatttttgaccggagcattgccgatgtacatataaccgttaaaacagaagacgcttacgcgacagcgcggcggcttgccgcggaagaaggaatttttgtggggataagctccggggcaaatgtgtacgccgcgatggaatgggcaaaaaccctgcccgcaggttcgcgggtcgctacaatactgtgcgataacggcaatcgttatatgtcacagccattatggaaggacatttaa

SEQ ID NO: 32772 - protein, 102 aa, Unknown
  Obtained from environmental sample
  misc_feature (1)..(102): Xaa is any amino acid
MLMQPDSPFHGLEGMKHMESTITPKIFDRSIADVHITVKTEDAYATARRLAAEEGIFVGISSGANVYAAMEWAKTLPAGSRVATILCDNGNRYMSQPLWKDI

SEQ ID NO: 32773 - DNA, 441 bp, Unknown
  Obtained from environmental sample
  misc_feature (1)..(441): n is a, c, g, or t
atggaaggacatttaatgctgcaactttctgttgaactggaaaaaaatattagaacagatggcgagactgcctatcctaacgaatgttgcggcgttttaatcggcgacattgacaacgagggaatcaaaacagccagaagcacgttaaccattgataacgcgcgggaagacggggagcaataccaccgcttccttataacgcccgaaaatatgatgaaagcggagcaaaccgcgcgatcgatgaagcttgacgttatcggcttttaccactcgcaccccgatcatccctcagcgccgtccggttatgataaagagcacgccctgcctttttactcgtatgtgattgtgtcggtggataagggcaaggcgcaggttcttaccagttgggaacttaccgatgacagaagtgattttatgcaagaaaagataaatggaggttaa

SEQ ID NO: 32774 - protein, 146 aa, Unknown
  Obtained from environmental sample
  misc_feature (1)..(146): Xaa is any amino acid
MEGHLMLQLSVELEKNIRTDGETAYPNECCGVLIGDIDNEGIKTARSTLTIDNAREDGEQYHRFLITPENMMKAEQTARSMKLDVIGFYHSHPDHPSAPSGYDKEHALPFYSYVIVSVDKGKAQVLTSWELTDDRSDFMQEKINGG

SEQ ID NO: 32775 - DNA, 687 bp, Unknown
  Obtained from environmental sample
  misc_feature (1)..(687): n is a, c, g, or t
atgggtagccgctatacattttccgaatcccgctccggtgagattgttccttctattataattgcgacgggagacaaccgtcctcttcattcgttaatcgatccaaagcgcgaggcggaacgccttgtttcaaccataccgcaggataccggtttcgttatctttcttggtctgggcggcggttttgtcccgcaagccgctcttgacaataccgccgcgcgggttgtcgtaatagattttgacaaagacggcgttaaagaacttttatccgtaaaagattactcgccgcttttaaacaacggccgtttcagccttttaactgactttacgtttgatgaaataaaaaaatttatccttgccgactacaaccccgttctgtacggaggcattaaagttattccgcttagaacaagaaccgaacaagaacctgaaaaattcagcaaagccgccgccgctattcaggaggcggtagaaaatacagcctcggatttcagcgttcaggcgcacttcgggcttcgctggttttccaacatcatacacaacataaaaaacgccgaaaccgcggataaaactttttacgcgaaaaaaacaaataaggcggcaattgccgcggcgggtccttcgctggacgggcagataacttctctcgctgaatataaatcgcgcggagttctcgtgccgatctga

SEQ ID NO: 32776 - protein, 228 aa, Unknown
  Obtained from environmental sample
  misc_feature (1)..(228): Xaa is any amino acid
MGSRYTFSESRSGEIVPSIIIATGDNRPLHSLIDPKREAERLVSTIPQDTGFVIFLGLGGGFVPQAALDNTAARVVVIDFDKDGVKELLSVKDYSPLLNNGRFSLLTDFTFDEIKKFILADYNPVLYGGIKVIPLRTRTEQEPEKFSKAAAAIQEAVENTASDFSVQAHFGLRWFSNIIHNIKNAETADKTFYAKKTNKAAIAAAGPSLDGQITSLAEYKSRGVLVPI

SEQ ID NO: 32777 - DNA, 813 bp, Unknown
  Obtained from environmental sample
  misc_feature (1)..(813): n is a, c, g, or t
atggcgctctcncattacggcatcagggcggacattgtaatgagtacggacggcggaaattgggcgttaaggcacatctacccctttttcagaaaacaagacaatgttaaaaataacgttgaaaacgccgcgtcttttgccgtaaatctttgcgcggcgcttccctcccaatgcgccggaagctccatgttaataatgaacgacggaagtttctggcagaatgttatactgcatgaactttctataccgtccgtaatcattacgcaaaaaggaaccgttagcgcctgtgccgtagaactcgctcttgcgcttacaagcggaaatatttatcttgccggcttagaccttgccgtaaaagacatgagaagccatgtccgcccttatgcttttgatcacttgctttatgacaaagcaagccgttttatgcccgtttattcgcaaagttatataaggtcaaaccaaattcaggaaggcggaagccttgacatttacgcggcatggtttaagaaacagcttgcatcgtggccgaaacggatcttctctatcggcggcggcagcgaagtatttgaaaacgcgctttgtgaagagaaggcaggcaaaaaaaacacttgcgaatattttaaggccgagggcgtaaaaggcgaacccgcgaattttcgcgaaagaagcgccgccgccctgattgccgccttgaaaaacggcgaatacgcggaaaacctgaaaaaagaacttacgcccctgcttttccccggcgcaaaagacgttacggaaaatcaaatggaaaccgcgattaacgaggctgcttatgggtag

SEQ ID NO: 32778 - protein, 270 aa, Unknown
  Obtained from environmental sample
  misc_feature (1)..(270): Xaa is any amino acid
MALSHYGIRADIVMSTDGGNWALRHIYPFFRKQDNVKNNVENAASFAVNLCAALPSQCAGSSMLIMNDGSFWQNVILHELSIPSVIITQKGTVSACAVELALALTSGNIYLAGLDLAVKDMRSHVRPYAFDHLLYDKASRFMPVYSQSYIRSNQIQEGGSLDIYAAWFKKQLASWPKRIFSIGGGSEVFENALCEEKAGKKNTCEYFKAEGVKGEPANFRERSAAALIAALKNGEYAENLKKELTPLLFPGAKDVTENQMETAINEAAYG

SEQ ID NO: 32779 - DNA, 921 bp, Unknown
  Obtained from environmental sample
  misc_feature (1)..(921): n is a, c, g, or t
ttgtccagcatactgaacgatattattactctggtgactacccgcctgggggaaaaacccataatattcaaattaaatatcaaagacgatctgccaaacaaactgttgggtgatgatctgcgggtaaaacaaatacttaccaatctgctcactaacgcgattaaatacacccgcgagggaagcatcgagcttaccgtacgttccacacgggaaggcgataagatgtggctggatgtcgccgtcagcgacacgggcataggcatacccaaggacgatatcggcagtctgttcatggattattaccaggtcgccgccagttccacccgcaacattgagggcacggggttgggcttacccattaccaaacgactggtagaaatgatggaaggggaaatcaccgtggcgagcgagtacggcaaaggctcaacgttcagtttccgcataaaacaaggttttatcgacgacgcggtactgggagcggaggtttcggaaaaactccgcagcttcagttactccgacgacaaacgcattgtttccaaaaaactggtaagggtcaatttgagctacgcacgggtgctggtggtagacgatatgcagaccaatctggacgtggcatcgggtatcctgcgtaaataccaaatgcaggttgacgttttaaaaaacggactggccgcgattgaccggataaaagcggggactccggtttacgatataatattcatggaccacatgatgcccggaatggatggtatagaaacggtggacaatattcgcgctattggcacggaatacgcgaagaaggtcccgattgtcgccctgaccgccaacgccatacagggaaccgacaagatgttctacgcgcacgatttccaggcgtttgtaccaaacctattgatgtcatggaaatggatacggttttga

SEQ ID NO: 32780 - protein, 306 aa, Unknown
  Obtained from environmental sample
  DOMAIN (190)...(295): Response regulator receiver domain
  misc_feature (1)..(306): Xaa is any amino acid
MSSILNDIITLVTTRLGEKPIIFKLNIKDDLPNKLLGDDLRVKQILTNLLTNAIKYTREGSIELTVRSTREGDKMWLDVAVSDTGIGIPKDDIGSLFMDYYQVAASSTRNIEGTGLGLPITKRLVEMMEGEITVASEYGKGSTFSFRIKQGFIDDAVLGAEVSEKLRSFSYSDDKRIVSKKLVRVNLSYARVLVVDDMQTNLDVASGILRKYQMQVDVLKNGLAAIDRIKAGTPVYDIIFMDHMMPGMDGIETVDNIRAIGTEYAKKVPIVALTANAIQGTDKMFYAHDFQAFVPNLLMSWKWIRF

SEQ ID NO: 32781 - DNA, 666 bp, Unknown
  Obtained from environmental sample
  misc_feature (1)..(666): n is a, c, g, or t
gtggaatatcttaatccggaacaattgaaactgattttctcattgccagatattacaacaaagcacggcagacgcgacagatttttcattattttcgcctatgaaacaggggcaagaatacaggaactgctggatttgcaattaagcggtattattcgtgatgactcaagtttacgaataagaatccatggaaaaggaaataaaatacggtatgttcccctgcttggaacaatggtaaaacatttggaggcataccttgccgaatttcataaagaagacacgcccgatgcctatctgttttttacaattcataattccgggaaaacacagatgaaacccggcaccgttgattattttttgaaaaaatatgcgggatttgcgaataaatctgataacacgttccccaggaatttacatgcccatatgttcaggcacagcattgcaatggcaatgtataaaaagggcattccgatatcttacattcgggatttccttggacacaacagcattgaaacaacgactatttattcttattcggatgatgaaactataagaaaagccttggaggcaaccgccgataaagattcaattgacacgttaacagtccgcaagaaaaactggaaaggcagcgagcagtccttgcttgaatactgcggattaggctga

SEQ ID NO: 32782 - protein, 221 aa, Unknown
  Obtained from environmental sample
  DOMAIN (12)...(186): Phage integrase family
  misc_feature (1)..(221): Xaa is any amino acid
MEYLNPEQLKLIFSLPDITTKHGRRDRFFIIFAYETGARIQELLDLQLSGIIRDDSSLRIRIHGKGNKIRYVPLLGTMVKHLEAYLAEFHKEDTPDAYLFFTIHNSGKTQMKPGTVDYFLKKYAGFANKSDNTFPRNLHAHMFRHSIAMAMYKKGIPISYIRDFLGHNSIETTTIYSYSDDETIRKALEATADKDSIDTLTVRKKNWKGSEQSLLEYCGLG

SEQ ID NO: 32783 - DNA, 831 bp, Unknown
  Obtained from environmental sample
  misc_feature (1)..(831): n is a, c, g, or t
atgaggtgtgaggaacctatgaaaattattgagattctgcgtcttggggagcagggatattcccaaagggacattgccgccagcgtcaaatgcgctaaatccactgtgggagccatccagaaaaaatgcagggaatgcgggcttcagtatgaacaggcggtggggatgagccatgaggcgcttctttccacactctaccctgagggttcaggaggcaggcagttcaaggacgagcctgattttgaaaagatacagaaactgctggacggacggaaacgggtaaacctgcaatatgcgtgggaagaataccggcgtaccaccgaggaagggctgagttacagccagttctgcaaccggtaccgcagatggcggaatgcctgcgggaaagacgtggtcatggttcaggagcgggaaccgggaaaagagttgtttgtggactggatgggggacacccttgcctgcgtaaaggacagcgagacggggaaactggtgaaggcacactttttcgtagcgactttaggggattcagggtatccgtatgcggaagcctttgccaatgagaagatggccagttggataacggcccatgtgcataccttctcgcatataggaggggtgcctcacgttatcattcctgataactgccggactgcggtgagcaggagcaactattacgaccccgcgataaaccgggcctatgaggatatggcggtctattacancgtggcggtcatcccggcgcgggtgaggcggccacaagattatcctcaaaaccgtattatcctcaaaatcgactttaattccttgccccacaacaaattagataaatga

SEQ ID NO: 32784 - protein, 276 aa, Unknown
  Obtained from environmental sample
  misc_feature (1)..(276): Xaa is any amino acid
MRCEEPMKIIEILRLGEQGYSQRDIAASVKCAKSTVGAIQKKCRECGLQYEQAVGMSHEALLSTLYPEGSGGRQFKDEPDFEKIQKLLDGRKRVNLQYAWEEYRRTTEEGLSYSQFCNRYRRWRNACGKDVVMVQEREPGKELFVDWMGDTLACVKDSETGKLVKAHFFVATLGDSGYPYAEAFANEKMASWITAHVHTFSHIGGVPHVIIPDNCRTAVSRSNYYDPAINRAYEDMAVYYXVAVIPARVRRPQDYPQNRIILKIDFNSLPHNKLDK

SEQ ID NO: 32785 - DNA, 1179 bp, Unknown
  Obtained from environmental sample
  misc_feature (1)..(1179): n is a, c, g, or t
atgaaagacaccctacccgctgttgccctttgcgctaccggagcggaaaaagcagtatcaaatgaactgcgaaaaatgaatcttaaagtcgaagaatccctttacggcagagtacgattccacgccgataccgcagggctttatcaggctctcataggccttcgcgccgcagaccgtgtactgctggaagccgcccgttttaacgccgccgattttgacgcgctgttcgagggaactctcggcgcacagtgggaaaaaattgtaccgaaaggacttggattgaaagtcgccaaagtgcgatccaaccgctctcaattaaaagcggagaccagcatacagtcggtggttcacaaagcggcggctcagcgcctttgcggcaaatacaaagttaaccgcctgcccgaagacggcaagatcgccgaagtcagggtttatgtcgagaaagacacggtttcgctccttgtggatttaagcggggagccgcttttcaaacggggttacaggagcgagggcggcgtagcgccgctaagggagacaaccgccgccgccattttgttgttatcaggctggaaacgcaaatttccgctttatgatcctttttgcggttccggcacaatccttatcgaagcgcttatgtacgcctgggatatggcccccggtctcggcaggcgttttgcaatcgaagacctgctcatcgcagacggtaaaatcgaaaaggctgtccgcgatgagttccgaagtaaaattgactttagccgccttgtaagaatttcaggcagcgatgaggatagccgttccgtgtccattgcctcgtccaatgccgcccgcctgcgcgacatagccgaaggcaggcaaccgcaaaagggcactcgcgcggcaaacgacaaggcggcaattgacctaaaaaccatgccgatgaaggaagcccgttctgtcttcccggatcagggttttttgcttactaatccgccatacgggaaaaggcttggggatcagtcccaatccgagcaaatttaccgggaaatgggcggtcttgcggaacgctttgcgggctggaaacttgcggtaataaccgaccacagcggttttgaaagctttttcggcaaaaaagcggactcctgccgagagatcagcaacggcgcaattccttcttttttttatcaatatgatgtaatataa

SEQ ID NO: 32786 - protein, 392 aa, Unknown
  Obtained from environmental sample
  SIGNAL (1)...(20)
  DOMAIN (165)...(388): Putative RNA methylase family UPF0020
  misc_feature (1)..(392): Xaa is any amino acid
MKDTLPAVALCATGAEKAVSNELRKMNLKVEESLYGRVRFHADTAGLYQALIGLRAADRVLLEAARFNAADFDALFEGTLGAQWEKIVPKGLGLKVAKVRSNRSQLKAETSIQSVVHKAAAQRLCGKYKVNRLPEDGKIAEVRVYVEKDTVSLLVDLSGEPLFKRGYRSEGGVAPLRETTAAAILLLSGWKRKFPLYDPFCGSGTILIEALMYAWDMAPGLGRRFAIEDLLIADGKIEKAVRDEFRSKIDFSRLVRISGSDEDSRSVSIASSNAARLRDIAEGRQPQKGTRAANDKAAIDLKTMPMKEARSVFPDQGFLLTNPPYGKRLGDQSQSEQIYREMGGLAERFAGWKLAVITDHSGFESFFGKKADSCREISNGAIPSFFYQYDVI

SEQ ID NO: 32787 - DNA, 876 bp, Unknown
  Obtained from environmental sample
  misc_feature (1)..(876): n is a, c, g, or t
gtggggattaaagcgcctgatcaaagaacgcttatcgtaaagctttcgtcccctgcggctttttttctcgcaatgctctgtcatcattcattcagtccgatacatccttcaatgttaaataaaagcgactggtctccttataaagccggaaaaaattggacgccccccgtttccaacggaccgtatcgaattgtttctatggatagagaaaaaattgttatgcaaaaatccgatccgtattgggattcgaatagagttgcgttaaaaaaaataaatattaaatttacggaaacagcggagcaagccacgaacctttggaattcaggcgaggcgcgctggatttccggcgatgtagatttgaaaactctgacagatcgctcaggtattcagtttaatgttatgttcgctacgcattattattatattcgcagttctgaaaaaccttggaacgatcatagaatccgcagagcgatggttttggttcttccttgggaagaaatacgcaaaaattatttaagtcccgccaaaacattgatatatccgatttccgggtatcctaaacttgaaggaatatcggaaaacaattatgaagaagcgcaaaagttaatgaacgaggcaggatataaaaacggcgttggaactccgcctattgttattcgcataacgccgtctcaagatgccgaacgtgtcgcttttttaatggcaaatgcatggaaagagaaattgggcttgaatgtgcgcatagaagttattcccgttcggcaatattttgaagcaatgaagacgggcggttacactgtccgctcaacacatggattggcgattttgccgatccttatacattcctgcaaatatggaggcgcgattcaaatttaa

SEQ ID NO: 32788 - protein, 291 aa, Unknown
  Obtained from environmental sample
  DOMAIN (1)...(287): Bacterial extracellular solute-binding proteins, family 5 Middle
  misc_feature (1)..(291): Xaa is any amino acid
MGIKAPDQRTLIVKLSSPAAFFLAMLCHHSFSPIHPSMLNKSDWSPYKAGKNWTPPVSNGPYRIVSMDREKIVMQKSDPYWDSNRVALKKINIKFTETAEQATNLWNSGEARWISGDVDLKTLTDRSGIQFNVMFATHYYYIRSSEKPWNDHRIRRAMVLVLPWEEIRKNYLSPAKTLIYPISGYPKLEGISENNYEEAQKLMNEAGYKNGVGTPPIVIRITPSQDAERVAFLMANAWKEKLGLNVRIEVIPVRQYFEAMKTGGYTVRSTHGLAILPILIHSCKYGGAIQI

SEQ ID NO: 32789 - DNA, 501 bp, Unknown
  Obtained from environmental sample
  misc_feature (1)..(501): n is a, c, g, or t
ttggaacgaattgctgcggcaaaagctgagaaaattgataaaattgacgggcaaataacggatgcggcgaaacagatgctggaaatcctcaagcaggaaaaaggggtgggaattgccggccctcagattggtcttatgaaacgaatctttgttacacataccgaaggtgatgaagagcggatatttataaatccttcaattttggaaacgtcgcagaaaacgataaaatttgaagaaggctgtctttctgttcccggcttttatgccgatgtggtacgttccgaatccgtaaagattcaggcgtggaatgagaaaggcaaaccttttacattagaaacaagcgggcttctcgcaagggttatccaacatgagtacgatcatcttgaggggattctttttctggatcggatatcagagttaaaaagaaaaagacttattgaaaaatatgaaaaggcttcgcttaagggagtaaaaaagaaaggagaaaaaatttcaacgtga

SEQ ID NO: 32790 - protein, 166 aa, Unknown
  Obtained from environmental sample
  DOMAIN (1)...(143): Polypeptide deformylase
  misc_feature (1)..(166): Xaa is any amino acid
MERIAAAKAEKIDKIDGQITDAAKQMLEILKQEKGVGIAGPQIGLMKRIFVTHTEGDEERIFINPSILETSQKTIKFEEGCLSVPGFYADVVRSESVKIQAWNEKGKPFTLETSGLLARVIQHEYDHLEGILFLDRISELKRKRLIEKYEKASLKGVKKKGEKIST

SEQ ID NO: 32791 - DNA, 615 bp, Unknown
  Obtained from environmental sample
  misc_feature (1)..(615): n is a, c, g, or t
gtgagggttctgtttgccgcaagccccgccatagccatacccgctttacagtcgctgtgccggacagaaggaattgaattggcaggcattcttacaaaccccgacagtcccaaaggcaggcacggtacgcctgtacccactgaaataggagaggcggcggcaaaaatttgcttaagcgttcctgtgttaaaaccaaataaacttgacgcttcggcgcgggagcaggtaagttccctaaaatcggatatgcttgtttcttttgcctatgggcgtatttttggcccgaaattcttggcattgtttccgtttgggggaataaatattcatccgagcctgctgccaaaatacaggggaccgtctccggtacaggccgcaattttaaaccgcgacagcgaaacgggaattaccgtgcagactcttgctaaggaaatggacagcggggatattctggcgcgggaaaatttgcggctaaccggcagtgaaacggctggctcgctgagcgaaataatggcgcagaaagcggctgttattctgccgcangttctgcgcgatattgccgcggggactaccagcgcacaaccgcaggatcacagcaaggcagttattgttctttga

SEQ ID NO: 32792 - protein, 204 aa, Unknown
  Obtained from environmental sample
  DOMAIN (1)...(182): Formyl transferase
  misc_feature (1)..(204): Xaa is any amino acid
MRVLFAASPAIAIPALQSLCRTEGIELAGILTNPDSPKGRHGTPVPTEIGEAAAKICLSVPVLKPNKLDASAREQVSSLKSDMLVSFAYGRIFGPKFLALFPFGGINIHPSLLPKYRGPSPVQAAILNRDSETGITVQTLAKEMDSGDILARENLRLTGSETAGSLSEIMAQKAAVILPXVLRDIAAGTTSAQPQDHSKAVIVL

SEQ ID NO: 32793 - DNA, 693 bp, Unknown
  Obtained from environmental sample
  misc_feature (1)..(693): n is a, c, g, or t
atgccaaaacttaaactggtcatttttattgtagactggaaccgcgcccattctattaccaatgtttgtgtaaatgaaaaggtgcgttttcattttaccagcgtaggaagggggacagccaattccgaaatactcaaccttcttggcataggttcaggtgaaaaggccgtaatcttatgccttgaacaggatataggcgttcaggttctgatgaaggaagtaagaaaggagctcaaggtttacggtcccggggcggggattgcgtttactgttccgctttcagccgtaaacgatccgattttaatggtttttaaacaaagtattttaaagaatgaaaatctttcagggaagaattccgacaaaggagcaaatatggcaagtaagcattcacacgatttaatcgtatctattgtaaatcacggttacaccgacgagttaatgaatacggcaagggaagcaggcgcaagaggcggcacagtattgcacgcccgcggcacggcgcacgaggggcctgtaaaattttttggtatttccgtacaggatgaaaaggagcttatcctgattctttccgagtatgacaagaaagttaccataatgcaggcaatcagcgaaaattacggccttaataccaaagctcaaggtttgattttttctctgcctgttgacaatgtaatcggattaagcgccgagtga

SEQ ID NO: 32794 - protein, 230 aa, Unknown
  Obtained from environmental sample
  misc_feature (1)..(230): Xaa is any amino acid
MPKLKLVIFIVDWNRAHSITNVCVNEKVRFHFTSVGRGTANSEILNLLGIGSGEKAVILCLEQDIGVQVLMKEVRKELKVYGPGAGIAFTVPLSAVNDPILMVFKQSILKNENLSGKNSDKGANMASKHSHDLIVSIVNHGYTDELMNTAREAGARGGTVLHARGTAHEGPVKFFGISVQDEKELILILSEYDKKVTIMQAISENYGLNTKAQGLIFSLPVDNVIGLSAE

SEQ ID NO: 32795 - DNA, 417 bp, Unknown
  Obtained from environmental sample
  misc_feature (1)..(417): n is a, c, g, or t
ttgacaggcattaagctttcggaagcgcttggaattatcagtaatacaggtattaattttaagtttaacataagaaacagaagcggaaatgaaaaaggggagactgttgtttatcaaacgccgccaggaaacgctaccgcgccattgagcgctatagttgacataaccgtaacatcgcctgaaaaaatagcagataacgaaattttcagcctttttcgttatacgataccggtaaatccatatccgttgtcggtgcgtctggaagctgtgcttcctaccggggaaaggatgcggctttttacaacggattatcttggcggcgaatttacgcttccctacaagttgcctgtgggaacgacgcttattttgtctatgttaaaccgcgaactttacagggaaatagtaggcgcacagtaa

SEQ ID NO: 32796 - protein, 138 aa, Unknown
  Obtained from environmental sample
  misc_feature (1)..(138): Xaa is any amino acid
MTGIKLSEALGIISNTGINFKFNIRNRSGNEKGETVVYQTPPGNATAPLSAIVDITVTSPEKIADNEIFSLFRYTIPVNPYPLSVRLEAVLPTGERMRLFTTDYLGGEFTLPYKLPVGTTLILSMLNRELYREIVGAQ

SEQ ID NO: 32797 - DNA, 573 bp, Unknown
  Obtained from environmental sample
  misc_feature (1)..(573): n is a, c, g, or t
ttggtcagaattcggccgagacggaacaaacaggaaaaacaacctctttttgagcatcttctgtttggcggcggggtaattccaaaggcggagacggtggaatccggcaagacaaccagcgattccagccccgaggaaattgaacggaaaatttccatctacgccgccatgggccatgtggatcggaatgggacgaaaatcaacttttttgacacgcccgggtcgtcggattttaccgggaacgtgattctgagcttccgggcctcggaatttgccttgttgatggtggacggccgctcgggggtgcagattgaaaccatcaagctgtggcggagcctggaggcgcaaaaaaaaccgaggggcgtcttcatatccaagctggacaatgaccagaccgattttaacaaggcgcttgcagacgtaaaagaaaaattcaagatggaaccggtgcctgtcaccattcccatgggatcagggggcgcgttcaagggcgttatcgacgtgctgcacgataaagcgtatatggcaggcggcgacggcgtggaaaaagagggacccatccccgatgaataa

SEQ ID NO: 32798 - protein, 190 aa, Unknown
  Obtained from environmental sample
  DOMAIN (13)...(189): Elongation factor Tu GTP binding domain
  misc_feature (1)..(190): Xaa is any amino acid
MVRIRPRRNKQEKQPLFEHLLFGGGVIPKAETVESGKTTSDSSPEEIERKISIYAAMGHVDRNGTKINFFDTPGSSDFTGNVILSFRASEFALLMVDGRSGVQIETIKLWRSLEAQKKPRGVFISKLDNDQTDFNKALADVKEKFKMEPVPVTIPMGSGGAFKGVIDVLHDKAYMAGGDGVEKEGPIPDE

SEQ ID NO: 32799 - DNA, 366 bp, Unknown
  Obtained from environmental sample
  misc_feature (1)..(366): n is a, c, g, or t
ttggtacaggaagcttttgatgacgtaaataaggccatacaggacagaaacaggctgattaatgagggccagcaggcatataacgagttgataccccgcacaaagggagaagcggacaaacttgtccaggtagcagaaggttatgccgctgaacgaacaaaccgcgccgaaggtgatgttgcccgttttaactcggtttacgaggaatacagaagatcgcctgatgttacccgccaacgcctctattatgaaatgatggaagacgtttttaagaacggcgaaaaaacagttgtgatagatcgcagatttaacaactttcttccaatgagggatttaggaagttctttacaggaagcaggcaggtaa

SEQ ID NO: 32800 - protein, 121 aa, Unknown
  Obtained from environmental sample
  misc_feature (1)..(121): Xaa is any amino acid
MVQEAFDDVNKAIQDRNRLINEGQQAYNELIPRTKGEADKLVQVAEGYAAERTNRAEGDVARFNSVYEEYRRSPDVTRQRLYYEMMEDVFKNGEKTVVIDRRFNNFLPMRDLGSSLQEAGR

SEQ ID NO: 32801 - DNA, 891 bp, Unknown
  Obtained from environmental sample
  misc_feature (1)..(891): n is a, c, g, or t
atgaagataaaattaaagtccattgtaattattgcggtaataattttttttcttgttctgattgggccgttttatgttatagacgaaggagaacaggctgtaattgtaaggatgggcaaagtcatcaactccgtaaaccaggccgggctttacatgaagattccgttaattgatgatgtggtaaagtatccaaaaaaaattatggcctggaacggagaacaaaaaagcataccaaccagggaaaaacagtatatttgggtagacgtaaccgcccgttggaagatatcggatccgctaaagttttacgaatccattaaaacggtaaacatggcttatgaaaagctaggcgaggtaattgattccgaagtaaaaaccgtagtagtggaaaattattttaacgaatctgtccgtaattccaatataattatggagcgtaaaataagcattgatgatcttggcgtttcaggcgatgtggatcctgggtttattacttcctcaatacaaaccgatgtccattacgagccgatttcaaggggcagaaggcagctttccgccgaaatgcttgcacgttcaaggcgcatggttcccgaatatggtattgaacttatcgatgtggtgatccggcaaatacggtataacgaagaattaacccaaagtgtttattcaaggatgattaaggaaagaaaccagattgcccaggctataagatcagaaggcgagggcagaaaagccgacattcttgggcaaatggaacgtgaacgcatgactatcatctcctcagcttaccgcgaagcggagtccattaagggaaccgcggatgcggaggcgaccagatttacgcggatgctttataccgtgacagggattttctttgattctggagggcaataa

SEQ ID NO: 32802 - protein, 296 aa, Unknown
  Obtained from environmental sample
  SIGNAL (1)...(26)
  DOMAIN (23)...(241): SPFH domain / Band 7 family
  misc_feature (1)..(296): Xaa is any amino acid
MKIKLKSIVIIAVIIFFLVLIGPFYVIDEGEQAVIVRMGKVINSVNQAGLYMKIPLIDDVVKYPKKIMAWNGEQKSIPTREKQYIWVDVTARWKISDPLKFYESIKTVNMAYEKLGEVIDSEVKTVVVENYFNESVRNSNIIMERKISIDDLGVSGDVDPGFITSSIQTDVHYEPISRGRRQLSAEMLARSRRMVPEYGIELIDVVIRQIRYNEELTQSVYSRMIKERNQIAQAIRSEGEGRKADILGQMERERMTIISSAYREAESIKGTADAEATRFTRMLYTVTGIFFDSGGQ

SEQ ID NO: 32803 - DNA, 549 bp, Unknown
  Obtained from environmental sample
  misc_feature (1)..(549): n is a, c, g, or t
ttgggcctttgctataccaagctggaacaatacgacgacgcccttctttatcttgagcaggtggtaacatcggggaaggatctcttaagatcctatcagtgcaggatgacgcttgcctatatttacgtgattacaaagcgcacaaaaatggccgagtttgaactcaggcggctggcgcataacggttttgaatcggcacagctctacactactcttgcttacgcttcatgggcgcagaaacattacaagcaggcagttgattattacgaaagggcgcttgatctggacgggagcaacgcgactgcccttaacggccttggttttatccttgttgacaaagatatggatctgctcaggggattaaggtgctgtaaaaaagcggttgatcttaagccgcagaaccccgcgtaccttgactcattgggttgggcgtattataaaaacggcgaactccttgaggccagaacctggctgcgcagggctatggaggccgcccccgaaaggatagaaatcaaagtgcatttccaaaccgcgacggggggaaaatga

SEQ ID NO: 32804 - protein, 182 aa, Unknown
  Obtained from environmental sample
  DOMAIN (66)...(99): Tetratricopeptide repeat
  misc_feature (1)..(182): Xaa is any amino acid
MGLCYTKLEQYDDALLYLEQVVTSGKDLLRSYQCRMTLAYIYVITKRTKMAEFELRRLAHNGFESAQLYTTLAYASWAQKHYKQAVDYYERALDLDGSNATALNGLGFILVDKDMDLLRGLRCCKKAVDLKPQNPAYLDSLGWAYYKNGELLEARTWLRRAMEAAPERIEIKVHFQTATGGK

SEQ ID NO: 32805 - DNA, 819 bp, Unknown
  Obtained from environmental sample
  misc_feature (1)..(819): n is a, c, g, or t
gtgttcttagttttaatttcaatagtatcaatatcatgtcaaaaaaaaaccgtgacttccggatctgctaatgatatgggcgttactgtccgccttcttacggattcttccggtgttgatgataaatcttttaacgccgccgcatggagaggtattcttgaatttttcggcgatacagcggcgaatcccagacagaagggaaaggcttatgattgggttgtaactcaagatcaaagtatgtttgtccccaacctcagaatggttacagaccaggggtacgatcttattatcgtaaacggattttcatgggatgaatcgttaactattgtttccaaagataatccctctcaaaaatatcttattgtcgatgtcgattgggtcgaggccggcgatgtaatgcaagcggcttatgcggagcatgaaggctcttatcttgtcggcgtcgccgccgctttaaaagcgcttgaagacggagtagcttcaccgcgttttggttttatcggcggaatgccttccccggttattaccaagtttgaagtgggttatgtgcaaggtattctttctattatccccaatgcggatatagtagattattatgtaaatagttgggatgaacctgccctcgcaaaaacacagtcgatgatttggtatgactcaggcgtttacgcgattttttccgcggcgggaaacagcgggaacggaactatcgcgcaggcgaaagaataccgcgctatgggcaagaatgtctgggcgataggcgtggattccgatcaatatgaagacggactttataacgaaaaagatttccgccgttcttaa

SEQ ID NO: 32806 - protein, 272 aa, Unknown
  Obtained from environmental sample
  DOMAIN (1)...(272): Basic membrane protein
  misc_feature (1)..(272): Xaa is any amino acid
MFLVLISIVSISCQKKTVTSGSANDMGVTVRLLTDSSGVDDKSFNAAAWRGILEFFGDTAANPRQKGKAYDWVVTQDQSMFVPNLRMVTDQGYDLIIVNGFSWDESLTIVSKDNPSQKYLIVDVDWVEAGDVMQAAYAEHEGSYLVGVAAALKALEDGVASPRFGFIGGMPSPVITKFEVGYVQGILSIIPNADIVDYYVNSWDEPALAKTQSMIWYDSGVYAIFSAAGNSGNGTIAQAKEYRAMGKNVWAIGVDSDQYEDGLYNEKDFRRS

SEQ ID NO: 32807 - DNA, 939 bp, Unknown
  Obtained from environmental sample
  misc_feature (1)..(939): n is a, c, g, or t
atgatggccgaggccttcgacgatgagaatgaagagggctgggactgggaatgggacgatgaagacgaaacagacgaagcaaatgctttggaagacagtattgataccgaatactcagaagaaattacaaatgttattgaagaaacaacaggtgaattggcttttgtcggcaaagaaccaaccggcggtgagccggggcaggaagttctggaaattaccattaattcaaaagaaaaagatcctgagaaacaaataacctttaccgccaataccggcgaagttagttttcctgaggcctatgtttgtaccgtgacctggccgggaatgatcgccgccatggacaagaaaattcacatcatccttcccgaaccgccctacaatccggtaaagtttcttaccggccttgactggcggcctgtcaaggacaaactctttggaatcttccccatgattgccgggactattctggcaagcctgggggctatattgctgggagtgcccgtagccctgctttgcgcggtttttatggcggaattccttcccaataaaccggcagccctgtttcggggcggcatagaactgctggcggggattccgtcggtggtgtacggattcttcggccttatggtgattgttccggcggttaaaaacatattccggattcccgcgggaaataccctgctgtcggcaatcatcgtcctggctttgatgatccttcccacggtaatcaccattgcggaaacctctttgagggcggtgcctttgtcgctgcgggaggcaagcctttccctgggggccagcaggatgcagaccgcctggcgggtagccctgccgcacgcccagtcgggagtgattgcgggaatcatcctgggtatttcccgcgcggtgggagaaacccatggcggtgatcctggtgggcgggcaactccccccagttaa

SEQ ID NO: 32808 - protein, 312 aa, Unknown
  Obtained from environmental sample
  DOMAIN (151)...(310): Binding-protein-dependent transport system inner membrane component
  misc_feature (1)..(312): Xaa is any amino acid
MMAEAFDDENEEGWDWEWDDEDETDEANALEDSIDTEYSEEITNVIEETTGELAFVGKEPTGGEPGQEVLEITINSKEKDPEKQITFTANTGEVSFPEAYVCTVTWPGMIAAMDKKIHIILPEPPYNPVKFLTGLDWRPVKDKLFGIFPMIAGTILASLGAILLGVPVALLCAVFMAEFLPNKPAALFRGGIELLAGIPSVVYGFFGLMVIVPAVKNIFRIPAGNTLLSAIIVLALMILPTVITIAETSLRAVPLSLREASLSLGASRMQTAWRVALPHAQSGVIAGIILGISRAVGETHGGDPGGRATPPS

SEQ ID NO: 32809 - DNA, 567 bp, Unknown
  Obtained from environmental sample
  misc_feature (1)..(567): n is a, c, g, or t
ttgccgccctcagcgccattgtccatgaaatgcaagtccttgttcaatcggacgttaggggaaaacatggcaagaatgaccgaagaagaagctgattattgggatgaatactacacaaaaaaccctccaacaaaatgcccgcgccgaggctcatccaaaacgcccggagatataatcttctgtccgtttgtcccgggggttggtaaatatatccctggtatcgccgaattccacaagttcccccagcagaaagaacgccgtcttgttgcttacccgcgacgcctggtgcatggcgtgggttacgataactatggtgtagtcttttttcaggtctccgatgagcccttcgattctgccggtggcgatggggtccagggcgctggttggctcgtccatcaggatgatttccggttccatggcgatgctgcgggctatgcagagccgctgctgctggccgccggaaaggctcaaggcggattttctcagccggtccttcacttcgtcccagagggccgccttgtagagggacagttccacgagttccgccagtttccgcttgtcctttaa

SEQ ID NO: 32810 - protein, 188 aa, Unknown
  Obtained from environmental sample
  misc_feature (1)..(188): Xaa is any amino acid
MPPSAPLSMKCKSLFNRTLGENMARMTEEEADYWDEYYTKNPPTKCPRRGSSKTPGDIIFCPFVPGVGKYIPGIAEFHKFPQQKERRLVAYPRRLVHGVGYDNYGVVFFQVSDEPFDSAGGDGVQGAGWLVHQDDFRFHGDAAGYAEPLLLAAGKAQGGFSQPVLHFVPEGRLVEGQFHEFRQFPLVL

SEQ ID NO: 32811 - DNA, 519 bp, Unknown
  Obtained from environmental sample
  misc_feature (1)..(519): n is a, c, g, or t
gtgacggaactgcggagccgggtggggatggtattccagaagccgaatccttttaatatgacggtctttgacaacgtggcctacggcaggcgcatgcaggggttaaaggacaagcggaaactggcggaactcgtggaactgtccctctacaaggcggccctctgggacgaagtgaaggaccggctgagaaaatccgccttgagcctttccggcggccagcagcagcggctctgcatagcccgcagcatcgccatggaaccggaaatcatcctgatggacgagccaaccagcgccctggaccccatcgccaccggcagaatcgaagggctcatcggagacctgaaaaaagactacaccatagttatcgtaacccacgccatgcaccaggcgtcgcgggtaagcaacaagacggcgttctttctgctgggggaacttgtggaattcggcgataccagggatatatttaccaacccccgggacaaacggacagaagattatatctccgggcgttttggatga

SEQ ID NO: 32812 - protein, 172 aa, Unknown
  Obtained from environmental sample
  DOMAIN (1)...(143): ABC transporter
  misc_feature (1)..(172): Xaa is any amino acid
MTELRSRVGMVFQKPNPFNMTVFDNVAYGRRMQGLKDKRKLAELVELSLYKAALWDEVKDRLRKSALSLSGGQQQRLCIARSIAMEPEIILMDEPTSALDPIATGRIEGLIGDLKKDYTIVIVTHAMHQASRVSNKTAFFLLGELVEFGDTRDIFTNPRDKRTEDYISGRFG

SEQ ID NO: 32813 - DNA, 357 bp, Unknown
  Obtained from environmental sample
  misc_feature (1)..(357): n is a, c, g, or t
ttgggggacatatttgttatccgcaacgccggcaatgttgccgacacggaagctcttggcagtattgagtacgccattgaacatcttaaaaccaaattggttgttgtatgcgggcacaggcattgtggtgcggtaacagccgcctgctcaggtggtaatttttcgcctaacatcaagcgtattgtagaccttatcaagcccgctgtggacaagggcggcgatgtggataaggtcatccatagccatgtagaaataatggttgaaaaagttaaggcggacgtgatagtcagacatctgggagttaaagttgtcggcgcttattatgacatccatagcggtgaagttaaatggctttaa

SEQ ID NO: 32814 - protein, 118 aa, Unknown
  Obtained from environmental sample
  DOMAIN (1)...(118): Carbonic anhydrase
  misc_feature (1)..(118): Xaa is any amino acid
MGDIFVIRNAGNVADTEALGSIEYAIEHLKTKLVVVCGHRHCGAVTAACSGGNFSPNIKRIVDLIKPAVDKGGDVDKVIHSHVEIMVEKVKADVIVRHLGVKVVGAYYDIHSGEVKWL

SEQ ID NO: 32815 - DNA, 342 bp, Unknown
  Obtained from environmental sample
  misc_feature (1)..(342): n is a, c, g, or t
gtgaaggggaggcgctgggacgcgctgttcttggcgcctgtggccggacgcgccgccgcgcctgttctggccgccgcctgccccatccatcctgactccgctctcggacatctggccgcgaatggggcttcgccccttctggcgctgatctttgcctgcgcgtttgttgcgatctgttcttttgtgttctcattggctcgcatggcgatcgcgacagcctgcctggggggcgcgctgtacgggctgtgccggctcgcccggcgcgaaggcggcatgagcggcgattttttcggcgccgccatcgtgctgaccgaaaccgccgtgctcgccgcctgcctgtaa

SEQ ID NO: 32816 - protein, 113 aa, Unknown
  Obtained from environmental sample
  SIGNAL (1)...(24)
  misc_feature (1)..(113): Xaa is any amino acid
MKGRRWDALFLAPVAGRAAAPVLAAACPIHPDSALGHLAANGASPLLALIFACAFVAICSFVFSLARMAIATACLGGALYGLCRLARREGGMSGDFFGAAIVLTETAVLAACL

SEQ ID NO: 32817 - DNA, 570 bp, Unknown
  Obtained from environmental sample
  misc_feature (1)..(570): n is a, c, g, or t
ttggaggacgatctgcctttcgatgcgcccgcgcctgccgtcaagccggcgcctgcccctgtcgcgcccggcgccgggccgactccgcccgcgccccggatcaatcctgctcaggcttcgcctttcgcccaaccgttgcccgagtatgcccgcccggatgcggccaagcccggcgcgccgcccgcgccttcgatcacgcccgttgtgccccgcgactcggccgcgcgcgcgcaggaagagatgaatcgccgcgagcgcgaactgttggcgctgaagcaacagatggactcccgcctggacgagttgaaaaaaattgaaggcaatgtgcagaccatgctgcagcaggcggatacgaaccaggacgaaaaaatgcgccacctcgtggacatgtattcgaacatgaaagccaggcaggccgctgaagtgctgaccactcttgaagagcgcatcgctgtcagaattctggcgggcatgcgcggccgccaggccggtgaaattctcacatacatgcaggccgaaaaagccgccaagctgtccgaagccctgacccgcacgcagttgcccaagtaa

SEQ ID NO: 32818 - protein, 189 aa, Unknown
  Obtained from environmental sample
  misc_feature (1)..(189): Xaa is any amino acid
MEDDLPFDAPAPAVKPAPAPVAPGAGPTPPAPRINPAQASPFAQPLPEYARPDAAKPGAPPAPSITPVVPRDSAARAQEEMNRRERELLALKQQMDSRLDELKKIEGNVQTMLQQADTNQDEKMRHLVDMYSNMKARQAAEVLTTLEERIAVRILAGMRGRQAGEILTYMQAEKAAKLSEALTRTQLPK

SEQ ID NO: 32819 - DNA, 804 bp, Unknown
  Obtained from environmental sample
  misc_feature (1)..(804): n is a, c, g, or t
gtgattcggcatcggcggcattccctattgcagccattttcacagcgaaatccgggcgccggcattgtataccttgctgaccgcctgcattttccctacggcaagtttgataaacctgagcttgccgaaatccttacccggcttgtagaacaacttgttaatgttattaacccaaaaatcattgtgctggcctgcaatacagccacaatcgcggcgcttaccgaactgcgggaacgttttccggaacttccctttgtgggaacggttcccgcggtaaaacccgcggccctcgcgtcaaaaaccgggaaaatcggcgtacttggcactgagctgaccatcaagcagccgtatatcagggagcttgcctccaggttcggcagcggtgagctccacggcattgccgcccctgagcttgtggaatttgtcgaaggcagattcaattccgcttcgcccgatgaaaaaagaaatatcgttatgagctatctgaaccacttccgcgccgcaggcgttgacaccctggtacttggctgtacgcactttctctttctgttagacgaattccagcgggaagccgcccctgacattaccgtgtttgattcagtcaccggaatttcacaccgcattgaatcattaatgtgtgaacaaaaagaaaaaaacggcggggaaacactccgtcatcaaaaccggattctgctgacaggccctgcggcccctgagccttcatgggtctctctggctgaacgcctcggtttcagcctgtcgctgctggatgcgataagcggtattgatacgcaaagcgcataa

SEQ ID NO: 32820 - protein, 267 aa, Unknown
  Obtained from environmental sample
  DOMAIN (1)...(213): Asp/Glu/Hydantoin racemase
  misc_feature (1)..(267): Xaa is any amino acid
MIRHRRHSLLQPFSQRNPGAGIVYLADRLHFPYGKFDKPELAEILTRLVEQLVNVINPKIIVLACNTATIAALTELRERFPELPFVGTVPAVKPAALASKTGKIGVLGTELTIKQPYIRELASRFGSGELHGIAAPELVEFVEGRFNSASPDEKRNIVMSYLNHFRAAGVDTLVLGCTHFLFLLDEFQREAAPDITVFDSVTGISHRIESLMCEQKEKNGGETLRHQNRILLTGPAAPEPSWVSLAERLGFSLSLLDAISGIDTQSA

SEQ ID NO: 32821 - DNA, 615 bp, Unknown
  Obtained from environmental sample
  misc_feature (1)..(615): n is a, c, g, or t
atggccgagatatgcttttacggttgcgggcttaccggcatcaccataccggacagcattaccagcattggttctctggctttttccgattgcagcagccttaccagcatcaccatacctgccagcgttaccagtatttcgagtcaggctttttactactgcagtgggcttaccagcgtcaacatactagctagggttaccagtattgaggggagtacttttgccggttgcagcagccttacgaacgtaactataccggacagcgttaccagtattgagggttttgcttttattaattgtaccagccttgttagcgtaacaataccggacagtgttaccagcatcggggttgaagcttttatgggttgtaccagcctggccaatgtaacaataccgaaaaacgttaccagaatcgccgcttgggcttttctcggttgcagtagccttatcagggtaaagtttgaaggcacgatccatgcggataattttggttcttctatgaatgtggggtgggttaacccgttcagtggcgatttgcgggacaaatatctcgcggggggcaaagggacttacacgaggccgaacggcagtgatacgtggacgaaacaaaactaa

SEQ ID NO: 32822 - protein, 204 aa, Unknown
  Obtained from environmental sample
  misc_feature (1)..(204): Xaa is any amino acid
MAEICFYGCGLTGITIPDSITSIGSLAFSDCSSLTSITIPASVTSISSQAFYYCSGLTSVNILARVTSIEGSTFAGCSSLTNVTIPDSVTSIEGFAFINCTSLVSVTIPDSVTSIGVEAFMGCTSLANVTIPKNVTRIAAWAFLGCSSLIRVKFEGTIHADNFGSSMNVGWVNPFSGDLRDKYLAGGKGTYTRPNGSDTWTKQN

SEQ ID NO: 32823 - DNA, 408 bp, Unknown
  Obtained from environmental sample
  misc_feature (1)..(408): n is a, c, g, or t
atggcgggttttgaggggtctcaccgggactggagcggttttgaggccaatttcagcagattgagcgagattggcgaggaatttaccgagctggaacataaaagggagcgggtttttgcgggaatcttgcctgaatcaaacgcttccgtgagattttacagccttaccgcggggcttccccccgaacaacgcggagaactaacggaaatttaccgcaatttgaagatggaaaccttgaaagtaaagatcatgggcgaaaccatcatgaattttgttatcggagcaaaggccacagtggcaggttttttagaggttgcctttcccgataggaaaggaaaaatatacacgccttttgggatgccggtttcccatgatatgcgcagcatggtgcttaaccggagcttttaa

SEQ ID NO: 32824 - protein, 135 aa, Unknown
  Obtained from environmental sample
  misc_feature (1)..(135): Xaa is any amino acid
MAGFEGSHRDWSGFEANFSRLSEIGEEFTELEHKRERVFAGILPESNASVRFYSLTAGLPPEQRGELTEIYRNLKMETLKVKIMGETIMNFVIGAKATVAGFLEVAFPDRKGKIYTPFGMPVSHDMRSMVLNRSF

SEQ ID NO: 32825 - DNA, 879 bp, Unknown
  Obtained from environmental sample
  misc_feature (1)..(879): n is a, c, g, or t
atgacgtcaacttttatgggacttgaaatcggcaagaggggagtgcaggcccaccaacaggctttacatgttaccgggcataacattgataatgcgagaacggaaggctattcgcggcaacgccttgaaatgaaagcctttgatcctatttacctgcccggcctgaaccgtgaggaaactccggggcagatagggcagggcgtggcggttgagcgcattgagcgcatacgcgaccagcttctggacaagcgcattgtcgctcaggcctcaagcgagggatactggggcgcccgcgatccttacgtcaggatgatggaacaaatgtaccttgagccgggcgagagttcggtgcgctcgaagatggacacgttctgggacgcgtggcaggagttgtccatgtacccggcggacaccgccccccgcgccgcggtaattgaacggggcaagaccctcattgacggcatacacaaccgctaccaggggctgaaaggtttgcaggaacaggtggacagcgacattcagcttacggtaggcagggtgaacgagattacccgccagatagccgcccttaacggcgacatagtgcggattaaggcgatgggcgataaccccaacgaccttatggaccgccgcgacctgttagtcgacaagctctcctcaataattgacataaccattgacagcagcgacccggatgaattcatggtgcacactgccggccttgtcattgtccagggaaagatcggccgccagctcgatctccgcanagggatagacgacgaangttacgcccacattttctggcaggacacggggcaggagattcgctttaacagggcagccttggggcgttgctggaaatgcgcgacgaaaccataa

SEQ ID NO: 32826 - protein, 292 aa, Unknown
  Obtained from environmental sample
  DOMAIN (8)...(38): Flagella basal body rod protein
  misc_feature (1)..(292): Xaa is any amino acid
MTSTFMGLEIGKRGVQAHQQALHVTGHNIDNARTEGYSRQRLEMKAFDPIYLPGLNREETPGQIGQGVAVERIERIRDQLLDKRIVAQASSEGYWGARDPYVRMMEQMYLEPGESSVRSKMDTFWDAWQELSMYPADTAPRAAVIERGKTLIDGIHNRYQGLKGLQEQVDSDIQLTVGRVNEITRQIAALNGDIVRIKAMGDNPNDLMDRRDLLVDKLSSIIDITIDSSDPDEFMVHTAGLVIVQGKIGRQLDLRXGIDDEXYAHIFWQDTGQEIRFNRAALGRCWKCATKP

SEQ ID NO: 32827 - DNA, 318 bp, Unknown
  Obtained from environmental sample
  misc_feature (1)..(318): n is a, c, g, or t
gtgttttattgcgagtgtgtcacttgcggggagattctgcctatagaagacatggacgctggtcatggaatacccggcaggatgaattctattttattcaacgaagatttagtccacgcccaatgccgccagtgcaacagaggcggaggcggcgaattgcagatgtttaagaaagtcttgattgatatgtacggtcaggaaaaatgggactattggcagtcaactaaaaacgatccggttaaatatacggactttgattatgaacaaataacgaaaatgtacaggcaaaaatataaacagctagggagcaatttatga

SEQ ID NO: 32828 - protein, 105 aa, Unknown
  Obtained from environmental sample
  misc_feature (1)..(105): Xaa is any amino acid
MFYCECVTCGEILPIEDMDAGHGIPGRMNSILFNEDLVHAQCRQCNRGGGGELQMFKKVLIDMYGQEKWDYWQSTKNDPVKYTDFDYEQITKMYRQKYKQLGSNL

SEQ ID NO: 32829 - DNA, 1011 bp, Unknown
  Obtained from environmental sample
  misc_feature (1)..(1011): n is a, c, g, or t
ttgccccgtatgctcgctctctccgggatccctctcggtttgcgttttgttacgttagatcgggcgcctgacgcttgcgccgcggctgtgtccacgcatatggtaggggattacggcgatagagaaaagttggagcggttcgcggggatggttgatgtcgtcacctacgagttcgagaatgttcccgcggaaagcgtgagttacttatcagagagattgccggtctacccctcccccaaagcgctcgcgttatcgcgcgacaggttcacggagaagagattatttgttgatcttggcattcccactcccaaatttctcgctgtggatagtcttgacggattgaaatctgcggtatgtgagatcggactgcccgcggtgctgaagacgcgcacgcttgggtacgacggtaagggtcagtcggtcataagatccgatggagatattgatggcgcgtgggctctggcgtgcggcgcgccgtgcattctcgaggcattcgtcccctttacaagggagataagcgtcgtagcggcgagaggccgcgacggcgaggcgcgtttctatcctgtgtgtgagaacacgcactccggcggcattctccgccacacgatttgccgcttgggcgatccgatgcagtctgtcgcggaggggttggcgggcagattgctggaacgctttgactacgttggcgttttggcgttggagttgtttgatgtgggcggcgagttgatggccaacgagatggcgccgcgtgtccacaacaccgggcactggtcgatagagggggcgcgggcgagccagtttgaaaaccacgtccgcgccgtggccgggttgccgctgggcgtcgcggaggcgctctgtcacaacgccatggtcaattttataggcgatatgccggatgcggcggaggtgttgagggtggatggagcgcatctgcacgattacggaaaatctgctaggcccgggaggaaacttggtcacgccactgtctgcggagagctcggccaatcttga

SEQ ID NO: 32830 - protein, 336 aa, Unknown
  Obtained from environmental sample
  DOMAIN (87)...(262): ATP-grasp domain
  misc_feature (1)..(336): Xaa is any amino acid
MPRMLALSGIPLGLRFVTLDRAPDACAAAVSTHMVGDYGDREKLERFAGMVDVVTYEFENVPAESVSYLSERLPVYPSPKALALSRDRFTEKRLFVDLGIPTPKFLAVDSLDGLKSAVCEIGLPAVLKTRTLGYDGKGQSVIRSDGDIDGAWALACGAPCILEAFVPFTREISVVAARGRDGEARFYPVCENTHSGGILRHTICRLGDPMQSVAEGLAGRLLERFDYVGVLALELFDVGGELMANEMAPRVHNTGHWSIEGARASQFENHVRAVAGLPLGVAEALCHNAMVNFIGDMPDAAEVLRVDGAHLHDYGKSARPGRKLGHATVCGELGQS

SEQ ID NO: 32831 - DNA, 1458 bp, Unknown
  Obtained from environmental sample
  misc_feature (1)..(1458): n is a, c, g, or t
atgagggataccgaaagcgacatggcgggcaagtatatggacggtcttgtgagttcggttaaaacgggaaaaacgtattcttttaccaattacatcgaagcgataggaaaggaaatgaaaatttttatcgttaccattccctttggtgaaacgaatcttacatggagttacgcgatagccattatgattgatacaattatggcgcctgtttatgaaatgcttacaataaccgtaataatcagcgttgtgatattggttctagtgcttttagccgcaatattcctttcccgttccataagtaaacctattgttaaagtcgcggaaactttaaaggacatttccgagggcgaaggcgatcttacgcgaagcatctctgtaaattccaatgacgaaataggcagtcttgccctgtattttaataaaacgctggaaaagataaaaaaacttgtaattataataaaaaaagaaacgtcaaaccttcacaatataggcaatgatcttgcaggcaacatgacagaaacagcggcagcggttaatgaaattaccgcaaacatacaaaacataaacggacgcgtcataaaccagagcgccagcgtcagcgaaacccatgcgacaatggaacaggttgtcgccaatataaacaaactaaacggccatgtagagaatcagagcaacaacatttcccaggcttcttccgccattgaacaaatggcggctaacatcaattcggttaccgcaaccctgataaaaaacagcgaaaatgtaaaggcgttaaaaagcgcttccgaagtaggccgcggcggattgcaggaggtggcgtccgacattcaggaaatagcccgcgagtccgaaggcttgctggagattaacgcggtaatggaaaacatcgccagccagaccaatttgctttcaatgaacgcggcgatagaggctgcccacgccggggaagcgggtaaaggcttcgccgtagtcgccgaagaaatccgcaaactggcggataattccagcgaacaatccaagactatcgggaatgttttgaaaaagataaaagaatcaatggacaagataaccaaatccactgccaatgtaatagccagattcgaggcgattgactcaggcataaagacggtggcggagcaggaagagaatatccgtcaggcgatggaggagcagggtgaggggagcaagcagcttcttcagggaaccagcaatttgaatgaaattacccagcaggtaaaggccggttccgaagaaatgcttgaaggcagcaaggaagtggtaaatgaaagccagaaccttgaaaagatgacacaggaaatatccggcagcatgaatgagatggcctcgggcgcggaacaggtaaatgtcgcggtacacaatgtcaacgagatggcaagtaaaaaccgcgatagtgttaacgccttaatactggcggtttcgcggtttaaggttaattaa

SEQ ID NO: 32832 - protein, 485 aa, Unknown
  Obtained from environmental sample
  DOMAIN (221)...(450): Methyl-accepting chemotaxis protein (MCP) signaling domain
  misc_feature (1)..(485): Xaa is any amino acid
MRDTESDMAGKYMDGLVSSVKTGKTYSFTNYIEAIGKEMKIFIVTIPFGETNLTWSYAIAIMIDTIMAPVYEMLTITVIISVVILVLVLLAAIFLSRSISKPIVKVAETLKDISEGEGDLTRSISVNSNDEIGSLALYFNKTLEKIKKLVIIIKKETSNLHNIGNDLAGNMTETAAAVNEITANIQNINGRVINQSASVSETHATMEQVVANINKLNGHVENQSNNISQASSAIEQMAANINSVTATLIKNSENVKALKSASEVGRGGLQEVASDIQEIARESEGLLEINAVMENIASQTNLLSMNAAIEAAHAGEAGKGFAVVAEEIRKLADNSSEQSKTIGNVLKKIKESMDKITKSTANVIARFEAIDSGIKTVAEQEENIRQAMEEQGEGSKQLLQGTSNLNEITQQVKAGSEEMLEGSKEVVNESQNLEKMTQEISGSMNEMASGAEQVNVAVHNVNEMASKNRDSVNALILAVSRFKVN

SEQ ID NO: 32833 - DNA, 813 bp, Unknown
  Obtained from environmental sample
  misc_feature (1)..(813): n is a, c, g, or t
atgaacgacgatctggtgctcatcgttaaaaaagaccccgccgataaccacattctgatgcgccgttcggtgatgtcgggttacagcaggaagcagggcttttaccgcatggaagaaattgacgagaagatccatcccctgcgcctgccctcgcgtcccgtacagtttcaacgtgagggcttcaaaatggcgagtcaggtcagacaggaatatttcattgtcaattttgacgccgccgcttttattggcatgaaggagacgattgagattatcccttatgaaaactgggacgcttcctcgtttaaaaccgcgtatcttgtagaaagccttacaagcgacgccggttatgaacattattcacaatccacatataatgaggacggcgaccttttttggcctggtcctgcggaactcgggttaagcgaaaaggaatacgccctgtacacggcttacggaaacgacgagcggattcgagcgttagctgaagaaataaccgccgattacgacagctacgccgacaaggcggaagtgatttatgaatggctgaaatacggcgatttccgttacagccttaaaccgggcattgccccggacggcgaccagctcgcgtggtttttattccagtccaaaaagggttattgctcctattatgccttcgcgatgaccctgcttttgagatccatcgggattccggcgcgtattgccgccggcttcttccttgatcccgacaacggaacctttgattattaccaggtgcgtcccgatatggcccacgcatgggttgaggttccctttcccggtacggctggatga

SEQ ID NO: 32834 - protein, 270 aa, Unknown
  Obtained from environmental sample
  DOMAIN (209)...(270): Transglutaminase-like superfamily
  misc_feature (1)..(270): Xaa is any amino acid
MNDDLVLIVKKDPADNHILMRRSVMSGYSRKQGFYRMEEIDEKIHPLRLPSRPVQFQREGFKMASQVRQEYFIVNFDAAAFIGMKETIEIIPYENWDASSFKTAYLVESLTSDAGYEHYSQSTYNEDGDLFWPGPAELGLSEKEYALYTAYGNDERIRALAEEITADYDSYADKAEVIYEWLKYGDFRYSLKPGIAPDGDQLAWFLFQSKKGYCSYYAFAMTLLLRSIGIPARIAAGFFLDPDNGTFDYYQVRPDMAHAWVEVPFPGTAG

SEQ ID NO: 32835 - DNA, 900 bp, Unknown
  Obtained from environmental sample
  misc_feature (1)..(900): n is a, c, g, or t
ttgctcatcagcataggctcgcgttttgatgaccgcataacggcaaagctctccgagtttgcaaagcagtgcgaagttgtgcacatagatatagaccctgcggagtacggcaaggttataacgccaaggcattttttgtgcggagacgcaaaaattgttttggagcagctgttgccgctcacggaaaaattggattcttcggagtggttaaaaaccgtgtttgcttggaaaaagaaatatcccctgcattacccaaagcaaggcggcctaagagtgcagcacgttgtgcagaccctccacgaggtcacgaatgggaaagccatagtgattgccgacgttggccagcatcagatgtggacggctcagttctttaaatgcgattatccggggcaatttcttacatccggtggggcgggcactatgggctttggcttgccggcagccataggcgttgcgtttggcaacaaaacgggcttcccggtttgcgcaattttgggagacggcggctttcagatgacgctttgcgagcttgcaacagcgcaggtgaacaaactgcctataaaaatttttgttatggataaccattttttgggaatggttcgccaatggcaagacatattttacgataaacgctattcgggcgtgttgatggagaacaatccagattttgttaagctggcaaaggcttacggcatggaggcgttttgcgttagccgcaatgcggatgttaaacgcaccatagaaaaagctatggagtacaacgacgggccagttcttattcattgcgaatgtgagcaggaagacaacgtgttcccgatgattccgccgggggcttccatagacgacatccttactgagcgcccaaaagcggttttggaaaaaccaacgggagggacttga

SEQ ID NO: 32836 - protein, 299 aa, Unknown
  Obtained from environmental sample
  DOMAIN (112)...(262): Thiamine pyrophosphate enzyme, C-terminal TPP binding domain
  misc_feature (1)..(299): Xaa is any amino acid
MLISIGSRFDDRITAKLSEFAKQCEVVHIDIDPAEYGKVITPRHFLCGDAKIVLEQLLPLTEKLDSSEWLKTVFAWKKKYPLHYPKQGGLRVQHVVQTLHEVTNGKAIVIADVGQHQMWTAQFFKCDYPGQFLTSGGAGTMGFGLPAAIGVAFGNKTGFPVCAILGDGGFQMTLCELATAQVNKLPIKIFVMDNHFLGMVRQWQDIFYDKRYSGVLMENNPDFVKLAKAYGMEAFCVSRNADVKRTIEKAMEYNDGPVLIHCECEQEDNVFPMIPPGASIDDILTERPKAVLEKPTGGT

SEQ ID NO: 32837 - DNA, 378 bp, Unknown
  Obtained from environmental sample
  misc_feature (1)..(378): n is a, c, g, or t
gtggctgatgtatttatgttcaagcggggcgcagggccatttgccgttgtcgctttctccggcggccaggggtttgccgatagaatggaaacaaggcacatagaaaccgtcgctgcccagcacgtccagaacctttgttccaactctggtcataatgtgcatattgaccacgacataggcgctgtcggtgatttctacgccgattttggcgatgttcgagccgaccggccccatggagaagggaatcacatacatggtacggcccttcatacagcctttgtacaggccggtcatcgtctttttcagttctacggggtcaatccagttattggtgggtccggcgtcgtcctggctgtgcggcatatagtctcgccataa

SEQ ID NO: 32838 - protein, 125 aa, Unknown
  Obtained from environmental sample
  misc_feature (1)..(125): Xaa is any amino acid
MADVFMFKRGAGPFAVVAFSGGQGFADRMETRHIETVAAQHVQNLCSNSGHNVHIDHDIGAVGDFYADFGDVRADRPHGEGNHIHGTALHTAFVQAGHRLFQFYGVNPVIGGSGVVLAVRHIVSP

SEQ ID NO: 32839 - DNA, 1602 bp, Unknown
  Obtained from environmental sample
  misc_feature (1)..(1602): n is a, c, g, or t
atgccgcacagccaggacgacgccggacccaccaataactggattgaccccgtagaactgaaaaagacgatgaccggcctgtacaaaggctgtatgaagggccgtaccatgtatgtgattcccttctccatggggccggtcggctcgaacatcgccaaaatcggcgtagaaatcaccgacagcgcctatgtcgtggtcaatatgcacattatgaccagagttggaacaaaggttctggacgtgctgggcagcgacggtttctatgtgccttgtttccattctatcggcaaacccctggccgccggagaaagcgacaacggcaaatggccctgcgccccgcttgaacataaatacatcagccacttccccgaaaccagggaaatttggtcttacggttcaggctacggcggcaacgcccttttgggcaaaaagtgcctggcattgcgcattgcctcggtactggcccgcgacgaaggctggcttgccgaacacatgctcatattgaaaatcaccaaccctcagggcgtggtaaaatacatggccgccgcgttcccctccgcctgcggaaagaccaaccttgccatgcttatccccaccctgccgggctggaaggtgcagaccgtcggcgatgacatcgcgtggatgaaacccggcgctgacggccgcctctacgcaattaaccctgaagcgggcttctttggagtcgcgccgggaaccagcaacgactccaattttaacgccatggaatcaatcaagaaaaacacgattttcaccaactgcggtctgaccgaagacggcgacatctggtgggagcagatcggctacggcgcgccgggcaaaacaatcaccaactggaaaggcgagaaaaaacccgcgcccaaaacagacaaagccgttaaaggcgaagaaatagcgcaccccaacgcacgctttacggttcccgcttctcaatgccctgtcatagcaagtgaatgggaagaccccaaaggcgtaccaatcagcgcgttcttgttcggaggcagaagagcaacgacaattccgttggtaaaccagagcaaggactggattcacggcgtattcatgggatcaatcacaggttccgaaattacagccgcggctcttgaccttaaagcgggcgatgtccgccgcgatcctttcgccatgttacccttctgcggttaccacatgggcgattatttcgcgcactggcttaaactcggcaagaaagcgaaagacgaaggcaacggcgacaaactgcctaaaatcttctttgttaactggttccgcaaagacagcgaaggacatttcatgtggccgggttacggcgaaaacagccgtgtccttgcgtggattttcgaccgctgcgacggcaaagacaatttcattgaaacaccgatcggcaacctgcccaaaccgggaagcattgagccgcccgccggagtaagcgccgaaacaatggctgagcttatcaagattgacactgaaggctggaaaaaggaaatctccgacgtaagaagcaatcactacgccaagttcggcgacaaacttccaaaagacctgtacacacaactagacatcatggaaaaaggcttaaacagctag

SEQ ID NO: 32840 - protein, 533 aa, Unknown
  Obtained from environmental sample
  DOMAIN (1)...(529): Phosphoenolpyruvate carboxykinase
  misc_feature (1)..(533): Xaa is any amino acid
MPHSQDDAGPTNNWIDPVELKKTMTGLYKGCMKGRTMYVIPFSMGPVGSNIAKIGVEITDSAYVVVNMHIMTRVGTKVLDVLGSDGFYVPCFHSIGKPLAAGESDNGKWPCAPLEHKYISHFPETREIWSYGSGYGGNALLGKKCLALRIASVLARDEGWLAEHMLILKITNPQGVVKYMAAAFPSACGKTNLAMLIPTLPGWKVQTVGDDIAWMKPGADGRLYAINPEAGFFGVAPGTSNDSNFNAMESIKKNTIFTNCGLTEDGDIWWEQIGYGAPGKTITNWKGEKKPAPKTDKAVKGEEIAHPNARFTVPASQCPVIASEWEDPKGVPISAFLFGGRRATTIPLVNQSKDWIHGVFMGSITGSEITAAALDLKAGDVRRDPFAMLPFCGYHMGDYFAHWLKLGKKAKDEGNGDKLPKIFFVNWFRKDSEGHFMWPGYGENSRVLAWIFDRCDGKDNFIETPIGNLPKPGSIEPPAGVSAETMAELIKIDTEGWKKEISDVRSNHYAKFGDKLPKDLYTQLDIMEKGLNS

SEQ ID NO: 32841 - DNA, 951 bp, Unknown
  Obtained from environmental sample
  misc_feature (1)..(951): n is a, c, g, or t
atggcgaagcagacagggaatatcaccagcacaatcgaagagctatggaaaaatgtctggcaaggcaagctctcatccgattcatgggagcctgtgcgaagggcaattgagagcagctttgcgacggctgaatacagcgagcttcaggcggacgagcgggctacaggcgctatttccggcagaggacgcagggcgtttcgggtacccagggccatccgcgagcgatggaagtcggggacgccagtcaggggcttatggttttcactcgcttccgattccccgcccgacgaaaaccagttcaataagatgggcctcctggaagaagaagagctgaatcgcgaacgggtgcgccttcttttagatcgctgggggatcctgacaaggccgttattggaacgggaagcgcctgtcctttcctgggcaaggttacttcccacgatacggcgcatggaacttgccggggaacttgttaccgggcgcttctttagcggcgtctcctcgctgcaattcgcctcacccagaatcgccgcggaactggaagaagcggaagctgaacagggcatctactggatgaacgcggcggatcccgcaagcccagcaggacttgcggttgagggcgttatttgcaacgcggagcgaagcatccccatggaacgtaacgcttccgcgattcgccgaacagtgtcctccaggctttgcttccgtggcgcagaattgctcgccgtttcaaaccggagctgccgcgagctggaaatttttattcctcccgacgatcctgacatatcaataacgcttgaatttgtaaaaatctcccgaacaagaaaagtacacagagaaaataaaataataatagaaaaagtcaacggcgcttccgcagcctcaagcgcgtattcagaagctcttgtcgctcacggttttgtcaaagacaggggaagactggttttgtggtga

SEQ ID NO: 32842 - protein, 316 aa, Unknown
  Obtained from environmental sample
  misc_feature (1)..(316): Xaa is any amino acid
MAKQTGNITSTIEELWKNVWQGKLSSDSWEPVRRAIESSFATAEYSELQADERATGAISGRGRRAFRVPRAIRERWKSGTPVRGLWFSLASDSPPDENQFNKMGLLEEEELNRERVRLLLDRWGILTRPLLEREAPVLSWARLLPTIRRMELAGELVTGRFFSGVSSLQFASPRIAAELEEAEAEQGIYWMNAADPASPAGLAVEGVICNAERSIPMERNASAIRRTVSSRLCFRGAELLAVSNRSCRELEIFIPPDDPDISITLEFVKISRTRKVHRENKIIIEKVNGASAASSAYSEALVAHGFVKDRGRLVLW

SEQ ID NO: 32843 - DNA, 696 bp, Unknown
  Obtained from environmental sample
  misc_feature (1)..(696): n is a, c, g, or t
gtgcgccgcgccgcgtggcccgtgaaaaaaccgagcccaagggttaaactgctatggtaccaccgcaggcttttgtgtccagcatggacagaccaggagagagcaatggcatacgaaccaaagagctacgaccatctgaagggcgccgtgaagggcctatcggacgaccagctcgaccagcacttcacgctctacaagggctacgtcgccaagctgaacgagatagagaccaagctggctgatgccgaccgcacgaagtcgaactacagcttcagcgagtacagcgagctcaagcgccgcgaggcggtggcgttcaatggcgcgtttctgcacgagctgtactttgaaaacttgggcaccgatgccaccgtgtccaaggaactgcaaagcgccttcgacggatgtggcggacgggacaaggtcgttgcagacttgaaggccgccgccctctgcggcccgggctgggccctgctcacgcacaacaggcgggacggcaggctgcacacctacttcatcgccgagcaccacctcggcctcccgatagagcaggatctgctcatcgcgctggacagttgggaacacgctttcatggttgactatgggataaagcgcgccgactacgtcaacgccttcatcgaaaacatcaagtggggcgaggtgtccaggcggtttgcgctgaccgccaaacagccatga

SEQ ID NO: 32844 - protein, 231 aa, Unknown
  Obtained from environmental sample
  DOMAIN (37)...(119): Iron/manganese superoxide dismutases, alpha-hairpin domain
  misc_feature (1)..(231): Xaa is any amino acid
MRRAAWPVKKPSPRVKLLWYHRRLLCPAWTDQERAMAYEPKSYDHLKGAVKGLSDDQLDQHFTLYKGYVAKLNEIETKLADADRTKSNYSFSEYSELKRREAVAFNGAFLHELYFENLGTDATVSKELQSAFDGCGGRDKVVADLKAAALCGPGWALLTHNRRDGRLHTYFIAEHHLGLPIEQDLLIALDSWEHAFMVDYGIKRADYVNAFIENIKWGEVSRRFALTAKQP

SEQ ID NO: 32845 - DNA, 1023 bp, Unknown
  Obtained from environmental sample
  misc_feature (1)..(1023): n is a, c, g, or t
gtggccgctcctgtgacgccggcgccaacatctcctgcggaggcgtctcctacggagacggtagttccggaaatgtccggtttgctcccgcttgaaacacagcagccggcgactccacaggagccttccccggcgataaccgatacgaccagggatagcagccccgcttatgaggaacgggtaacgatacagactaatcttctgacagtagtactgagcaacgtgggaggtgacgcggtttcatggaagcttaaaggccatagaaacaataaagattctgatgaacctgtgaacatgattctttccggggacaaggaaggccacgcctttaccgttgcttttggcgatttgaaagcccagccgattaattctttattccatgtgaatcgtatttctgaatatactgttgaattttaccgcgattttcttattccaaattctgataacgcgaaattcaggcttactaaacggtacgatttcaagccaaatgattatatgtttgaacttaccgtctctcttgacggcggctattcggtgccgggtttcaactttggcggcagcgcctatactctgtcgtttggaccgcaaatcgggccgcaatttaaaaaactggataaccgctacgattaccgccagtatatgacctataccaacggcaagcgtaaaatggaaaaggcaaacgattccattatcagtacaaatccaaaatgggcggcgataaacggcaaatatttttcctgtatcgcgtatcccctgctacagtaccagcttaacttttctgaaagacccgaagccggcctcgcctcggcatcgcggctgaacattataccgtccgcgttattaacacgtcgcgtattgaggataaatactacttttatcttggccccaaaaaccaggaaacgcttaacgcctacaacatcggcaacaatggttttaaccttatggatatgcagcttgtcgaggttgccaataccaggggaatactcagcccgctggaaaaactccttaaatggctcttattaa

SEQ ID NO: 32846 - protein, 340 aa, Unknown
  Obtained from environmental sample
  misc_feature (1)..(340): Xaa is any amino acid
MAAPVTPAPTSPAEASPTETVVPEMSGLLPLETQQPATPQEPSPAITDTTRDSSPAYEERVTIQTNLLTVVLSNVGGDAVSWKLKGHRNNKDSDEPVNMILSGDKEGHAFTVAFGDLKAQPINSLFHVNRISEYTVEFYRDFLIPNSDNAKFRLTKRYDFKPNDYMFELTVSLDGGYSVPGFNFGGSAYTLSFGPQIGPQFKKLDNRYDYRQYMTYTNGKRKMEKANDSIISTNPKWAAINGKYFSCIAYPLLQYQLNFSERPEAGLASASRLNIIPSALLTRRVLRINTTFILAPKTRKRLTPTTSATMVLTLWICSLSRLPIPGEYSARWKNSLNGSY

SEQ ID NO: 32847 - DNA, 792 bp, Unknown
  Obtained from environmental sample
  misc_feature (1)..(792): n is a, c, g, or t
atggatatgcagcttgtcgaggttgccaataccaggggaatactcagcccgctggaaaaactccttaaatggctcttattaattttttacaaattgatacctaattacggcattgccataatcctgctgacactgacagtaaaaatccttttctttcctcttacaaaaaaaggttccgaagcgaccattcgtatgcaggcccttgccccaaaaatcaaggaactgcagacaaaatataaggacaatccccagaaaatgaacgctgaaatggcgaaattctacaaggaagaaggttacaacccgctttcaggctgtcttcccatgttgcttcaaattcctattttctttgcgatgtataatctttttaacagccattttgatttacgcggggctatgtttatacctcattggataccggatctgtcagtgcctgagtctatttgggatttcccgtccggcgccaggctgcccctgctcggctggaccgcgctgcgccttttgccgttcatctatgtcggctctcagctgctttacggcaaggtaacccaaacccccgatcagaagagcaacacgcagatgaaaatgatgttatacgtcatgccgattgttttctttttcattttatacgacgtgccgtcgggcctcttgatatactggattttttcaaacctgctaacccttgtacagcagcttgtgataaacaaatatttcatcccaaggaagcagctcgcgtcaccaaaagaagaatcacctgncgcctatgccgaagagaaagagaagataaaggagtga

SEQ ID NO: 32848 - protein, 263 aa, Unknown
  Obtained from environmental sample
  DOMAIN (34)...(238): 60Kd inner membrane protein
  misc_feature (1)..(263): Xaa is any amino acid
MDMQLVEVANTRGILSPLEKLLKWLLLIFYKLIPNYGIAIILLTLTVKILFFPLTKKGSEATIRMQALAPKIKELQTKYKDNPQKMNAEMAKFYKEEGYNPLSGCLPMLLQIPIFFAMYNLFNSHFDLRGAMFIPHWIPDLSVPESIWDFPSGARLPLLGWTALRLLPFIYVGSQLLYGKVTQTPDQKSNTQMKMMLYVMPIVFFFILYDVPSGLLIYWIFSNLLTLVQQLVINKYFIPRKQLASPKEESPXAYAEEKEKIKE

SEQ ID NO: 32849 - DNA, 771 bp, Unknown
  Obtained from environmental sample
  misc_feature (1)..(771): n is a, c, g, or t
ttgcgcccattatattctcgccctgctcaaggagaatcangaacacatcgccnacgcttcaaccctttatgnagggataaaccatttantacaggaattnaaacgccctatcgtctcaaagcgaaagccgttgaatactcctcagcggaaaccgaagaaataatcgcctcgattaaagaaacttcagaaatgtcccttaaacagcaggaatctgtaaaagggttgatagaaattgcgggacatggacaggaatccatgaaaaaaaccattcaatcaataaatgacatctcccaatccgttgaaggcataagttctgcaatccgcataatttcttcaatagcggcaaataccaatttgctgtcaatgaacgcggcgattgaggccgcccacgccggagacgccggaatgggctttgcggtggtcgccggagaaatacgccgtctttcggagaacaccagagaaaacgcggtaagtatttcccatacgcttaaaaatattatcagcggaatatccgacacgacaaaacagtccggcgaaacggacacgcgaatagcccaaatgtccgaagagataagcgggtttgccaaaactatgtctgtttttataagcacatttagtgaattatcagcaaaaagtgaaaacattaccaccgctcttgtaagcctaaaagaacaaagttcggcggttaaaacaagttatgcgcaaatgattgaaatgacaaataagctttccagagcgttgaaagacttgtccgaattgtcaaaaagataa

SEQ ID NO: 32850 - protein, 256 aa, Unknown
  Obtained from environmental sample
  DOMAIN (41)...(252): Methyl-accepting chemotaxis protein (MCP) signaling domain
  misc_feature (1)..(256): Xaa is any amino acid
MRPLYSRPAQGESXTHRXRFNPLXRDKPFXTGIXTPYRLKAKAVEYSSAETEEIIASIKETSEMSLKQQESVKGLIEIAGHGQESMKKTIQSINDISQSVEGISSAIRIISSIAANTNLLSMNAAIEAAHAGDAGMGFAVVAGEIRRLSENTRENAVSISHTLKNIISGISDTTKQSGETDTRIAQMSEEISGFAKTMSVFISTFSELSAKSENITTALVSLKEQSSAVKTSYAQMIEMTNKLSRALKDLSELSKR

SEQ ID NO: 32851 - DNA, 381 bp, Unknown
  Obtained from environmental sample
  misc_feature (1)..(381): n is a, c, g, or t
ttgaaaaagtattggaagaaaggactgtatgaccggagctaccgcaatctttccgagaacaatacaatcaaacatccgagcgaaactgaaataactgaaattttccacaccatgagaaaatacagaaaggaagacatatacaactgtacctgttgcggctacggaagctgtaaggcgatggcgacggcaatttacaacaacctgaacaaacatgaaaattgcgcccattatattctcgccctgctcaaggagaatcangaacacatcgccnacgcttcaaccctttatgnagggataaaccatttantacaggaattnaaacgccctatcgtctcaaagcgaaagccgttgaatactcctcagcggaaaccgaagaaataa

SEQ ID NO: 32852 - protein, 126 aa, Unknown
  Obtained from environmental sample
  misc_feature (1)..(126): Xaa is any amino acid
MKKYWKKGLYDRSYRNLSENNTIKHPSETEITEIFHTMRKYRKEDIYNCTCCGYGSCKAMATAIYNNLNKHENCAHYILALLKENXEHIAXASTLYXGINHLXQEXKRPIVSKRKPLNTPQRKPKK

SEQ ID NO: 32853 - DNA, 1611 bp, Unknown
  Obtained from environmental sample
  misc_feature (1)..(1611): n is a, c, g, or t
atgacagattcggccgaggttttttcgaccccgtgtgacagcgtgttttttgccattgacctgaaagccgcagagcgcagttttgccgttgagtaccttcccggccagtacgatcagtgcgccgattccgcggagcaatgtatagagctgattaccggggtcagaccgcgcgtccgctgcgcaaccgtatacattttgtcgcccggcggcatccccatttccgatgccgcgtttgaagcggtaaaaaaatacctgattaatccggttgactcaagggaagccgccgctgaaaagccgcaaacaatcgaagaaattgaaaccagtcccgatgacgtgccggttctctcgagtttcattacatctaacgacactgaacttggcgcaatggcggccagatacgggctcgcgatggcccttgaggatttaatattctgccgtaaatggttttcttccataaaccgcgaccctacgctggcggagctccgcgtgctggacacatactggtccgatcactgccgccacacaacctttaatactattcttgaaaaaatcgaaaccggcgaaggcccattcgcccccgcgctgaanaacgcccttgcgttatacgaaacattacgcgaagaactctatggcaataacaacgcggaggaggagccctcaagccagccccgctcgttatgggacatggcggttatcggggcaaaggttctgaggaaacgcggcgcggccggcgatgttgacgcgtcaaaagaaattaacgcctgtaccgttaaggtgaacgcggaaattcacgacnngctcaccgagccatggcttgtgatgttcaagaacgagacgcacaaccatcccaccgagatagagccgttgggcggcgccgccacctgtttgggcggcgcgatccgcgacccgctttcggggcgctcctacgtctatcaggctatgcgcgtgaccggcgccggggatccccgcgccgccgtgggcgagacgctgccgggcaaattgccgcagcgtaagatcacgacgctcgccgctttggggtacagctcctacggcaaccagatcggcctcgccaccggcatagtcgccgaggtgtaccacaagggttacattgccaagcgtatggagataggcgcggtggtcggcgccgttccaaaatcgcacgtggcgcggcgcgaacccgtgccgggcgacgtcgtcgtgcttctcggcggcaggaccgggcgcgacgggtgcggcggggcgaccgggtcgtcaaaggagcataccgaggagtccatacagacatgcggcgcggaggtgcagaagggcaacgcccccaccgagcgcaagatacagcggctcttccgcgacccggaggtgggcaggatgatccgccgttgcaacgacttcggcgcgggcggggtggcggtcgcggtcggcgagctggccgccgggctggacatctacttagacgcggtgcccaaaaagtacgaggggcttgacggtacggaactcgccatctccgagtcgcangagcggatggcggttgtgatcagcccttcggatttaaaaacatttcaggagaaggcgggagggcgagaatttngnagaccgncgccgtcgcgacggtga

SEQ ID NO: 32854 - protein, 536 aa, Unknown
  Obtained from environmental sample
  DOMAIN (394)...(536): AIR synthase related protein, C-terminal domain
  misc_feature (1)..(536): Xaa is any amino acid
MTDSAEVFSTPCDSVFFAIDLKAAERSFAVEYLPGQYDQCADSAEQCIELITGVRPRVRCATVYILSPGGIPISDAAFEAVKKYLINPVDSREAAAEKPQTIEEIETSPDDVPVLSSFITSNDTELGAMAARYGLAMALEDLIFCRKWFSSINRDPTLAELRVLDTYWSDHCRHTTFNTILEKIETGEGPFAPALXNALALYETLREELYGNNNAEEEPSSQPRSLWDMAVIGAKVLRKRGAAGDVDASKEINACTVKVNAEIHDXLTEPWLVMFKNETHNHPTEIEPLGGAATCLGGAIRDPLSGRSYVYQAMRVTGAGDPRAAVGETLPGKLPQRKITTLAALGYSSYGNQIGLATGIVAEVYHKGYIAKRMEIGAVVGAVPKSHVARREPVPGDVVVLLGGRTGRDGCGGATGSSKEHTEESIQTCGAEVQKGNAPTERKIQRLFRDPEVGRMIRRCNDFGAGGVAVAVGELAAGLDIYLDAVPKKYEGLDGTELAISESXERMAVVISPSDLKTFQEKAGGREFXRPXPSRR

SEQ ID NO: 32855 - DNA, 1152 bp, Unknown
  Obtained from environmental sample
  misc_feature (1)..(1152): n is a, c, g, or t
gtgtcttggattatcaatcttgaaaatgtttctttttcatatcccggcaaaaaaaaatcggcgctggaaaatataaatctttcgattgagcaaggggaaattctcgctgtaatgggagaaaacggcgcgggaaaaacaaccctatgcaagctatttaacggaattattccatgtcttgccgaagggcggttcttaggcaacgtcaccgtagacggcgaaaacacaagggaaacgcaaaccccgcgccttgcccttaaagtgggaatggttcttgacgatttcgacgcccagcttttcacgtctaccgtgcgggaagaagccgcctttggaccggggaacctgctcttaccgccgagagaaattgaagagcggatttctttcgcgcttaacgcaacaggcctttgcggttttgaagaagagtctgcggcgacgctttcgggcggggagaaacagcgccttgccatcgcctgtgctctcgcaatggcgggaaaaattcttgtgctggacgaacctctttcccgccttgatccgcagggagcggaagaagtgatttccgttttgagggacatcagggaaaagtatcagataacggtaattatggcgacgcatgacagcaagacagccgcagtcattgcagacagggtttgcgtaatgaaagacgggcgtattgccgcctgcgataagacggaaaaatttttcagcaatactgccctgcttgaagaaaacggcatacaggcgcctaatgactcagatattgaaaatgtttttacctccggaagcaaacctgttttaacggaagcggtaaagattattgatttttgttatttttatgaaaaaacaggcgtttccattgaaaatataagtctgactgttgcagataacgattttcttgcgattgtcggaaagaacggctgcggaaagacaactttgttaaaatgtattacagggcttttgcgtccggcatccggggacatttttatcagaggaaagaatataaaagaaaattccgtatcagatatttcaaaagaaataggttttgttatgcaaaatccggacagccagctttttaccgattccgtttttaacgaagtttcttttgctttgaaaaacngcgcgcttttcgaaagcggaaatacagaaacgggtaaatga

SEQ ID NO: 32856 - protein, 383 aa, Unknown
  Obtained from environmental sample
  DOMAIN (32)...(221): ABC transporter
  misc_feature (1)..(383): Xaa is any amino acid
MSWIINLENVSFSYPGKKKSALENINLSIEQGEILAVMGENGAGKTTLCKLFNGIIPCLAEGRFLGNVTVDGENTRETQTPRLALKVGMVLDDFDAQLFTSTVREEAAFGPGNLLLPPREIEERISFALNATGLCGFEEESAATLSGGEKQRLAIACALAMAGKILVLDEPLSRLDPQGAEEVISVLRDIREKYQITVIMATHDSKTAAVIADRVCVMKDGRIAACDKTEKFFSNTALLEENGIQAPNDSDIENVFTSGSKPVLTEAVKIIDFCYFYEKTGVSIENISLTVADNDFLAIVGKNGCGKTTLLKCITGLLRPASGDIFIRGKNIKENSVSDISKEIGFVMQNPDSQLFTDSVFNEVSFALKNXALFESGNTETGK

SEQ ID NO: 32857 - DNA, 573 bp, Unknown
  Obtained from environmental sample
  misc_feature (1)..(573): n is a, c, g, or t
atgtccctcaaaacggaaatcacttcttccgctccctgcggatcaaggcgggaaagaggttcgtccagcacaagaatttttcccgccattgcgagagcacaggcgatggcaaggcgctgtttctccccgcccgaaagcgtcgccgcagactcttcttcaaaaccgcaaaggcctgttgcgttaagcgcgaaagaaatccgctcttcaatttctctcggcggtaagagcaggttccccggtccaaaggcggcttcttcccgcacggtagacgtgaaaagctgggcgtcgaaatcgtcaagaaccattcccactttaagggcaaggcgcggggtttgcgtttcccttgtgttttcgccgtctacggtgacgttgcctaagaaccgcccttcggcaagacatggaataattccgttaaatagcttgcatagggttgtttttcccgcgccgttttctcccattacagcgagaatttccccttgctcaatcgaaagatttatattttccagcgccgatttttttttgccgggatatgaaaaagaaacattttcaagattgataatccaagacacctga

SEQ ID NO: 32858 - protein, 190 aa, Unknown
  Obtained from environmental sample
  DOMAIN (20)...(58): Protein of unknown function (DUF1602)
  misc_feature (1)..(190): Xaa is any amino acid
MSLKTEITSSAPCGSRRERGSSSTRIFPAIARAQAMARRCFSPPESVAADSSSKPQRPVALSAKEIRSSISLGGKSRFPGPKAASSRTVDVKSWASKSSRTIPTLRARRGVCVSLVFSPSTVTLPKNRPSARHGIIPLNSLHRVVFPAPFSPITARISPCSIERFIFSSADFFLPGYEKETFSRLIIQDT

SEQ ID NO: 32859 - DNA, 339 bp, Unknown
  Obtained from environmental sample
  misc_feature (1)..(339): n is a, c, g, or t
atggacgctcaaaaactgagggggagcttcgcacctacagggtgcgtatcttttgagaatagtcgttctaaagaacgttgtactaaagtacggcgtattaaagaacgatttttccttgcaaaattaaaagcctatcccgctctggttgtcccgctggtgttaggcgcaatgcgcaaagcgcaatccgcttccttagccatggattcaagagctttcggcgctttcaagaaaaggacatggcttgaaaaacctgtaataaaagtacatgattatctgttccttgcgggatttattattttttctttttttgcagtttatgttaactattttttgttatag

SEQ ID NO: 32860 - protein, 112 aa, Unknown
  Obtained from environmental sample
  misc_feature (1)..(112): Xaa is any amino acid
MDAQKLRGSFAPTGCVSFENSRSKERCTKVRRIKERFFLAKLKAYPALVVPLVLGAMRKAQSASLAMDSRAFGAFKKRTWLEKPVIKVHDYLFLAGFIIFSFFAVYVNYFLL

SEQ ID NO: 32861 - DNA, 1260 bp, Unknown
  Obtained from environmental sample
  misc_feature (1)..(1260): n is a, c, g, or t
ttgactggatgctcggtccagagggacaggcgattgtttcaaaaagctggattacgattaaataaagtaatgaatcgcaaatttacagatattttctttaaatatctgtttagcgcggtagccctcttttccgttttggcattgggggctattttgctttttgttttcgcgcagggaacaataccgtttttttcttctacttctgcgggcatccgtctggttgctcagagaattgatgaaattaccgttaacggtgaaacttatattgaccattcaacatttattgatattccgaaaaacaccgggcttatttcaattcactttccctcatctgacggcgaagaaacgcttgagattaaggtagacgaaaccgaaaaagacccgcaaaaaaaattaacattttcgtataacggcgaagtaaaaataacataccccgaaaattatgtatatacggtaagctggccggccgcttttgccgctcttgagaaaagaatacatgtaataattcctgaaccgccgtatagtttctggaaattccttgccgggcttgaatggcatccaagcagggacaagatattcggtattttccccatgattgccggaaccatcgtcgcaagcttgggagcaatcattttaggcgtgccaatcgctttgttatgcgctctttttatggctgagtttctcggtcaaaaaaccgcgtctgttgtgcgcgctggagttgagcttcttgccgggattccttccgtagtgtacgggtttttcggtcttatggtgatagttccgcttgtaaaaaatacttttaaaatagcgtccggtaacacgctcctttcagcgattatcgtgttggcgctcatgatactgccgactgtgataactatcgccgaaacttcgttaagagctgtcccgtcttcggtgcgcgaggcaagcctttcgctgggagcgagcaaaatgcagacagcttggaaagttgttttgccccatgccaattctggagtaatcgccggagttatactcgggatttcgcgcgcggtaggcgagacaatggcggtaatccttgtggctggaaactctcctcagcttacgataaatccgcttgccagcataaggacgctcacgtctacaatcgccatggagatgggttacgcgtcgggcaggcacagcgaaatgcttttttcaatcggcgtaacattgttttcgatcatccttatccttaacagcctgattctatggtaccgccgccggatggaggtggaattgtga

SEQ ID NO: 32862 - protein, 419 aa, Unknown
  Obtained from environmental sample
  DOMAIN (199)...(417): Binding-protein-dependent transport system inner membrane component
  misc_feature (1)..(419): Xaa is any amino acid
MTGCSVQRDRRLFQKAGLRLNKVMNRKFTDIFFKYLFSAVALFSVLALGAILLFVFAQGTIPFFSSTSAGIRLVAQRIDEITVNGETYIDHSTFIDIPKNTGLISIHFPSSDGEETLEIKVDETEKDPQKKLTFSYNGEVKITYPENYVYTVSWPAAFAALEKRIHVIIPEPPYSFWKFLAGLEWHPSRDKIFGIFPMIAGTIVASLGAIILGVPIALLCALFMAEFLGQKTASVVRAGVELLAGIPSVVYGFFGLMVIVPLVKNTFKIASGNTLLSAIIVLALMILPTVITIAETSLRAVPSSVREASLSLGASKMQTAWKVVLPHANSGVIAGVILGISRAVGETMAVILVAGNSPQLTINPLASIRTLTSTIAMEMGYASGRHSEMLFSIGVTLFSIILILNSLILWYRRRMEVEL

SEQ ID NO: 32863 - DNA, 885 bp, Unknown
  Obtained from environmental sample
  misc_feature (1)..(885): n is a, c, g, or t
atgggtgcgcaaattaaatggttgaataaggatgcggcttttgaccgcttggttttggctggcgatataggcggaaccaataccaatttggctttggttgggcaaaaaaatgggaaactcaccatcattgttgaagctgttttcccgtcccgcgaaattactggcttaaccgagcctataaaagaacttttgcaaacgacaaaaagcgagcgagcggatttagttgtaaaacaaggctgcatttgcgccgcaggcccggttgagaacaactgctgcaagctgaccaacctgaactggaacatagatggcaacgagctttcaaaggaactcggcttggaaatccgcgtgataaatgattttttgggcataagctatggcattcccactttggacgtaaataatcccgaacagatttttgcctttaaacacacggacggttcaagtcatgagcctcgcaaggcaacaaaagccgtgattgatccaggaaccggtttgggcgcgggggggttagcttggaacggcaccggatacattccaaattcttccgaaggcgggcatttaacttttgctccctttgaagaagaaagccagtctttcagagattataaggtaaagcggcttggcgaagttcccgatgtagaagtgctggtttccggcacgggaattcaaaatctttatgagtggcatagagacacaaagggtttgccaaatggagatgcttggacagaaattgaaaatgcaaagccaagcgatagaccaaggctaatttccaaacttttggattcagacccagttgcagattatatgatgagtttattggttccaatgntggctagntangcagaagatantttcatagcttgnnnggccagatnggaggtataa

SEQ ID NO: 32864 - protein, 294 aa, Unknown
  Obtained from environmental sample
  DOMAIN (19)...(284): Glucokinase
  misc_feature (1)..(294): Xaa is any amino acid
MGAQIKWLNKDAAFDRLVLAGDIGGTNTNLALVGQKNGKLTIIVEAVFPSREITGLTEPIKELLQTTKSERADLVVKQGCICAAGPVENNCCKLTNLNWNIDGNELSKELGLEIRVINDFLGISYGIPTLDVNNPEQIFAFKHTDGSSHEPRKATKAVIDPGTGLGAGGLAWNGTGYIPNSSEGGHLTFAPFEEESQSFRDYKVKRLGEVPDVEVLVSGTGIQNLYEWHRDTKGLPNGDAWTEIENAKPSDRPRLISKLLDSDPVADYMMSLLVPMXAXXAEDXFIAXXARXEV

SEQ ID NO: 32865 - DNA, 972 bp, Unknown
  Obtained from environmental sample
  misc_feature (1)..(972): n is a, c, g, or t
ttgtccgccgccttgcacatggcgttacttacccttgatataaaagaaggcgatgaggtaattactccttctttaacctttatcgccgaccaaaatgttacccaaatgacgggtgcaaaaaacgtacttgcggatatttcttcaatggaagattggtcggtcgatcctgacgatattaaaactcggattacacctgcgacaaaagccgtgatgatagtccactatgcgggttttgcctgtgatatggagcgtataaccgccctttgcaaaaaacacgaattgctccttatcgaagactgcgcccattcgccgggagccgattacaatggacaacctctcggcacttttggcgacatatcggctttcagtttttttgccaataaaaacatcgcggttggcgaaggcggcatggttgttactcgcaacgcggacttgtatgaaaaactgcgtcttttgcgttcccacggaatgtccgtcccctccttcgaccgctacaagggcagggcagtctcctacgacgtacagtcgcctggattgaattaccgtattcacgaaataagttccgcccttgggcttgtccagcttaaaaaacttgaagacgcgaatgaaaaaagaaaaaaactcgtggaatactattacagccgccttgataaagttccgtccgtttcaattcctttcagggctttttcgcgagggaagccgaattatcacataatgccaattttgctttcagaaaaaatagacagggcggcggttatagaatcgatgaagcaggacggagttcaaaccagtattcattaccccgcaattcaaaatttcagcgcgtacaaggacaaagtaaactccacgccgaaagccgaatatgtctgcgcccacgaattgactttgcctttgtatccgaccatgacgacggaagaagttgatattgtgtgcgatgcgctggttagcggaattgaaaaaagcgggaaataa

SEQ ID NO: 32866 - protein, 323 aa, Unknown
  Obtained from environmental sample
  DOMAIN (1)...(315): DegT/DnrJ/EryC1/StrS aminotransferase family
  misc_feature (1)..(323): Xaa is any amino acid
MSAALHMALLTLDIKEGDEVITPSLTFIADQNVTQMTGAKNVLADISSMEDWSVDPDDIKTRITPATKAVMIVHYAGFACDMERITALCKKHELLLIEDCAHSPGADYNGQPLGTFGDISAFSFFANKNIAVGEGGMVVTRNADLYEKLRLLRSHGMSVPSFDRYKGRAVSYDVQSPGLNYRIHEISSALGLVQLKKLEDANEKRKKLVEYYYSRLDKVPSVSIPFRAFSRGKPNYHIMPILLSEKIDRAAVIESMKQDGVQTSIHYPAIQNFSAYKDKVNSTPKAEYVCAHELTLPLYPTMTTEEVDIVCDALVSGIEKSGK

SEQ ID NO: 32867 - DNA, 615 bp, Unknown
  Obtained from environmental sample
  misc_feature (1)..(615): n is a, c, g, or t
gtgatcgttagcggtaatccggttcgtcccgtgtttcgctcagcagatcccgcgaaaggccgcgcctttctggggctaaagcaggacgaaaggatgcttctggttttaggaggcagtcagggagcaagggagcttaatacgctggttcgcggcgcaatttcggatctgcgcctcttttacacggtggtacaccagtatgggcccgcgcaggactgggacttgccaaaaacgcaagggtatattcctcttccctatataaaagaagaaataccccacgtgcttgcggctgcggaattggtgcttggacgcagcggcgcgggaaccgtctgggaaagcgcggcactgggcaagccaatggtcttgatccccctctgcggttccggcacaaggggcgatcaggttgaaaacgcccggttctttgaaagacaaggcgcggcgcaggttttgttaggcgaagaggcaaagccggataatcttgccgccctgatcaacgccctagccgaagatccatcaaggcgtgaggcaatggcgaatgcggcaatgaaaatcggcaacctcgacggagcggcgattattagcgatactatttttacttttctcttaggtggaatgtag

SEQ ID NO: 32868 - protein, 204 aa, Unknown
  Obtained from environmental sample
  DOMAIN (32)...(192): Glycosyltransferase family 28 C-terminal domain
  misc_feature (1)..(204): Xaa is any amino acid
MIVSGNPVRPVFRSADPAKGRAFLGLKQDERMLLVLGGSQGARELNTLVRGAISDLRLFYTVVHQYGPAQDWDLPKTQGYIPLPYIKEEIPHVLAAAELVLGRSGAGTVWESAALGKPMVLIPLCGSGTRGDQVENARFFERQGAAQVLLGEEAKPDNLAALINALAEDPSRREAMANAAMKIGNLDGAAIISDTIFTFLLGGM

SEQ ID NO: 32869 - DNA, 981 bp, Unknown
  Obtained from environmental sample
  misc_feature (1)..(981): n is a, c, g, or t
ttggccgaggcttgcccctgttatcaaatcgatgaaaaaaagtgcattaattgctacgcttgtattgtaatttgcccggttaaatactgtatggacggttcgggtgataaacttatgataaatcacgacatctgtataggttgcggaaactgtattaatgcctgtactcacaaggcaagaacctttatagacgacactccccgttttgtggacgatctaaaaaagaaacaaaaaatcattgccgttgttgccccggctgtcgcttcattctttgccggtcaatatctcaacttaaacggctaccttaaatcattgggcgttgaagccatttttgacgtgagtcttggggcggaacttacagtcctgtcttacgtcaaccatatcaaagaaaaaaatccccgcatgatcatttcacagccatgccctgcgattgtaacttttatcgaaatctacctacctaaattactgccctatcttgctccggcggacagtcctattctacataccataaaaatgatcaaagagtattatccccaatataaaaatcataaaatagcggtaatttccccctgcattgccaaacggcgggaatatgacgaaaccggcatgggaaactacaatgttacaatgcttgcgttaaaaaaacttctggaagagcaaggtaaagatctttcttctttttcatcggtagcatataccggattaagcgcggaacgggcggctgggtttcccattccaggaggattgctggataccgcagaacgttttagtccgggaattaggcggcagaccctcaaaattgaaggagtatattccatctatccttatttggaagcactccccaaagtattggattccaatgtcaaactgccattactggttgactgcttgaaatgcgaaaaaggctgtaatggcggaccgggaacggggaacgccgaaaaaccactggccatgcttgaagaccctgtacgaaacgtatag

SEQ ID NO: 32870 - protein, 326 aa, Unknown
  Obtained from environmental sample
  DOMAIN (70)...(310): Iron only hydrogenase large subunit, C-terminal domain
  misc_feature (1)..(326): Xaa is any amino acid
MAEACPCYQIDEKKCINCYACIVICPVKYCMDGSGDKLMINHDICIGCGNCINACTHKARTFIDDTPRFVDDLKKKQKIIAVVAPAVASFFAGQYLNLNGYLKSLGVEAIFDVSLGAELTVLSYVNHIKEKNPRMIISQPCPAIVTFIEIYLPKLLPYLAPADSPILHTIKMIKEYYPQYKNHKIAVISPCIAKRREYDETGMGNYNVTMLALKKLLEEQGKDLSSFSSVAYTGLSAERAAGFPIPGGLLDTAERFSPGIRRQTLKIEGVYSIYPYLEALPKVLDSNVKLPLLVDCLKCEKGCNGGPGTGNAEKPLAMLEDPVRNV

SEQ ID NO: 32871 - DNA, 939 bp, Unknown
  Obtained from environmental sample
  misc_feature (1)..(939): n is a, c, g, or t
atggtaaaaaattactccgtaaaaagatcgctnttaagcgtagcgtcggaaatcggcgtggaagtatacgatgagtcaaaagaagccgccgaaatactggaggacgttcaaaggacgatttttaagttaagcgatgaaagacaggtttttacgtcaagaaagatcagcgaagttttaaaagaaaccattttaattcttgacaatgtaatgaagtccaaaaatcctataacgggaatttcaacgggctttgaaagattggatcaattaacatcgggttttcagcgtgaggaatttatcgtaatcggcgcgcgtccttccgtgggaaaaaccgcccttgcgcttaatatggcatctaatatggcgtttcaccaaaaaacacccacagctttcttttctttggaaatgtcaaatatcgcgcttgcccagcgtatcataagcagcgaggcaaaagttcaggcgcagaatttaagaagcggttttttaagcacgggcgattataaaaaaatagtagatgttatgagtcttttgtatgaaggaccgttttatatcgtcgatattcctaacatggatcttttaagtctccgcactcaggcgcgcaaactgcgttcccagcaaaatgtggagataatatttatcgattacttgggtcttatcgcatacgaaaacagcaagttagcgcgttttgatcaggtttccaatatttcccgcgcccttaaaagccttgcccgagaactgcacatcccgatagtggttctctgccagcttaaccgcgacgcccaatgggaaacccccacgctggcgaatttaagggattcaggctcgatagagcaggacgcggacttggtgttgttcttaaacagggaacagcccaaaaaaagcaaaaaggacaagaagaggatgaaaaaccggtttatagcgacaaaatccccacagatttga

SEQ ID NO: 32872 - protein, 312 aa, Unknown
  Obtained from environmental sample
  DOMAIN (75)...(269): DnaB-like helicase C terminal domain
  misc_feature (1)..(312): Xaa is any amino acid
MVKNYSVKRSLLSVASEIGVEVYDESKEAAEILEDVQRTIFKLSDERQVFTSRKISEVLKETILILDNVMKSKNPITGISTGFERLDQLTSGFQREEFIVIGARPSVGKTALALNMASNMAFHQKTPTAFFSLEMSNIALAQRIISSEAKVQAQNLRSGFLSTGDYKKIVDVMSLLYEGPFYIVDIPNMDLLSLRTQARKLRSQQNVEIIFIDYLGLIAYENSKLARFDQVSNISRALKSLARELHIPIVVLCQLNRDAQWETPTLANLRDSGSIEQDADLVLFLNREQPKKSKKDKKRMKNRFIATKSPQI

SEQ ID NO: 32873 - DNA, 726 bp, Unknown
  Obtained from environmental sample
  misc_feature (1)..(726): n is a, c, g, or t
ttgacattcttaacttctgaaataatcgacacaataaaagcaactgatgcaagtgtccgtttctctatctatggccacgaagaaaaaacccacgatgctataacaaaaaaagacggcagttttaaaaaattaatctcctctgttgaacttcttgttaaaaaaaatattccactacgccctgccttaatattgatgaaagaaaaccaacactgcacggaaccggtcaaaagacttctcgaatcattaggtgtcagctataacggttacgacacaatccgtaataatataccgaacaataaaaatacacattatattaccgacccaggacttttggagccccgctattcaacaaagccaaattttcaaacaaaggaactggattttcatagaaatcaccaccgcaattcctgttgggatggcaaactggccgtaaccgcgtcaggggacgtactaccttgtatctttgcccgtaccttcacttgcggaaatgtaaaaagtgacagctttgaaacaatcaaagcaaatttattaacatattggaaaacaacaaaaagcgatattaatggctgccgcgattgcgaataccgttattgttgccatgactgtcgtcctgtatcttatggaatcgaaggagattattatgctaagtacctacgctgtacgtatgacccttatacaggtgtatggcatgagcttgccaccgttacaaaagaactttacaagtag

SEQ ID NO: 32874 - protein, 241 aa, Unknown
  Obtained from environmental sample
  misc_feature (1)..(241): Xaa is any amino acid
MTFLTSEIIDTIKATDASVRFSIYGHEEKTHDAITKKDGSFKKLISSVELLVKKNIPLRPALILMKENQHCTEPVKRLLESLGVSYNGYDTIRNNIPNNKNTHYITDPGLLEPRYSTKPNFQTKELDFHRNHHRNSCWDGKLAVTASGDVLPCIFARTFTCGNVKSDSFETIKANLLTYWKTTKSDINGCRDCEYRYCCHDCRPVSYGIEGDYYAKYLRCTYDPYTGVWHELATVTKELYK

SEQ ID NO: 32875 - DNA, 909 bp, Unknown
  Obtained from environmental sample
  misc_feature (1)..(909): n is a, c, g, or t
atggatcagattggccgagatgtcggcacgatttggcagcagttagtccttcccgcgctgttaaagaagcgtaaaatcgacgttctttgggcgccggaacaaatcggccccgttctttggctgccgcccgatacaaaaatggtcacgactgtccatgattttgtcgtctggcgctatcctgaaacgtgttcgagaataaacctctttataaaaaaaatgatcggagcgccgaccatcagaaaatctcgcgccctggtaccggtatccgatcacattaagaatgagttgatggaactttttccggaagtcctgtcgacatcaaaaatcattcaaacagtaaataacggggcaaaagattggaattgtgtgaatcgacccgtcgaaagggagaatttcctctttttccccggcagtatagaacccagaaaaaatctcaataggcttattaaggcgcttgagattgtaaacgcgtccggatttgagctggatcttcatatttgcggccccgtagggtggaaaaataccgattttcacaaattaattaattcaagccccgtaaaaaaccgcgtaacgcacctcggatatctctccgacgccgacctgttgaatcaatacctcaagtgcaaagcccttatctacccgtcaatatacgagggtttcggcatacctatcttagaggcgttgaacctggacacccccgttcttacctcaaaggggacggtgatggaggagatcgcggaagaaagcgcaatgtactttgacccgtacgacgttgattccatcgccgccgtcataatcgagtttctgaaaacaggcggcgtcccgatcaatcatgacagcttgaacagatacacttgggagcggtcggcgaaacaactgttggatgtttttgaggaggcgcgaaaataa

SEQ ID NO: 32876 - protein, 302 aa, Unknown
  Obtained from environmental sample
  DOMAIN (117)...(288): Glycosyl transferases group 1
  misc_feature (1)..(302): Xaa is any amino acid
MDQIGRDVGTIWQQLVLPALLKKRKIDVLWAPEQIGPVLWLPPDTKMVTTVHDFVVWRYPETCSRINLFIKKMIGAPTIRKSRALVPVSDHIKNELMELFPEVLSTSKIIQTVNNGAKDWNCVNRPVERENFLFFPGSIEPRKNLNRLIKALEIVNASGFELDLHICGPVGWKNTDFHKLINSSPVKNRVTHLGYLSDADLLNQYLKCKALIYPSIYEGFGIPILEALNLDTPVLTSKGTVMEEIAEESAMYFDPYDVDSIAAVIIEFLKTGGVPINHDSLNRYTWERSAKQLLDVFEEARK

SEQ ID NO: 32877 - DNA, 324 bp, Unknown
  Obtained from environmental sample
  misc_feature (1)..(324): n is a, c, g, or t
atgaaaaagaaacttgattttataccgccgggaaccatattaaaagaggagtttatggaacctcttggaattacatcatacagattaagcaaggaaataaaagtacaacaaaccgcggtcagccagataatcaagggcagccgaaagataacggttgatatggctctgcggctttcaagatattttggcaattccgcgcaattctggcttaatcttcaaaattattatgattttgaatccgaaatggaaaaaaaagaatacctgctcaatgagataggtccctataacctgcatgcggcggagaaagcgcctgtttatgcgtag

SEQ ID NO: 32878 - protein, 107 aa, Unknown
  Obtained from environmental sample
  DOMAIN (14)...(69): Helix-turn-helix
  misc_feature (1)..(107): Xaa is any amino acid
MKKKLDFIPPGTILKEEFMEPLGITSYRLSKEIKVQQTAVSQIIKGSRKITVDMALRLSRYFGNSAQFWLNLQNYYDFESEMEKKEYLLNEIGPYNLHAAEKAPVYA

SEQ ID NO: 32879 - DNA, 312 bp, Unknown
  Obtained from environmental sample
  misc_feature (1)..(312): n is a, c, g, or t
gtgatactattattacaggcgggtatattcgtgatacaaagttttggggacaaagataccgaggcgctctttaacagggaaaggataaagaagctacaccctgacctgttccagcgcgcaaggagaaagcttctcattattcatgccgctgtagacgaagacgatctgaaagttccgccggggaaccattttgagaaattaaaaggggataaaaaggattggtgcagtattcggattaacgaccaatggagagtgatttttaagtgggcggaagggaatgcccgtgatgttacaattaccgattaccattag

SEQ ID NO: 32880 - protein, 103 aa, Unknown
  Obtained from environmental sample
  DOMAIN (11)...(103): Plasmid maintenance system killer protein
  misc_feature (1)..(103): Xaa is any amino acid
MILLLQAGIFVIQSFGDKDTEALFNRERIKKLHPDLFQRARRKLLIIHAAVDEDDLKVPPGNHFEKLKGDKKDWCSIRINDQWRVIFKWAEGNARDVTITDYH

SEQ ID NO: 32881 - DNA, 1086 bp, Unknown
  Obtained from environmental sample
  misc_feature (1)..(1086): n is a, c, g, or t
gtgtatgcgcaagcgcagaaggattatttattagcggttaatcccaggcctgttaccataacgggactttccgtcgcggacaagcaatacgacggcacaacggaggcggaagttattggcactgcggtaattgacggactaatcgttggcgatgacgtgagtgttgttgaggggaccgcagcatttgcggatgcggcattaggacacggcaagacagttaccttcagcggctgggcgttgagcggcgcagacgcggggaattatattttgtcggcacagcctgcggatgtaacggcggatataagggaaatagtaatagacattgtacaaatacccgccggtgcctttatgatgggtcaaacaggtgttgcgacaccggaacaccaggtaacgcttacgagtggatttataatgagcaagtatctggtaacgcaggagcagtatcaggcggttatggggacaaatcccagcaatttcacatcagcggtagcgggtgaaagcgggacgccggggaaattgcctgtggagcgagtaagctggtatgacgcgttggtattctgcaacaaattaagcatgaaggaaggattaagccccgcgtacagcataagcggaagtaccgatcctgcggcatggggagcggttccaggaactagtaatgcgacgtggaacgcggtacaaatagttgaaggttccaacgggtaccgcttaccgaccgaggcgcagtgggaatatgcttgccgcgcggggacgacgactgtgtataatacgggggatacgattagcgatgataccgggtggtattcaagcaacagcgttagtaaaagtcatgaggtaggaaagaaacctgctaatgcatgggaactgtatgacatgcacgggaacgtgtntgaatggtgctggaattggtatgaaagttattcgaatggttcgcaagttgaccccactggagcggctaccggatcttcccgagtgtttcgtggcggggggcatggcgacggtgctcggaacctacgttcagcctatcggggcaccagtcttccgttctaccggaacaacggtggcggcttccgactggtacgtccctga

SEQ ID NO: 32882 - protein, 361 aa, Unknown
  Obtained from environmental sample
  DOMAIN (104)...(360): Domain of unknown function (DUF323)
  misc_feature (1)..(361): Xaa is any amino acid
MYAQAQKDYLLAVNPRPVTITGLSVADKQYDGTTEAEVIGTAVIDGLIVGDDVSVVEGTAAFADAALGHGKTVTFSGWALSGADAGNYILSAQPADVTADIREIVIDIVQIPAGAFMMGQTGVATPEHQVTLTSGFIMSKYLVTQEQYQAVMGTNPSNFTSAVAGESGTPGKLPVERVSWYDALVFCNKLSMKEGLSPAYSISGSTDPAAWGAVPGTSNATWNAVQIVEGSNGYRLPTEAQWEYACRAGTTTVYNTGDTISDDTGWYSSNSVSKSHEVGKKPANAWELYDMHGNVXEWCWNWYESYSNGSQVDPTGAATGSSRVFRGGGHGDGARNLRSAYRGTSLPFYRNNGGGFRLVRP

SEQ ID NO: 32883 - DNA, 897 bp, Unknown
  Obtained from environmental sample
  misc_feature (1)..(897): n is a, c, g, or t
atgacggagcgccggaaaagccaaaggagtgagtatatgataatcaatcacaacttaagtgcaatgttagccgacaggtccctcaaagttacccaggtgttcctggataagaacatggaaaaattgtcgactggacttcgcatcaatcgcgccggtgatgacgcatctgggcttggagtctcagaaaaaatgcggtctcaaatccgcggtttgaatcaggcgtcaactaacgcccagaatggtatttcattcattcaaacaactgaaggttacctgcaagaatcccaggacatccttcaacgtctgcgtgaacttgcagtacaggctgcgaacggtatttataccgacgaagacagaatgtacatccaggttgaagtttcagcccttgttgacgaagttgacagaatcgcatcacacgcgcagttcaacgggatgaacgtattaacgggacgttttggaaggccaatcggcgaaaacgtggttacagcgtctatgtggcttcacattggagctaacatggatcagcgtgagcaagtgtttatcggcactatgacaacaaagggtcttggtatccgcaatgttggtgacgatagttttattacactgtccagtccggacggtgccaatcgtgccattggaaccctggatcatgcgctacagatcatcagcaaacaaagggctgatcttggcgcctatcagaaccgccttgagcacgcagtacgcggcttagacattggagctgaaaatatgcaagcttctgagtctcgtatacgtgacacaaacatggcgaatgagacggtaaattataccaagaacatgattcttacacaatcaggcaccgccatgttggcgcaggcaaatcaaagaggtcaatcggttctttctcttctgcaataa

SEQ ID NO: 32884 - protein, 298 aa, Unknown
  Obtained from environmental sample
  DOMAIN (205)...(276): Bacterial flagellin C-terminus
  misc_feature (1)..(298): Xaa is any amino acid
MTERRKSQRSEYMIINHNLSAMLADRSLKVTQVFLDKNMEKLSTGLRINRAGDDASGLGVSEKMRSQIRGLNQASTNAQNGISFIQTTEGYLQESQDILQRLRELAVQAANGIYTDEDRMYIQVEVSALVDEVDRIASHAQFNGMNVLTGRFGRPIGENVVTASMWLHIGANMDQREQVFIGTMTTKGLGIRNVGDDSFITLSSPDGANRAIGTLDHALQIISKQRADLGAYQNRLEHAVRGLDIGAENMQASESRIRDTNMANETVNYTKNMILTQSGTAMLAQANQRGQSVLSLLQ

SEQ ID NO: 32885 - DNA, 717 bp, Unknown
  Obtained from environmental sample
  misc_feature (1)..(717): n is a, c, g, or t
gtggacgaggaatacgcccgcctgaccggggaagtgaggataagcctgaaagacggcgacgcggttcacaagataacggcgtggaacattctgtttaaccgcaccaggaacatccttaccgcttcgggcggcgtcgagtatatcaagacggaaggggagaaaacggaaaccttcaggggcgattccataaccgtcgacattgacaactggtcaagcgtgttcctcggcggcgtgtcggagcgatctttgcagggcgacaataccacttatctcttcgccggaaccgtaatttcacgcgacgaggaagaagttaccgtccttaacagggccacgatctcaagcgccaacaaccccgaatcccactggtccctcggcgcctcgcgggtatggcttcttccgggatccgatttcgccatacttaacgcggtgcttaaagtcggcgaagtgccggtcatgtacataccgttcttctattacgcggcggacgaagttatttttcatcccgttataggctcccgcacgagggaggggcccttcatccagactacgacatacattctgggccgtcccaaggcgacttccagcacccagagctcgcttacgaaaatactgggcaactcaagcgatatggaaaagaagcgggaaggaatgtttctgcggagcacggggaaaaaagcggntggataccgacaaggtcagcttaaaggcgatgcttga

SEQ ID NO: 32886 - protein, 238 aa, Unknown
  Obtained from environmental sample
  misc_feature (1)..(238): Xaa is any amino acid
MDEEYARLTGEVRISLKDGDAVHKITAWNILFNRTRNILTASGGVEYIKTEGEKTETFRGDSITVDIDNWSSVFLGGVSERSLQGDNTTYLFAGTVISRDEEEVTVLNRATISSANNPESHWSLGASRVWLLPGSDFAILNAVLKVGEVPVMYIPFFYYAADEVIFHPVIGSRTREGPFIQTTTYILGRPKATSSTQSSLTKILGNSSDMEKKREGMFLRSTGKKAXGYRQGQLKGDA

SEQ ID NO: 32887 - DNA, 858 bp, Unknown
  Obtained from environmental sample
  misc_feature (1)..(858): n is a, c, g, or t
atgagtgaaataaaaattgcgtgtattggcagcgggaacatggggtttgcccttatgaagggaattgcggccatgagcaaaagaacaaacaaacctgtcagcattgtttttaccgacgcttacgcggaaaaagccaaaaccgccgccgccgcgctgggagccggggttttcagctccaatactgaggctgccgaaaaagccgattttattttcctcgcggtcaaaccgcagatactctctgacgtgctggccgaaattgcccctgttattcaaaagcgtatggcggctggcgcgtaccaaaggtacgacgcgcccctgctggtatcaatggcggcaggatggacaattgaaaaaattcaggccgtcattgcgtataacgcaacggcaaaaattcccgtcgcgcggataatgcccaatacgccggccttaatctcaaaaggcatgatcgcccttgccgtatcacccgaagtctccggcgaaaaagccgatgacttagagtcaatactcaagggagcgggtatagttgacagggtttctgaaaattatttcaacgccgttacgggcctttccggttccggccccgcgtttgcgttcctgttcattgaggctctggccgacggaggagttctggccggcctgccccgcgacaaggccctgcggtacgcggcccagaccgtgatgggttcggcggcgatggttttggaaacgggcaaacaccccggtgaactgaaagacatggttgcctctcccggcggtactaccattgccggcgtcgccgcgcttgagtcaggcggtttccgggccgccgcgatacaggccgttgtagccgcgtggaagcgggcgatggaattgagttaa

SEQ ID NO: 32888 - protein, 285 aa, Unknown
  Obtained from environmental sample
  DOMAIN (5)...(269): NADP oxidoreductase coenzyme F420-dependent
  misc_feature (1)..(285): Xaa is any amino acid
MSEIKIACIGSGNMGFALMKGIAAMSKRTNKPVSIVFTDAYAEKAKTAAAALGAGVFSSNTEAAEKADFIFLAVKPQILSDVLAEIAPVIQKRMAAGAYQRYDAPLLVSMAAGWTIEKIQAVIAYNATAKIPVARIMPNTPALISKGMIALAVSPEVSGEKADDLESILKGAGIVDRVSENYFNAVTGLSGSGPAFAFLFIEALADGGVLAGLPRDKALRYAAQTVMGSAAMVLETGKHPGELKDMVASPGGTTIAGVAALESGGFRAAAIQAVVAAWKRAMELS

SEQ ID NO: 32889 - DNA, 468 bp, Unknown
  Obtained from environmental sample
  misc_feature (1)..(468): n is a, c, g, or t
ttgccgttgttaacagatctgcataaccattcctgcctttcgccctgcggctctctggatttgtcgccgcgccggatattggaaatagcgtccgcaaaaaaactgcaggtaatggccctgaccgatcacaactcaagcctgaactgtccggctttcgcgaaactctgccctctattcgggataatcccgatctttggcatggaggcgaccaccagcgaggaaatccatgtcctttgcctttttaccagcctggaggcaagcctggctttcggtgaattcgcctattcgattttgaccccttttctcaataacccggaaaaaaccggggatcaggtttatgttgacgaagaggacaacatcgagggtgaggttgaatattaccttgtaaacccgcttgatatatcaattgatgatattggaaaaaaagtcattgaacacgggggactggtgattccagcccatgattga

SEQ ID NO: 32890 - protein, 155 aa, Unknown
  Obtained from environmental sample
  misc_feature (1)..(155): Xaa is any amino acid
MPLLTDLHNHSCLSPCGSLDLSPRRILEIASAKKLQVMALTDHNSSLNCPAFAKLCPLFGIIPIFGMEATTSEEIHVLCLFTSLEASLAFGEFAYSILTPFLNNPEKTGDQVYVDEEDNIEGEVEYYLVNPLDISIDDIGKKVIEHGGLVIPAHD

SEQ ID NO: 32891 - DNA, 387 bp, Unknown
  Obtained from environmental sample
  misc_feature (1)..(387): n is a, c, g, or t
gtgatgaaactgctcttggacacacacaccgccctttggctagcaaacaagtacgaaaagttgtcccccaaagcaaaatccatactgaacaacgatgaaaacacactacacctcagcatagtctcggcatgggaaatagtcatcaaaacaagtaccaaaaagctgtccgtagacggcggtatcatggcatttctagagaaaatagaagaaatgcctattacaactctagcaataaccccacggcatctggaaattttggaggccctccccttcatccaccgcgatccattcgaccgtctactcatagccattgcaaaagcagaaaacatgaccatactaacaatggacgaaaacatcagaaaatacgaagtgtcctcaatgtggtaa

SEQ ID NO: 32892 - protein, 128 aa, Unknown
  Obtained from environmental sample
  DOMAIN (4)...(127): PIN domain
  misc_feature (1)..(128): Xaa is any amino acid
MMKLLLDTHTALWLANKYEKLSPKAKSILNNDENTLHLSIVSAWEIVIKTSTKKLSVDGGIMAFLEKIEEMPITTLAITPRHLEILEALPFIHRDPFDRLLIAIAKAENMTILTMDENIRKYEVSSMW

SEQ ID NO: 32893 - DNA, 462 bp, Unknown
  Obtained from environmental sample
  misc_feature (1)..(462): n is a, c, g, or t
gtgggtcagaatcggcacgagatcccctactacgtcctcagcatggtggctatgctcctgtgcctagtggtggcgacgacgataatgggcgtgccatttcgcggctctatcatcgtcctgtgcctaatatctacccttttcatgggctgttcgcttgggttggggctatttttgtcaaccgtcatgcgaaaccaattcgacgcagcgactgctacgcttttggcagcgttcctgccctccatgctgctgggtggagtggtgtttgaaatagtctccatgccactgccgataaggataatcacccaattcatccctgcccgctattacgcaaactctctccaaacgatattccaagctggctcggtgccatcgctgctgtggaaaaattccatattcttatttgcgctgatgctgctgtggctggcactgacggccaaaaagacaaagcggacgctggagtag

SEQ ID NO: 32894 - protein, 153 aa, Unknown
  Obtained from environmental sample
  SIGNAL (1)...(30)
  misc_feature (1)..(153): Xaa is any amino acid
MGQNRHEIPYYVLSMVAMLLCLVVATTIMGVPFRGSIIVLCLISTLFMGCSLGLGLFLSTVMRNQFDAATATLLAAFLPSMLLGGVVFEIVSMPLPIRIITQFIPARYYANSLQTIFQAGSVPSLLWKNSIFLFALMLLWLALTAKKTKRTLE

SEQ ID NO: 32895 - DNA, 507 bp, Unknown
  Obtained from environmental sample
  misc_feature (1)..(507): n is a, c, g, or t
atgttgtacaggctcctgcaattaataaaaaaagagcttcaagtgctattgggcgaaaaacgctccacggccatgctcatagtgccggtcatattgcaaaccctagtgttcccattcgccgccaatatggaagtgagggggaacacggtcgctatattcaacgaggacaatggggcccagtccatcgagatagcccagcgaatatccaaggcagccgccttcacccacgttatcagcgttcacagccaaagtgagttgcaggaagccatcacaaaacagcgggccttagtcgccgtgcattttccccaagatttttcacgcgcccttctctcccaagcgaacacaaaaaaacctgcccaaatgcagatcatcttggacggcaggcgctctaacagcgggcagataggcagctcgtacgtctcccagatcatcagcggatacatcgctgaagtgtccgctaacccgcagccttccattattgtgcggaatgcctacnaccccaactga

SEQ ID NO: 32896 - protein, 168 aa, Unknown
  Obtained from environmental sample
  misc_feature (1)..(168): Xaa is any amino acid
MLYRLLQLIKKELQVLLGEKRSTAMLIVPVILQTLVFPFAANMEVRGNTVAIFNEDNGAQSIEIAQRISKAAAFTHVISVHSQSELQEAITKQRALVAVHFPQDFSRALLSQANTKKPAQMQIILDGRRSNSGQIGSSYVSQIISGYIAEVSANPQPSIIVRNAYXPN

SEQ ID NO: 32897 - DNA, 528 bp, Unknown
  Obtained from environmental sample
  misc_feature (1)..(528): n is a, c, g, or t
ttgttattgaagcaaaccactttttgcaaaaaaaaggatgtaccttccgctggttttaccgaattgaaaaattacggcagaagcggcgtaggaatgaaagtgtttcccacaaccgcctgttttaccgaacatgacgatctacccgttctgacctaccgctttttaattgaagaagccggcgcatataccgccgaaatatggacaaccccgacaaactccgtacaaaataaacgccccctgcgtttccggcttgaaagctcaccgggcggcacgcagattattaccgccgtacccgccgattttatggcgggcagtccttcggataaaagatggtgcgacggtgttcttaaccaaatacggatttctaaaatttcattagcatttgaaaagggagtgcaggaaattgcaatcggcgcgctggaggctggtcttgtgcttgaaaaaatgttggtttaccaaaatggcagggaacctctggagtcgtatttgggcccgcccaataactgcgcccgtacgggcgttttttga

SEQ ID NO: 32898 - protein, 175 aa, Unknown
  Obtained from environmental sample
  misc_feature (1)..(175): Xaa is any amino acid
MLLKQTTFCKKKDVPSAGFTELKNYGRSGVGMKVFPTTACFTEHDDLPVLTYRFLIEEAGAYTAEIWTTPTNSVQNKRPLRFRLESSPGGTQIITAVPADFMAGSPSDKRWCDGVLNQIRISKISLAFEKGVQEIAIGALEAGLVLEKMLVYQNGREPLESYLGPPNNCARTGVF

SEQ ID NO: 32899 - DNA, 972 bp, Unknown
  Obtained from environmental sample
  misc_feature (1)..(972): n is a, c, g, or t
atgatcagatcggccgagttcgttgcggcttgcagcagcggagatgacggcacaacaaaagtatcagttaccggagtaacgcttaatcaaaaaagtattaccctgactatgggcggtactgcaaaccttactgcaacggttacgcccgataacgcaacaaacaaagcggtatcatggacatcaagcaatacggcaaaagcgactgtttcaaatggcgttgttaccgccattgcggaaggtacggcgacaataaccgttactacagcggacggaggcaaaaccgcttcttgttcagttaccgtaacgcaagccggtataacaacttatgctataaccatgcagaatgacggaaacggcacggcaacagcaaacccgaaccctgccgaacagggagcggaagtaacaattaccgcgacacccaactcaggatatagttttgaaagctggcaggttgtttcaggcggcgtaacgctttcgcacagcgcagcaaatccggcaaagtttaccatgccgggcaatgcggtaacaatcaaggcgatttttgcggaaataccgcctaacactccttcccttagccttactccgccgacattcgacgatgttacaatcggatatgcggcgcagccggcgaagaatgttactattaaaaatgacgggacaggtacagcgaatataacgtccattgcgctggacagcgccggaggcacggcgtttactcttggcggtacgtcaatcacgactgtggatgccgaaggaacggcaacgtttacggtacagccaaaaaccggacttgccaccggaacttatgaaggcgctattaccgtaacctatgattcaggaaagaaagcggaagccgaaatttcatttacggtaaacaatacaacattcaatgtcgcccacgacattgaatggaacgacgccgtcacgcaatctcaggcggaggaaacaacaaaacttacgacatttacgtaa

SEQ ID NO: 32900 - protein, 323 aa, Unknown
  Obtained from environmental sample
  DOMAIN (22)...(99): Bacterial Ig-like domain (group 2)
  misc_feature (1)..(323): Xaa is any amino acid
MIRSAEFVAACSSGDDGTTKVSVTGVTLNQKSITLTMGGTANLTATVTPDNATNKAVSWTSSNTAKATVSNGVVTAIAEGTATITVTTADGGKTASCSVTVTQAGITTYAITMQNDGNGTATANPNPAEQGAEVTITATPNSGYSFESWQVVSGGVTLSHSAANPAKFTMPGNAVTIKAIFAEIPPNTPSLSLTPPTFDDVTIGYAAQPAKNVTIKNDGTGTANITSIALDSAGGTAFTLGGTSITTVDAEGTATFTVQPKTGLATGTYEGAITVTYDSGKKAEAEISFTVNNTTFNVAHDIEWNDAVTQSQAEETTKLTTFT

SEQ ID NO: 32901 - DNA, 1167 bp, Unknown
  Obtained from environmental sample
  misc_feature (1)..(1167): n is a, c, g, or t
ttgcccgatgggcgcaccgtgacatattacgccttggatataaacggcaaaatgcgtgaagctgtacctgtggaaaaagcaaaggcaacggaagtttttgaggaaatagaacagaggcaggttgacccgggtttgctggaaaaggttgagggcaacaattttcgcacacgtatttatccaatcccagcaggcggaatacgcaccatttcaataggctacgaagaagaattgcagcttgaaaataatttgctgcattaccgtttgccaatggcttatcccgatacgctggagaaattcgcagtaaaagcgactgtttggaaaagcagcctaaaacctcttgtgccagaatccgaagaagaactccgctttgatgcagcgggcgaaaactatgttgccttctttgcccgcgaaaattacaagccttcacgggcattgattttcgcattgccagcccccgccgatattccaagtgttatgatgcaaccagctcagggcagttattattttttggcatctgttgcaccaaaaatggaaacgcgaaaaaaacaatgggacggcaatttggcaattatttgggacgtttcacttagcggctcgcaacgtaatttgcaacgtgaaattgaaatgctggatattattttctccgaaaagaaaaatgcaaatatacatctttattttttaaacaatacattgaaaaaaataaccaagggtaattggaaagaattgaagagcattttggaaatggcagtttatgacggtggcacagatttttcaaaaataaatttgaaagatattgaagggaatgagattttatttttctccgatggaatttcaactttgagcgatgccgattttttgaaaaataccaattcaaatcgccctgtgcatagcatagtttcttctgcaaaatccgattacagcgcgatgaggttgattgctggcaaaacaaagggcaaattcataaatatcaacgctttatccaacgaagaattgaaaaacgaattgctgaacgaaactctgcaatttttgggaattgagggtggaaatgctgtacgcgaggcatatccgagcatagcaactcctgttcataataatttttctgtggctggcatttctgagacaaatgaaactgaactcacgctgctttttggtttggaaataagatga

SEQ ID NO: 32902 - protein, 388 aa, Unknown
  Obtained from environmental sample
  misc_feature (1)..(388): Xaa is any amino acid
MPDGRTVTYYALDINGKMREAVPVEKAKATEVFEEIEQRQVDPGLLEKVEGNNFRTRIYPIPAGGIRTISIGYEEELQLENNLLHYRLPMAYPDTLEKFAVKATVWKSSLKPLVPESEEELRFDAAGENYVAFFARENYKPSRALIFALPAPADIPSVMMQPAQGSYYFLASVAPKMETRKKQWDGNLAIIWDVSLSGSQRNLQREIEMLDIIFSEKKNANIHLYFLNNTLKKITKGNWKELKSILEMAVYDGGTDFSKINLKDIEGNEILFFSDGISTLSDADFLKNTNSNRPVHSIVSSAKSDYSAMRLIAGKTKGKFININALSNEELKNELLNETLQFLGIEGGNAVREAYPSIATPVHNNFSVAGISETNETELTLLFGLEIR

SEQ ID NO: 32903 - DNA, 888 bp, Unknown
  Obtained from environmental sample
  misc_feature (1)..(888): n is a, c, g, or t
ttggagttttttaataggaaaatgctatccacaaacggcttaaaagccatcctaaaacacaatgaaacagcccagccaaatgacgatctgctgaataccctaaaagccaccgttccccagttttttgacaaggatggtaatttcaaaacagacaaatttgaagatgaattgaaaaagaacaatatcgcagaagcccgagatggctacaaattgggctttgtaggcaaggattatgcacgcctgcaagtaggtttgaaatctgaaacaatgatagttcccgataagaaacataatgctcaaccagaaaatgccaatagcggaaatatttttatcacaggagataatattgatgcgcttcgtcatttagttaatgcttacgaaaataaaataaaacttatctatatcgatccaccctataatactggcaaagaatttacatataacgataaatttgaattcagcgataaaaaactaaaatcttcattaggctattcagatgatgaaatagcccgtcttaaatctatacaaggtaaaagctcacacagcgcatggcttacgtttatgtatccacgtctaaaaatagcccaaagattacttaaagatgatggtgtgatatttgtttcaatagacgacaatgagcaagctaatttaaaattaattatggatgatgtgtttggggaagggaatttcgtagcagaaatcattgcacgaacaaatccgcgcggcagaacttttgataaatatattgcaaaaactcatgaatatcttttagtctatacaaaaaaatctaattcagaaaacgccatgtatgaaatacccaaatgtgattctgncatagctggatataatanagaagatgaaaagggcagtataggcttttggaattaa

SEQ ID NO: 32904 - protein, 295 aa, Unknown
  Obtained from environmental sample
  DOMAIN (130)...(295): DNA methylase
  misc_feature (1)..(295): Xaa is any amino acid
MEFFNRKMLSTNGLKAILKHNETAQPNDDLLNTLKATVPQFFDKDGNFKTDKFEDELKKNNIAEARDGYKLGFVGKDYARLQVGLKSETMIVPDKKHNAQPENANSGNIFITGDNIDALRHLVNAYENKIKLIYIDPPYNTGKEFTYNDKFEFSDKKLKSSLGYSDDEIARLKSIQGKSSHSAWLTFMYPRLKIAQRLLKDDGVIFVSIDDNEQANLKLIMDDVFGEGNFVAEIIARTNPRGRTFDKYIAKTHEYLLVYTKKSNSENAMYEIPKCDSXIAGYNXEDEKGSIGFWN

SEQ ID NO: 32905 - DNA, 666 bp, Unknown
  Obtained from environmental sample
  misc_feature (1)..(666): n is a, c, g, or t
ttgaaagtctgcttgcggcaagtctgcttgcagacacgctgcagacaaataacgatttacaaggcggtaaaaatgtgtcctgagccacaacttctatctatttttgtcgatggtgaacttccgtcgccctggaaagaaaaaatggacgctcatttaaatgaatgtccgtcttgcagggaaaaatttgaaaactttaaaaaacttcgcgaaatgtttaacaaaggcgcgtccgcaaaaaaaatcagtgaatcggaaatacaatcgtcaaaagaaaaaatttggcgtaacatagaagcaaaacggagctttacgccgtatcctagaatatggcggcgcaggatttccatttctattcccgccgcagcggctgctgcggtcattatcgcgctaattacgatgtttctctcaaatggcggaaatattttaaataacggattcgcaggcaaaaaagcaaaccttgacgataaatcaaacgttattctcgcagcggaagaagaaatcccgggaattatacctgcagcgacagatttaaacggcgttcttcaatatttaggcgctgacagttccgatattattattttacggcttcccgagaacagaaacttctcccgcgccggagaacccgcaataatcaaagccgctgattattcaaggagacatccgtaa

SEQ ID NO: 32906 - protein, 221 aa, Unknown
  Obtained from environmental sample
  misc_feature (1)..(221): Xaa is any amino acid
MKVCLRQVCLQTRCRQITIYKAVKMCPEPQLLSIFVDGELPSPWKEKMDAHLNECPSCREKFENFKKLREMFNKGASAKKISESEIQSSKEKIWRNIEAKRSFTPYPRIWRRRISISIPAAAAAAVIIALITMFLSNGGNILNNGFAGKKANLDDKSNVILAAEEEIPGIIPAATDLNGVLQYLGADSSDIIILRLPENRNFSRAGEPAIIKAADYSRRHP

SEQ ID NO: 32907 - DNA, 366 bp, Unknown
  Obtained from environmental sample
  misc_feature (1)..(366): n is a, c, g, or t
atgacaagaaagcgcgttattaccaaaagaaaagagcgggaacgaaaagcgtatcaacgcgccttccgcgaagatcacaggcaggaggaaaccggagagggtttacttgtaaaaaaagagacaagcgaggaagttaaaagcgcgctggaaaagctgccggataatttacgtatggtattaatattaaaagagtatgcggaaatgaattataaagaaattggtaaaacgcttggcataagcgaaggaaatgtaaaagtacgcgtatttagagccagagaacggcttgaaagtctgcttgcggcaagtctgcttgcagacacgctgcagacaaataacgatttacaaggcggtaaaaatgtgtcctga

SEQ ID NO: 32908 - protein, 121 aa, Unknown
  Obtained from environmental sample
  DOMAIN (48)...(97): Sigma-70, region 4
  misc_feature (1)..(121): Xaa is any amino acid
MTRKRVITKRKERERKAYQRAFREDHRQEETGEGLLVKKETSEEVKSALEKLPDNLRMVLILKEYAEMNYKEIGKTLGISEGNVKVRVFRARERLESLLAASLLADTLQTNNDLQGGKNVS

SEQ ID NO: 32909 - DNA, 429 bp, Unknown
  Obtained from environmental sample
  misc_feature (1)..(429): n is a, c, g, or t
ttgaaccgcattaccaactcaaacacgacaccaacatccgacgacgccgctacccacctctttacctccaaaatgaagcgtgaggggcagccgcaagcggctatcgacatcttcctacgctactacgacgcgctgcgccacggaaagaccgggtgcattacggagtccgagatcgacccggtggcggagggcggcatagccgatttcgcggacattgccgacctgcacgtaataggcgaggaggcgctcacccacaccgttgtgataaaactcaacggcgggcttggcacatccatggggctatacaccgccaagtcgctcatccccgtgaaaaacaaactctcgttccttgacatcaccgccatgcagattcgcgatctaaactcgcgcttcggcctctccataccgctcataagaagaacagtttaa

SEQ ID NO: 32910 - protein, 142 aa, Unknown
  Obtained from environmental sample
  misc_feature (1)..(142): Xaa is any amino acid
MNRITNSNTTPTSDDAATHLFTSKMKREGQPQAAIDIFLRYYDALRHGKTGCITESEIDPVAEGGIADFADIADLHVIGEEALTHTVVIKLNGGLGTSMGLYTAKSLIPVKNKLSFLDITAMQIRDLNSRFGLSIPLIRRTV

SEQ ID NO: 32911 - DNA, 714 bp, Unknown
  Obtained from environmental sample
  misc_feature (1)..(714): n is a, c, g, or t
atgaaaatagttattgatgccaaccttttcatatcagcatttttttggcaaggcaatcccaaaaaaatattctttctatccttgcttgccctagccttcagcatttcccttgcagccaaggaaaacaccagcaatagcataaaagatccccgcgatggcaaaacatacaaaaccgtaaaaataggtgaacagctttggatggcggaggttgaactacgaggcgagcggttcaagtatttttctatatttgctcttatgccagttaaacgcaagtacaaagattcggttttcacttccttgttcaaagacaagaagcgactgctggaattgtacaatgcaatagatggaacttcttacaaagaccccaacttgataaccatcaacacactggacggagttctgttcccaaacaagcagaacgacatatctttcacgatagacggcaaactggttgtgctgatagagcatcaatctagcataaatgaaaatatgcctttgcgttttctgatatatatatcgaaagtgtatgaaaagataatagaccccaaaagcatttacaagcagaatttgctcaaaattccaagacctgaattcatagttctatacaatggcatagaaaaatatccaaaagaaaagatattgaaactttccgaagcattcgagcagctcggcataaagaaagcacctgaattggaactgtcggttcgtgtgtga

SEQ ID NO: 32912 - protein, 237 aa, Unknown
  Obtained from environmental sample
  misc_feature (1)..(237): Xaa is any amino acid
MKIVIDANLFISAFFWQGNPKKIFFLSLLALAFSISLAAKENTSNSIKDPRDGKTYKTVKIGEQLWMAEVELRGERFKYFSIFALMPVKRKYKDSVFTSLFKDKKRLLELYNAIDGTSYKDPNLITINTLDGVLFPNKQNDISFTIDGKLVVLIEHQSSINENMPLRFLIYISKVYEKIIDPKSIYKQNLLKIPRPEFIVLYNGIEKYPKEKILKLSEAFEQLGIKKAPELELSVRV

SEQ ID NO: 32913 - DNA, 831 bp, Unknown
  Obtained from environmental sample
  misc_feature (1)..(831): n is a, c, g, or t
ttggtcttctcaagggtctggaagaaccggttttccaagccttcccttgtggcgggtacttcgatgggcgcaatcgtgggcggcctctacgctatcggaatgtcgccagaggaaatggagtgttttattcttgatgaatttaacattaccgattaccttgacagttttgtttttaagatagacgggccctttggccggataattcagactggacaggcgctggcgattctcgcgggcaagccgggtatagatcccgggcagagggcgcttgagcttcttgaaagccttacggcgggaaagtgctttgacgaaaccgagatacccttccgctgcaacgcggtagatttgattagcggcagggaagttatttttaactccggttctttggcgatggcaatgagggcatccatgtcgcttcctgttttttttgagccttttgactataacgggatgtgctttgtggacggcggccttttgaacaatatgcctgtgtctattgcgcgtaacgaaggctttgatcggattctggcggtaaatgtaaccaacttttctcaggctaaacctgaaaacctaagaaatgggccgcaggtgattattcgcagtatagactgctttatccatgcccaggatgaaggcggaaaagcccaggcggatttgaccatcaccattaaagcaggcgccgcgcttttttcattttacaaacaaaaggaacttatcgatgtgggaaagaaagcggtcagtgaaaatatgagcgcgctggaagattttttccactccgatttccgcttgtcgaacagaccgccggtagttgttggaaatgataatgagtaa

SEQ ID NO: 32914 - protein, 276 aa, Unknown
  Obtained from environmental sample
  DOMAIN (1)...(168): Patatin-like phospholipase
  misc_feature (1)..(276): Xaa is any amino acid
MVFSRVWKNRFSKPSLVAGTSMGAIVGGLYAIGMSPEEMECFILDEFNITDYLDSFVFKIDGPFGRIIQTGQALAILAGKPGIDPGQRALELLESLTAGKCFDETEIPFRCNAVDLISGREVIFNSGSLAMAMRASMSLPVFFEPFDYNGMCFVDGGLLNNMPVSIARNEGFDRILAVNVTNFSQAKPENLRNGPQVIIRSIDCFIHAQDEGGKAQADLTITIKAGAALFSFYKQKELIDVGKKAVSENMSALEDFFHSDFRLSNRPPVVVGNDNE

SEQ ID NO: 32915 - DNA, 894 bp, Unknown
  Obtained from environmental sample
  misc_feature (1)..(894): n is a, c, g, or t
ttgccacctatggcactgggaatttatgtgcttgagtttcatggggaacatggggtgatagaccgcagttccaccaagctctcgaaagaagcatcagattctgaaaggctcattttccggcactacgactatcttccaaaagatgttgacatggctagttccaacaccgatatgcgcgttgaactaagtctagacgagagaaattatgtttttgaccaatcaaagatacgtgaatatcgttttaaaatagatccagcagatttggcatatatgaatctttacggatataaggaagaatttatgtcagccactatgaaatttgaaggggacgactatggacaggtgggatttcgctataaaggctcatctactgctaggatgccatactgttatttccctaatagcgacacaacccaaccccccagtgccaccattaaggctagaaattgccccaaaatgtcttataaagtgaaatttacgcaatacgacgataagaagcgattttaccttatgaaaaaaattaatttgcactctttggtagcagacccaacaaagatgcacgatatgctgtcttatgggttgtatatggatatgggcattcctgctccgcgaacagcttatgccaatgtatatgtcaatgatacccttaagggactttttttggcagtggaagaaattgacggcaggtttactaaagcgagatggcccaactacggagacggaaatctatacaaagaaagatggcctaaaactgacgatgcagaatattatttaggaggtctcaaaaccaatgaaaaaccagaagacaatcctaacgtagagagaatgctgtcatattataatgctattcaatcttcaaacgagcgaggacttctcggccgatctgatcaatga

SEQ ID NO: 32916 - protein, 297 aa, Unknown
  Obtained from environmental sample
  misc_feature (1)..(297): Xaa is any amino acid
MPPMALGIYVLEFHGEHGVIDRSSTKLSKEASDSERLIFRHYDYLPKDVDMASSNTDMRVELSLDERNYVFDQSKIREYRFKIDPADLAYMNLYGYKEEFMSATMKFEGDDYGQVGFRYKGSSTARMPYCYFPNSDTTQPPSATIKARNCPKMSYKVKFTQYDDKKRFYLMKKINLHSLVADPTKMHDMLSYGLYMDMGIPAPRTAYANVYVNDTLKGLFLAVEEIDGRFTKARWPNYGDGNLYKERWPKTDDAEYYLGGLKTNEKPEDNPNVERMLSYYNAIQSSNERGLLGRSDQ

SEQ ID NO: 32917 - DNA, 687 bp, Unknown
  Obtained from environmental sample
  misc_feature (1)..(687): n is a, c, g, or t
atgaaaatgcggttcaaacttagcctttggctgatcgccgtcatggctgttgttgtaacaatagtcgccacagtactaatccgttatgcttcggggataagttattatttgagcgtcaagagtcttgggcatttaaccgcccaacgcgtcgagttctggaaaggacgggaagaaggctatatcaggacattacgcgcgctcgcaaatataatgggcgattttgaatcaattccggcggatgaaagacgggatcgctttgacgatatgctgagatcctctttggaagcggagcctcaaatggccgccatgtatacaatctggaaaccaaacgctattgacgatatggacagcttgaatataggcaggacaggttcaagcccaacgggacagtacgctccggccttcttcaaagaaaatgacgggatagaagaacgaacaagcattgatattgacagtataatcgcgcatattaacagccccaactcgaacaaagaccgcgtagataatccctcgctgtttttgataaaaggaaaatacacatatattattaaaataacggttcctgttatcaatcgccgcaccagtaaagtaacaggagctataggctgttatttgtctatcgatgcggtacaaaacatcgtagaaaagacaagaaaacaaacagtgaaatcgcctcggccaatctga

SEQ ID NO: 32918 - protein, 228 aa, Unknown
  Obtained from environmental sample
  SIGNAL (1)...(30)
  misc_feature (1)..(228): Xaa is any amino acid
MKMRFKLSLWLIAVMAVVVTIVATVLIRYASGISYYLSVKSLGHLTAQRVEFWKGREEGYIRTLRALANIMGDFESIPADERRDRFDDMLRSSLEAEPQMAAMYTIWKPNAIDDMDSLNIGRTGSSPTGQYAPAFFKENDGIEERTSIDIDSIIAHINSPNSNKDRVDNPSLFLIKGKYTYIIKITVPVINRRTSKVTGAIGCYLSIDAVQNIVEKTRKQTVKSPRPI

SEQ ID NO: 32919 - DNA, 522 bp, Unknown
  Obtained from environmental sample
  misc_feature (1)..(522): n is a, c, g, or t
ttggtaaataagattcacgacgtgattcttaaggagacgcaaaacatcgcccttatcgggatgcccggctgcggaaaaagcaccgttggccgtctcctcgcccaggcgatggggcgtccgttcacggatattgacaggcaaattgaggcggccgccggaaagagcatacccaaaattttcaccggggatggggaagaagcattccgccagctggagacgcgcatactcggtgaggaaaccaaaaagagcggtatagttatcgctaccggcggcggtgtagtaacgcagcaagaaaatctggatctgttgcagcaaaacagtataattgtttatctgaaacggaagctaaacgagctggttacagacggcaggccgctgtcccgtggcattgggattcagactctcgccgaacagcggctgccgttatacgaaacgtggagcgattgcgccgttcaggtggaagctaaaccggagctgacggcggtgcggattcaggaagtaattagagatatttggccttaa

SEQ ID NO: 32920 - protein, 173 aa, Unknown
  Obtained from environmental sample
  DOMAIN (22)...(169): Shikimate kinase
  misc_feature (1)..(173): Xaa is any amino acid
MVNKIHDVILKETQNIALIGMPGCGKSTVGRLLAQAMGRPFTDIDRQIEAAAGKSIPKIFTGDGEEAFRQLETRILGEETKKSGIVIATGGGVVTQQENLDLLQQNSIIVYLKRKLNELVTDGRPLSRGIGIQTLAEQRLPLYETWSDCAVQVEAKPELTAVRIQEVIRDIWP

SEQ ID NO: 32921 - DNA, 903 bp, Unknown
  Obtained from environmental sample
  misc_feature (1)..(903): n is a, c, g, or t
ttgaaagcggcggaacttaaaaacgcggttaaagtgatagaagaaaacataactctgcttgcgcagacccttgacggaataacgctgttgggcgaattatctttgcgcagtaaagatttggttatgagtttcggggaaaggttaagcgcaaacctgatagcgtcaatttttacagctaatggtattaaagccttatttttggacgcgcgggaacttgtaaaaacaaacgccaatttcggaagggcggaagttttaaaaaaggaaaccgaagataacatcaaggcttattttagaaaagctaagaaaacattgcagattgttacgggcttcatcggctctacggcggacggatatacaaccactgtcgggcgagacggctccgatttaagcgccgctgttttcgccgccgccctaggagctaagaaactcgagatttggacggacgtagacggaatgttaacagccgatcccgaacaggttaaaaacgctttcctcatagatgaaatttcttataacgaagcgatggaaatttcccacttcggcgcgagggtaattttcccgccgtcggtcaaaccggcgctggaaaaaaacattcccatttttgtacgcaatacgtttaatccaaaatgcggcggtacaaaaattaccgctaatgccgcgccgggtaaattcccaatcaggggaataagctccataaaccaaaccgctcttgtaaggattcaaggaaccggcatggtcggagtagcgggattttccgcgcgcgtattcggcgctctcgcaagaaagggaatcagcgttatgctgattactcagagttccagcgaatactcaatctgtttcgctatactgccggaagacgcgcagtcggcgggaggtggctttaaaggaagaatttgcgaatga

SEQ ID NO: 32922 - protein, 300 aa, Unknown
  Obtained from environmental sample
  DOMAIN (1)...(204): Amino acid kinase family
  misc_feature (1)..(300): Xaa is any amino acid
MKAAELKNAVKVIEENITLLAQTLDGITLLGELSLRSKDLVMSFGERLSANLIASIFTANGIKALFLDARELVKTNANFGRAEVLKKETEDNIKAYFRKAKKTLQIVTGFIGSTADGYTTTVGRDGSDLSAAVFAAALGAKKLEIWTDVDGMLTADPEQVKNAFLIDEISYNEAMEISHFGARVIFPPSVKPALEKNIPIFVRNTFNPKCGGTKITANAAPGKFPIRGISSINQTALVRIQGTGMVGVAGFSARVFGALARKGISVMLITQSSSEYSICFAILPEDAQSAGGGFKGRICE

SEQ ID NO: 32923 - DNA, 645 bp, Unknown
  Obtained from environmental sample
  misc_feature (1)..(645): n is a, c, g, or t
gtgggattgatacgttccccgatgatgaccagcggcgcctcgccgccgacgggcacaagccgggcgcgcgtggtcagcgtaacgccgtgcgtgatggcggcttcgggccgccggcgttgtacgccgtcaagcttgcggcgcagggcggcaatatgttcgggcgtcgtgccgcaacagccgcccaaaagctgtattcccgccgcggcaaaggctgccgtctgctcggcgaaggcttccggcggcaggcggaagacggtggcgccgttcaccagttccggcaggccggcgttgggttcggccagcaccggaatacgggcgcaggcaagcagctcttccgccacggggcgaagttgttccggccccgcgccgcaatttgtgcccagcgcgtccaccccgaggttgagcatggtctgcgcgaaaatttccggatcggaaccggtcaggctcactccccgttcaaaggtcatggaaaccagtacgggcaggtcgcattccatccgcgcggcgacgacggccgcgcgcgcttccgccagatcgaactgggtttcgataaaaatgcagtccaccccgccttgcacaaggccgcgaatctgcgcgcgaaacgcttccacgagatcaaggggttccaactcgcccaggggttga

SEQ ID NO: 32924 - protein, 214 aa, Unknown
  Obtained from environmental sample
  misc_feature (1)..(214): Xaa is any amino acid
MGLIRSPMMTSGASPPTGTSRARVVSVTPCVMAASGRRRCTPSSLRRRAAICSGVVPQQPPKSCIPAAAKAAVCSAKASGGRRKTVAPFTSSGRPALGSASTGIRAQASSSSATGRSCSGPAPQFVPSASTPRLSMVCAKISGSEPVRLTPRSKVMETSTGRSHSIRAATTAARASARSNWVSIKMQSTPPCTRPRICARNASTRSRGSNSPRG

SEQ ID NO: 32925 - DNA, 540 bp, Unknown
  Obtained from environmental sample
  misc_feature (1)..(540): n is a, c, g, or t
ttgagggttgcagccgtctttctccgcagattgtgtaaattggtttatgagtttgcggaaaagggcggggtaggggacgacgtcaacgcccgcgtccgccacaagaccgtcaaaaaagttacaagcgacctcgaagccatgaagttcaacaccgcaatcgcggcgatgatggaatttgtcaatgtcctcacctcaaacggcgcgtcaaaagaggatttaactgcgttcgtcaagctggtaagcccctacgctccccatctgggcgacgaattgtgggagaagctcggcggaaaagggttcatagtcaacgcggaatggccgaagtgggacgaggctatgacgctcgacagcgtggtcaccgtggtggtgcaggtcaacggaaaactgcgcggagatttccaagcggcgcacgacgccggtgaggaagagttgaaagcggcggcgatggcggttgagaaggtcaagccgtttatcgacggaaagacggtgaggaaagtcgtggtcgttcaggggaggctggttaatatcgttgtggggtag

SEQ ID NO: 32926 - protein, 179 aa, Unknown
  Obtained from environmental sample
  DOMAIN (27)...(147): Anticodon-binding domain
  misc_feature (1)..(179): Xaa is any amino acid
MRVAAVFLRRLCKLVYEFAEKGGVGDDVNARVRHKTVKKVTSDLEAMKFNTAIAAMMEFVNVLTSNGASKEDLTAFVKLVSPYAPHLGDELWEKLGGKGFIVNAEWPKWDEAMTLDSVVTVVVQVNGKLRGDFQAAHDAGEEELKAAAMAVEKVKPFIDGKTVRKVVVVQGRLVNIVVG

SEQ ID NO: 32927 - DNA, 333 bp, Unknown
  Obtained from environmental sample
  misc_feature (1)..(333): n is a, c, g, or t
atgaccgtagtcgctcacgaaatagaagacgatttgaacgcgctgaaagaaattattcttgaaaacgtgcctaccgaccaaatttggctcttcggctcttacgcctacggcactccgcatgaagattccgacattgacgtatacattgtcatgaaagacgacgctaatatgctggaatccgaggctatgacggctgtaaataccgcccgctgcatgaaagtctttaaacctgtggatgtcttagccatgaaaaagaaccgcttctcgtaccgccaaaacggacaaacgctggagagcgcagtcgtaaaaagaggcgtaaaaatatatggatag

SEQ ID NO: 32928 - protein, 110 aa, Unknown
  Obtained from environmental sample
  DOMAIN (8)...(108): Nucleotidyltransferase domain
  misc_feature (1)..(110): Xaa is any amino acid
MTVVAHEIEDDLNALKEIILENVPTDQIWLFGSYAYGTPHEDSDIDVYIVMKDDANMLESEAMTAVNTARCMKVFKPVDVLAMKKNRFSYRQNGQTLESAVVKRGVKIYG

SEQ ID NO: 32929 - DNA, 711 bp, Unknown
  Obtained from environmental sample
  misc_feature (1)..(711): n is a, c, g, or t
atggcacggaaaatcctcctcattatcctcattttcaccgcttttttggcctgggcgcagcagcacgatccggggttctatcccgatactatgcgcggggaggtttggatagagcttgagccgatttacggcgacaggccggacgtcgaatatcccgtaagcatggagaccgccggcaggcgcgccctgcaggaagccgccctgtactattccgccatgatctacggatggtccttccattatgacataggggagagagcgaggggtataaaggaagattttgacgtttttgagccgatgggcgagatacgctggggcgacacccggctgaccgtaaccgaggtggaactccgcgacgattcccaactgcgggtctggaccgattaccgcatgagcgatttacaggcgaagcgggtacaaatgtggcggacggggacagtccgtaacgcgcaggctgtcggctactgccccataaccggccccacacccgattcaggatggctggaaattcgcgccgccgtcctgaaagacgccgcccgcgccgccgtacgccagatactccgtggcagcgagcgcaaccgccccaaggaggcggtcggctttatcagccttgcctctttcccccgcttttttgtcgactccggcaaatgggccgcctccgtccgcttccgtatacagatcaacgagattatacccttcgcggcttattaa

SEQ ID NO: 32930 - protein, 236 aa, Unknown
  Obtained from environmental sample
  SIGNAL (1)...(19)
  misc_feature (1)..(236): Xaa is any amino acid
MARKILLIILIFTAFLAWAQQHDPGFYPDTMRGEVWIELEPIYGDRPDVEYPVSMETAGRRALQEAALYYSAMIYGWSFHYDIGERARGIKEDFDVFEPMGEIRWGDTRLTVTEVELRDDSQLRVWTDYRMSDLQAKRVQMWRTGTVRNAQAVGYCPITGPTPDSGWLEIRAAVLKDAARAAVRQILRGSERNRPKEAVGFISLASFPRFFVDSGKWAASVRFRIQINEIIPFAAY

SEQ ID NO: 32931 - DNA, 1095 bp, Unknown
  Obtained from environmental sample
  misc_feature (1)..(1095): n is a, c, g, or t
atgaagaaagcatattacatagggctggatgtccacaaggaaaatacccagatggcagttttggatacaaaagggaaagggccggtggaaataaaagtcattgacagcgatccaatgaaagtagcaaaggcgatactgccgtaccagaaagaaggggcggcacatgttgcttatgaggcagggtgcatggggtatacgctttaccgcgtattaacgggaatgaaaatcgactgccaaataatagcgccgaataaagtgtttcgaggagggaacagcgagaagataaaaacagacaaacgggatgcaatggcgatagcatggatgctccgcagggatgagggagcgggtatagcggtaccggccagggaagacgaggcggcgcgggatttattgcggtgccggggcgacatgcaggacgatttgaagcgggcaaaacagcgccttcttaagtttttgcttcggcaggggcatgtctatgagaatacccgatactggacagggaaacaccggaagtggatgaaaacacttgcatatgatatgccggtggacaaagcggtatttgaacagtatctatacacgatagaaagcattgaggaacggatagcccgcattgatctgcagataaaagaaatagcggaaagtccccgatatgcggaacttgtgagaaagtttcgggctttcaaaggtgtagattaccttattgcattgtcgctggtatgtgagataggagattttaaacggtttcccacggcgggggcatttatgtcgtacattgggcttgtaccgagcgaatactcaagcgggaacaaacggaaacaggggggaatcacgaaaaccggtaacgggcatatacggaaactactgaccgaagcggcatggcattatacccgtcctgtaaaggcaagcatacggctggccgaacgaagagccggaacgccagaaacggttatttcgtatgcggacagggccctgaaccggctacatggcaaatatgtaaaactgctgtttaaggggaaatcaaaacaggcggctgtaacggcagtggccagggaactgtcaggttttctttggggcgtgatgaccgcagtagcgtaa

SEQ ID NO: 32932 - protein, 364 aa, Unknown
  Obtained from environmental sample
  DOMAIN (197)...(309): Transposase IS116/IS110/IS902 family
  misc_feature (1)..(364): Xaa is any amino acid
MKKAYYIGLDVHKENTQMAVLDTKGKGPVEIKVIDSDPMKVAKAILPYQKEGAAHVAYEAGCMGYTLYRVLTGMKIDCQIIAPNKVFRGGNSEKIKTDKRDAMAIAWMLRRDEGAGIAVPAREDEAARDLLRCRGDMQDDLKRAKQRLLKFLLRQGHVYENTRYWTGKHRKWMKTLAYDMPVDKAVFEQYLYTIESIEERIARIDLQIKEIAESPRYAELVRKFRAFKGVDYLIALSLVCEIGDFKRFPTAGAFMSYIGLVPSEYSSGNKRKQGGITKTGNGHIRKLLTEAAWHYTRPVKASIRLAERRAGTPETVISYADRALNRLHGKYVKLLFKGKSKQAAVTAVARELSGFLWGVMTAVA

SEQ ID NO: 32933 - DNA, 678 bp, Unknown
  Obtained from environmental sample
  misc_feature (1)..(678): n is a, c, g, or t
ttggaacggcttaaaattcttgaggaaaatcatgctgaagctgtacttaccggagtgaacatctgccaatacagcgataaacctgatgcaggcaggttgacagctaacaatcttggcggacttttggaatatctgctatgcgggactgtaaatatttcactgcggctttcctcgctggagccggacagcataaatgaaaattttataaaaattctgtctcataaacggataaggccgcattttcacctgtcagtccagtccggcagtgaagaaattctagaaagaatgggacgcaattataatgccaaaacagtagtaaacgccgttacccttctgcgccgcgtaaaggatgatccctttcttgcctgcgatataattgcaggctttcccggtgagacagaagttgaatttaagaaaacttttgaaatgtgcaaagaaattgattttgcatggattcacgtatttccttattccaaaagggacggcactgcggcctccttgtttcaagattctgtaaaagataaagaagtattaaatcgtgtacgtctgttaacggatttggcatggtcaggcagagctgaatatgttcgacgctggctcggacgtgaaacagaggtattaatagaaaaagngcggaacatccgatgcttaccgaggaatttcacaaaattaccttaa

SEQ ID NO: 32934 - protein, 225 aa, Unknown
  Obtained from environmental sample
  misc_feature (1)..(225): Xaa is any amino acid
MERLKILEENHAEAVLTGVNICQYSDKPDAGRLTANNLGGLLEYLLCGTVNISLRLSSLEPDSINENFIKILSHKRIRPHFHLSVQSGSEEILERMGRNYNAKTVVNAVTLLRRVKDDPFLACDIIAGFPGETEVEFKKTFEMCKEIDFAWIHVFPYSKRDGTAASLFQDSVKDKEVLNRVRLLTDLAWSGRAEYVRRWLGRETEVLIEKXRNIRCLPRNFTKLP

SEQ ID NO: 32935 - DNA, 744 bp, Unknown
  Obtained from environmental sample
  misc_feature (1)..(744): n is a, c, g, or t
atggtactggcaaaggacagcctcaggatcaaacgcaagatcgtcagccgtcttcttgagggcgggcttttcccatacaccaggcgctaccttaaaaacctggataatcactttagcaccatagggcttgtgggaatgaacgaatgcctcttgaatttcctgggcagggaattcaccatagccaccgacaggggccgctcctttgcacttgaggttttgggctttatgcggaataagctcgcggactttcaggaagaaacaggagagctctttaaccttgaagccaccccggccgaatccacatcttacaggcttgccaggcacgacaagaaaaaatacccgcgtattatcagcgcaggcagggacgagccttactatacaaactctacccaactgccggtaatggaaaccgacgacattttcgaagccctggatctgcaggaaaagttgcaaactgcctataccggcggtactgttttccattgctttctgggggaagctattgaagactggcgggtatgcagggatcttgtcagaacaatagccggcaagtaccgaattccctattttacaatttcgcctaccttctcggtgtgcccagtacacggatacctgaagggcgagcatttttactgcccaaaatgcagggaaaataaagaaaacgaactccgcgaaaagatagcggtattggaagaagagcggtcggctgccaaggcagccgttatggcggccgcagttttgtga

SEQ ID NO: 32936 - protein, 247 aa, Unknown
  Obtained from environmental sample
  misc_feature (1)..(247): Xaa is any amino acid
MVLAKDSLRIKRKIVSRLLEGGLFPYTRRYLKNLDNHFSTIGLVGMNECLLNFLGREFTIATDRGRSFALEVLGFMRNKLADFQEETGELFNLEATPAESTSYRLARHDKKKYPRIISAGRDEPYYTNSTQLPVMETDDIFEALDLQEKLQTAYTGGTVFHCFLGEAIEDWRVCRDLVRTIAGKYRIPYFTISPTFSVCPVHGYLKGEHFYCPKCRENKENELREKIAVLEEERSAAKAAVMAAAVL

SEQ ID NO: 32937 - DNA, 609 bp, Unknown
  Obtained from environmental sample
  misc_feature (1)..(609): n is a, c, g, or t
atgatcagatcgacgaggctgggcttccgcgatataaaccgcgctttacaggaaatgggcaattcaaagattatttccgtaatttcggcaggcgcgcagccgatacgagagaggcacgaaccttctcttgaaaacgcggccagaggaacagcttcttcttacagccagcgctggcgttttgacatgtctcttcgtcttgccgcgacagaccttttaagcgctgccccaaaacgttctgttgtgtacattggaagcggagacattggagagcttgcgtttgaacagtacagtctttctgaaatggcaagttatcttgcaaataacggcatagcgtttaacgcgattattgtaggctcgggtcaggtaacagatgcggttgagtatttgtgcagacaaacaggcggcagagcgatgcgcctgtaccgtccaagaggcattggagagcttataaagggtatagcggaaactccctgcgggctttacagttttacatatacttcgcgccttcagtctgattttggcatggcatggcttcctgttgaagcggaagtttatctcttggaaagatcagggcgcgacaataccggatatttttcgccgcttaattaa

SEQ ID NO: 32938 - protein, 202 aa, Unknown
  Obtained from environmental sample
  misc_feature (1)..(202): Xaa is any amino acid
MIRSTRLGFRDINRALQEMGNSKIISVISAGAQPIRERHEPSLENAARGTASSYSQRWRFDMSLRLAATDLLSAAPKRSVVYIGSGDIGELAFEQYSLSEMASYLANNGIAFNAIIVGSGQVTDAVEYLCRQTGGRAMRLYRPRGIGELIKGIAETPCGLYSFTYTSRLQSDFGMAWLPVEAEVYLLERSGRDNTGYFSPLN

SEQ ID NO: 32939 - DNA, 576 bp, Unknown
  Obtained from environmental sample
  misc_feature (1)..(576): n is a, c, g, or t
atggcggcgcgcggaatgaacattgacgctgtacatttccacgcttatccctacacttcaaatgaagcaaaacaaaaagctgtcagccttgccgaaattgtctcttcttactgcctgggtctccgcatttttattttaaactttacgcaaatacaagtgcgtattaaagaaagcgcggattcacaatggcttaccgttcttttacgaatggcaatgatggaagcggcggaaaaagccgctttaaaaataaaaagtaaatgtcttataacaggagaaagcctttcgcaggttgcaagccagacaatagaaaatttgacatgcacacagagcaggataaaacttcccgttcttcgtccccttatcggcatgaacaaggaaagcattatcagcgaagcgcggcgcatcggcacttatgaaatttcaatactaccctttgttgactgctgcacgcttttcagcccaaatcatcctgtgttatacggagatccagaacaggcaaacgcgttatacgaaaaactgacgcttgcgcccttgatcgatgaagcgctggcaaactgcgaaattatcagattgtaa

SEQ ID NO: 32940 - protein, 191 aa, Unknown
  Obtained from environmental sample
  DOMAIN (1)...(175): Thiamine biosynthesis protein (ThiI)
  misc_feature (1)..(191): Xaa is any amino acid
MAARGMNIDAVHFHAYPYTSNEAKQKAVSLAEIVSSYCLGLRIFILNFTQIQVRIKESADSQWLTVLLRMAMMEAAEKAALKIKSKCLITGESLSQVASQTIENLTCTQSRIKLPVLRPLIGMNKESIISEARRIGTYEISILPFVDCCTLFSPNHPVLYGDPEQANALYEKLTLAPLIDEALANCEIIRL

SEQ ID NO: 32941 - DNA, 849 bp, Unknown
  Obtained from environmental sample
  misc_feature (1)..(849): n is a, c, g, or t
ttggggatcaagggattgggagaggcgtctgcgcaggaaattgtaaacggaagaaaggacggacaatataaaagttttttggatttccttgatcgtgtggacatcaaggcggttggcaagaaagttatcgaacttctcgtgcagacgggggcatttgacagtttgggcataacgcgggaaacacttgcgggcaatcttgagagatctgtggaatttgcgcttaaaaagaaagaagacagacttaaagggcagacgagcctctttgaagattcagatgaacctgaattcggcgaatataagtttgaagagtttcctgcaaaaagcagggaagaaaggttaaaccttgaaaaacagcttatgggtttttatttttcaggacatcctatggacgagtacagggaaatatggcagcaagcggtaaatattaaccttgggcaggttgaaacttataaaatagggaactgcgttcttgttggaattatcaaaaatgtaaaaacaataatgaccgccaagggtagcaaaatggcatttgcggttcttgccgactacaacggtgaaattgaagtaacgtttttttcaggaacatggcagcggtatgaaaatgagattgaaaatgacaaggtggtgatcttaaagggaaagatagattatcaaaaagacaaggataaatatacatttattgcggacagtattgtcagaaagaatgatgtcggtacgattgtagaagaagttaaagaaattgaagataaattcaatgttcacaaaaatacatggctttatatggcggatctaaaaagttcattcattaaccatgcgaaaaaaggcagttatacgattataggtacttaa

SEQ ID NO: 32942 - protein, 282 aa, Unknown
  Obtained from environmental sample
  DOMAIN (155)...(234): OB-fold nucleic acid binding domain
  misc_feature (1)..(282): Xaa is any amino acid
MGIKGLGEASAQEIVNGRKDGQYKSFLDFLDRVDIKAVGKKVIELLVQTGAFDSLGITRETLAGNLERSVEFALKKKEDRLKGQTSLFEDSDEPEFGEYKFEEFPAKSREERLNLEKQLMGFYFSGHPMDEYREIWQQAVNINLGQVETYKIGNCVLVGIIKNVKTIMTAKGSKMAFAVLADYNGEIEVTFFSGTWQRYENEIENDKVVILKGKIDYQKDKDKYTFIADSIVRKNDVGTIVEEVKEIEDKFNVHKNTWLYMADLKSSFINHAKKGSYTIIGT

SEQ ID NO: 32943 - DNA, 516 bp, Unknown
  Obtained from environmental sample
  misc_feature (1)..(516): n is a, c, g, or t
atggcattcggtacattacaggattttgaaggcgacattgatcttgttttcttctccagagtttattccgaatgtaaaactcttttgaatcttgatgaaattatagcttttaagggaaatatagaccctgaaaacgagcgcgacccgcaaaaaataagttttaaggtttccagtatcgcggatttcgcgcagctaacccgcgccgccgccagaaaagccgccgcgggggaagcgcctccttcgcgtaatgtcgaagagaagaaagcggtagaaaaaccgcaggaagaaattcacataaaattggcggaaggagcggctgacaatgaagaaaacctgattccgttacgcgattatctggcggaaaacacgggctcttgcgtaatatttcttcatattccggtattgggaaaagaaaggataatacgcgcgttttcgggcgtggaaatttcaggcggtattgatgtaattgaagaaataaaaaaatgcaagtgtgtagatagcgtatggaggaagtaa

SEQ ID NO: 32944 - protein, 171 aa, Unknown
  Obtained from environmental sample
  misc_feature (1)..(171): Xaa is any amino acid
MAFGTLQDFEGDIDLVFFSRVYSECKTLLNLDEIIAFKGNIDPENERDPQKISFKVSSIADFAQLTRAAARKAAAGEAPPSRNVEEKKAVEKPQEEIHIKLAEGAADNEENLIPLRDYLAENTGSCVIFLHIPVLGKERIIRAFSGVEISGGIDVIEEIKKCKCVDSVWRK

SEQ ID NO: 32945 - DNA, 309 bp, Unknown
  Obtained from environmental sample
  misc_feature (1)..(309): n is a, c, g, or t
atggaggaagtaatgcgaataattttcagcattttatcaacggcggtaaatatttatataattttaatatttatccgtattattatttcatggtttataagcgatggcgagtcaaaaccgctggattttttacgttctataacagatccgtatattgactggtggcgtaacaaattatatttgcgccttggttttctggacctttcccctcttgtaggagtagttgtcctttctatactaaggataatattattcaaaatatcacaatcagaaaggatcactataggaaacattctcggccttatttaa

SEQ ID NO: 32946 - protein, 102 aa, Unknown
  Obtained from environmental sample
  DOMAIN (5)...(87): YGGT family
  misc_feature (1)..(102): Xaa is any amino acid
MEEVMRIIFSILSTAVNIYIILIFIRIIISWFISDGESKPLDFLRSITDPYIDWWRNKLYLRLGFLDLSPLVGVVVLSILRIILFKISQSERITIGNILGLI

SEQ ID NO: 32947 - DNA, 615 bp, Unknown
  Obtained from environmental sample
  misc_feature (1)..(615): n is a, c, g, or t
atgtgtagcggaagtctggaggaaataatgcagatgatatttggttttttggggatactggttggaatttattcagtattaatattgatacgcataataatctcatggttcggcagttttactgaaagtaaacctgtagatattatatgcagtataacagacccttaccttaactggtggcagaataaattcagtatacgaatcggcgttctggatttttccgcagtattggcaatagtaagcctttcctttattcaaaatatattattttctctcgcgtattttgacagaattacaatcgggtatttcctttcaatacttttattgtctgtatggtctgttctgtcatttataattggtttttgtattatcatcgttgtactcaggttaatcgcgtatcttacaaaccgcaatatttacagtcccttttggcggataatcgattcaatttcacaaccgttattgtacaggatgaaccgtattttttacggaaaacgaatcggcagttttcttaacggaattatttttacgcttgttttattggtagttgcgtggataggcggaagttttatttttccgaggattgcgaaactgctttcaagtttaccgttgtaa

SEQ ID NO: 32948 - protein, 204 aa, Unknown
  Obtained from environmental sample
  DOMAIN (10)...(92): YGGT family
  misc_feature (1)..(204): Xaa is any amino acid
MCSGSLEEIMQMIFGFLGILVGIYSVLILIRIIISWFGSFTESKPVDIICSITDPYLNWWQNKFSIRIGVLDFSAVLAIVSLSFIQNILFSLAYFDRITIGYFLSILLLSVWSVLSFIIGFCIIIVVLRLIAYLTNRNIYSPFWRIIDSISQPLLYRMNRIFYGKRIGSFLNGIIFTLVLLVVAWIGGSFIFPRIAKLLSSLPL

SEQ ID NO: 32949 - DNA, 468 bp, Unknown
  Obtained from environmental sample
  misc_feature (1)..(468): n is a, c, g, or t
atgtttatctatcggatatcgatttttttaattttagtcaaaaacaaatcaaaaaaagtaaaaatgactgatccaattgcagatttgttgactcgaattcgtaacggtatcatggcgcgacaccgcgtcgttgattgtccggcgtcgaatatcaagaaaaatatcgtaaagatacttttcgagaagggttacattctaaattataagttcgaggaagcaggcgaaggacgtccgcagggaaatatcaaaatagccctgaagtacaatcccgaaacaaaacagcctgctatcaaatccatacagcgcgttagccgtccgggattgcgcaagtatgtgagtcatgcagaccttccgcgagtgctcaacgggttgggcatcgccgttatttccacatcgcacggagtaatgaccgacaaggaagcgcgtgttaataatgttggcggcgaagtaatttgttacgtttattaa

SEQ ID NO: 32950 - protein, 155 aa, Unknown
  Obtained from environmental sample
  DOMAIN (24)...(155): Ribosomal protein S8
  misc_feature (1)..(155): Xaa is any amino acid
MFIYRISIFLILVKNKSKKVKMTDPIADLLTRIRNGIMARHRVVDCPASNIKKNIVKILFEKGYILNYKFEEAGEGRPQGNIKIALKYNPETKQPAIKSIQRVSRPGLRKYVSHADLPRVLNGLGIAVISTSHGVMTDKEARVNNVGGEVICYVY

SEQ ID NO: 32951 - DNA, 621 bp, Unknown
  Obtained from environmental sample
  misc_feature (1)..(621): n is a, c, g, or t
ttgatgaaaatcgcgaacattcttactttttgccggattttttgcgccccggtatttttcgcgctgtattctttaccgacttggttcccaaagttccccatcttagccgaattttcggtacattttatgattccgctccttcttttggcggaatttaccgactaccttgacgganaattcgcgcgggataataaccaggtgagcaattttggcaaaatattcgatcccttcgccgatgtctttctgaatttaactgtctttttctgcctggccatgagcgcttacatgccgccggtggttttcttattgatcgtgtaccgcgaaataagcattacctttataagattggttgccatgcagagaggcgtggcaatcggggcgcgaaaaggggggaagataaaaacggtgctgtatatagtttcaggttttttcgccctttttgtggagagcgctttgcgccttgggctttttaacaatgattatttcatttttaagaattttaagaccatcagtctggcgctttttatcatttgtttgatagtttcttacgtttcatttgctgattattttatcaatttcagaagtatattggtaagtaaggacaaaacacaacaaagttaa

SEQ ID NO: 32952 - protein, 206 aa, Unknown
  Obtained from environmental sample
  DOMAIN (44)...(184): CDP-alcohol phosphatidyltransferase
  misc_feature (1)..(206): Xaa is any amino acid
MMKIANILTFCRIFCAPVFFALYSLPTWFPKFPILAEFSVHFMIPLLLLAEFTDYLDGXFARDNNQVSNFGKIFDPFADVFLNLTVFFCLAMSAYMPPVVFLLIVYREISITFIRLVAMQRGVAIGARKGGKIKTVLYIVSGFFALFVESALRLGLFNNDYFIFKNFKTISLALFIICLIVSYVSFADYFINFRSILVSKDKTQQS

SEQ ID NO: 32953 - DNA, 1143 bp, Unknown
  Obtained from environmental sample
  misc_feature (1)..(1143): n is a, c, g, or t
gtgggaacgcggctcaggcgaaactcaggccagcggaaccgccgcctgcgcttcggctgtggccgctgtgctgaacggttactgcggcaaggacacggacatcaaggtgcaactgcccggcggggacttaaccatccgttacacagacgaggccgtgtacatgaccggcgactgcataaaagttttcgatggaacggtggagatatgagcgagctggtactggtacttgattttggcggtcagtataaggagcttatcgcgggaacggtcaggaacctgtccgtatactcgcagataatgccgggcaataccccgcttgatgaaatcaaactgttaaaaccagtaggcattatcctgacaggcgggccgaacagcgcataccaaagcgactcgcccaaatgcgaccccgaaatcttttcattgggcattcccatactcggaatctgctacggaatgcatttaatgtgtcatacgctgggcggcaaggttgcgtcaggagatacaggcgaatacgggcgcgtcaaggtaacgcccgtactcacatcgtcaaagttattcaaaaagaaaaaagatccctttacagcgctgatgagccataaagacgccgtaaaaaatctgccggaagggtttcgcgtaacggcaaaaagcgcagtctgcatagcggcctgtgaggacaaggcaaaaaaactttacgctgtgcagttccacccggaaacaaaacacaccaagggcggacgtgaaataataaaacggtttttatatgatatttgcggagcgtccggcgattataaactcggtgattatatagacacacaaattaaacaaatacgggaaaaggtcggcgataaaaaagtactgctcgccctgtccggcggggttgattcatcggtatgcgcggggcttttatcaaaagcgatacccggacagcttacctgcatatttgtagatcacggtcttatgcgcttaaacgaaggcgatgaaatagagagcgcgtttttaaaacgaaacctcaacttcatccgcgtaaacgcgcaaaaacgcttcctcgccaaattggagggcgtaacagagcccgagaaaaagcgcaaaataatcggcgaggaatttatccgcgtgttgaggaagaatccctcggccatctga

SEQ ID NO: 32954 - protein, 380 aa, Unknown
  Obtained from environmental sample
  DOMAIN (72)...(238): Peptidase C26
  misc_feature (1)..(380): Xaa is any amino acid
MGTRLRRNSGQRNRRLRFGCGRCAERLLRQGHGHQGATARRGLNHPLHRRGRVHDRRLHKSFRWNGGDMSELVLVLDFGGQYKELIAGTVRNLSVYSQIMPGNTPLDEIKLLKPVGIILTGGPNSAYQSDSPKCDPEIFSLGIPILGICYGMHLMCHTLGGKVASGDTGEYGRVKVTPVLTSSKLFKKKKDPFTALMSHKDAVKNLPEGFRVTAKSAVCIAACEDKAKKLYAVQFHPETKHTKGGREIIKRFLYDICGASGDYKLGDYIDTQIKQIREKVGDKKVLLALSGGVDSSVCAGLLSKAIPGQLTCIFVDHGLMRLNEGDEIESAFLKRNLNFIRVNAQKRFLAKLEGVTEPEKKRKIIGEEFIRVLRKNPSAI

SEQ ID NO: 32955 - DNA, 819 bp, Unknown
  Obtained from environmental sample
  misc_feature (1)..(819): n is a, c, g, or t
atgcacacttgcggaaacgattatatttactttaactgcttcgagatggagattaattcgcccgaatcgctgtcggtgttcctttccgacaggcataccggcgtgggcggcgacggcgtcgtgctgatactgcggtcgagcatcgccgacgcgaaaatgcggatgttcaaccttgacggcagcgaaggcagcataagcggaaacgcgatccgctgcgtcgctaaattactctacgacaacgggattgtaaaaaagcgcgaaatgcggattgagacaaagagcggcgtgaaagagctattcctctctacgcggaacggggcggtatcatccgtcaaggtagacatgggccgtgttgaactacgccccgaaaaaatccccgtcaatttaccgggagaaaacgtgatcgccagaaaagtaactatcggcggtgaagagtatgagattacctgtgtctcgatgggcaatccccacgccgtagtgtttcatgacaatctggatgatcttgatttgagcagaatagggcccctgtttgaaaacgacgctatgtttcccgaccgcgtgaacgcggaatttgtaaaagttgtagccggaaatcgcttaaaaatacgcttgtgggaacgcggctcaggcgaaactcaggccagcggaaccgccgcctgcgcttcggctgtggccgctgtgctgaacggttactgcggcaaggacacggacatcaaggtgcaactgcccggcggggacttaaccatccgttacacagacgaggccgtgtacatgaccggcgactgcataaaagttttcgatggaacggtggagatatga

SEQ ID NO: 32956 - protein, 272 aa, Unknown
  Obtained from environmental sample
  DOMAIN (1)...(121): Diaminopimelate epimerase
  misc_feature (1)..(272): Xaa is any amino acid
MHTCGNDYIYFNCFEMEINSPESLSVFLSDRHTGVGGDGVVLILRSSIADAKMRMFNLDGSEGSISGNAIRCVAKLLYDNGIVKKREMRIETKSGVKELFLSTRNGAVSSVKVDMGRVELRPEKIPVNLPGENVIARKVTIGGEEYEITCVSMGNPHAVVFHDNLDDLDLSRIGPLFENDAMFPDRVNAEFVKVVAGNRLKIRLWERGSGETQASGTAACASAVAAVLNGYCGKDTDIKVQLPGGDLTIRYTDEAVYMTGDCIKVFDGTVEI

SEQ ID NO: 32957 - DNA, 564 bp, Unknown
  Obtained from environmental sample
  misc_feature (1)..(564): n is a, c, g, or t
atggaaaactttttaactgacaacgaagatatattgttccaactggagcatcttgatctggatcgtatcattcatcttaaagaagaaaatttcagccaggcgaagcagtattcccatgcgccgaaggacgttcaggacgcgaaagaatcgtatcgtatggtgctgaacatcatcggcgagatagccggccagtggatggctcctaacgctcccgccgttgatgaggcgggcccgaccctcgccaacaaccaggtgacgcttcaccccgcgaccaaaaaggcgctggacatgctggctaaagctgacatgatgggctttgtcattccgcgccggtacggcggccttaacatgcccaacaccatactcaccatcgccgcggatattgcagcacgggcggacggttctttcctcaatttcggactccagcaggataacgccggaacgattaacaaattcgcctcggaagatcaaaagacgcggtatctgccgaaactctgctccggcgaatgggattcggcgatggttctaccgagccggacgcgggaagcgatcttcagtcggtga

SEQ ID NO: 32958 - protein, 187 aa, Unknown
  Obtained from environmental sample
  misc_feature (1)..(187): Xaa is any amino acid
MENFLTDNEDILFQLEHLDLDRIIHLKEENFSQAKQYSHAPKDVQDAKESYRMVLNIIGEIAGQWMAPNAPAVDEAGPTLANNQVTLHPATKKALDMLAKADMMGFVIPRRYGGLNMPNTILTIAADIAARADGSFLNFGLQQDNAGTINKFASEDQKTRYLPKLCSGEWDSAMVLPSRTREAIFSR

SEQ ID NO: 32959 - DNA, 936 bp, Unknown
  Obtained from environmental sample
  misc_feature (1)..(936): n is a, c, g, or t
ttgtttttacttctgtttcaacagatacatcgccaaaaccgacacatccgccggggtcaccccgcttatccgcgacgcgccgccaagcgtgccgggacgtatcttcttgaacttctggcgcgactccgtcaacaaccccgggatgtcgtcgtacgaaaaatcgtcaggaatcttcgtctcctcataccgccgaatccgctcaatctcacgagactgcttgcgaacgaaaccctcgtattttatatccgactctacgcccaaagccaaatgcctgtctgttcccaacaaccccccgataaccccaatcccgcacgccaacccctcaatctcaacttccggacgccggagcaaatccctagcgctctcgcttttgccgatgaccctgcccgtcgccccctcgtactcctccggcgcgaccttaatatcgccaagcgcctcggcggcctcccgcttcctgtcccagaaccgccgccgctcgtcataccgctccgccgaaagcgtccccaacctgaacgccgtcggcatcaaccgctcgtcgcagttgtcctgccgcagtatcaaccggtactccgcccgcgacgtgaacatcctgtacggctcctccgtacccttcgtcaccaaatcgtccaccagcacgccgatataggcggcgtcacgtcccaaaacaagcggctccccgccgcgcaacgactgtaccgcgtttatccccgccaagaggccctggcccgcggcctcctcgtaacccgacgtcccgttcacctgccccgcaaagaacagcccgcccacgattttagactccagcgtcggcctaagctgcaacggctggaagtaatcgtattctatggcgtaacccgggcgcattatacgggcgccccgcaacccatctatgcttgccaccatccgctcctgaacatcataggggagggaggtcgataa

SEQ ID NO: 32960 - protein, 311 aa, Unknown
  Obtained from environmental sample
  misc_feature (1)..(311): Xaa is any amino acid
MFLLLFQQIHRQNRHIRRGHPAYPRRAAKRAGTYLLELLARLRQQPRDVVVRKIVRNLRLLIPPNPLNLTRLLANETLVFYIRLYAQSQMPVCSQQPPDNPNPARQPLNLNFRTPEQIPSALAFADDPARRPLVLLRRDLNIAKRLGGLPLPVPEPPPLVIPLRRKRPQPERRRHQPLVAVVLPQYQPVLRPRREHPVRLLRTLRHQIVHQHADIGGVTSQNKRLPAAQRLYRVYPRQEALARGLLVTRRPVHLPRKEQPAHDFRLQRRPKLQRLEVIVFYGVTRAHYTGAPQPIYACHHPLLNIIGEGGR

SEQ ID NO: 32961 - DNA, 1089 bp, Unknown
  Obtained from environmental sample
  misc_feature (1)..(1089): n is a, c, g, or t
ttggacaggtcgccgctttattccgggaaaatatcgagcgtggggccgcgttactgtccgtccatagaagataaagttgtaagatttggagaacgggatggccatacattatatttagaaccagagagcgtcgggaactgcgagctctatataaacggtttatcgacctccctcccctatgatgttcaggagcggatggtggcaagcatagatgggttgcggggcgcccgtataatgcgcccgggttacgccatagaatacgattacttccagccgttgcagcttaggccgacgctggagtctaaaatcgtgggcgggctgttctttgcggggcaggtgaacgggacgtcgggttacgaggaggccgcgggccagggcctcttggcggggataaacgcggtacagtcgttgcgcggcggggagccgcttgttttgggacgtgacgccgcctatatcggcgtgctggtggacgatttggtgacgaagggtacggaggagccgtacaggatgttcacgtcgcgggcggagtaccggttgatactgcggcaggacaactgcgacgagcggttgatgccgacggcgttcaggttggggacgctttcggcggagcggtatgacgagcggcggcggttctgggacaggaagcgggaggccgccgaggcgcttggcgatattaaggtcgcgccggaggagtacgagggggcgacgggcagggtcatcggcaaaagcgagagcgctagggatttgctccggcgtccggaagttgagattgaggggttggcgtgcgggattggggttatcggggggttgttgggaacagacaggcatttggctttgggcgtagagtcggatataaaatacgagggtttcgttcgcaagcagtctcgtgagattgagcggattcggcggtatgaggagacgaagattcctgacgatttttcgtacgacgacatcccggggttgttgacggagtcgcgccagaagttcaagaagatacgtcccggcacgcttggcggcgcgtcgcggataagcggggtgaccccggcggatgtgtcggttttggcgatgtatctgttgaaacagaagtaa

SEQ ID NO: 32962 - protein, 362 aa, Unknown
  Obtained from environmental sample
  DOMAIN (1)...(141): Glucose inhibited division protein A
  misc_feature (1)..(362): Xaa is any amino acid
MDRSPLYSGKISSVGPRYCPSIEDKVVRFGERDGHTLYLEPESVGNCELYINGLSTSLPYDVQERMVASIDGLRGARIMRPGYAIEYDYFQPLQLRPTLESKIVGGLFFAGQVNGTSGYEEAAGQGLLAGINAVQSLRGGEPLVLGRDAAYIGVLVDDLVTKGTEEPYRMFTSRAEYRLILRQDNCDERLMPTAFRLGTLSAERYDERRRFWDRKREAAEALGDIKVAPEEYEGATGRVIGKSESARDLLRRPEVEIEGLACGIGVIGGLLGTDRHLALGVESDIKYEGFVRKQSREIERIRRYEETKIPDDFSYDDIPGLLTESRQKFKKIRPGTLGGASRISGVTPADVSVLAMYLLKQK

SEQ ID NO: 32963 - DNA, 816 bp, Unknown
  Obtained from environmental sample
  misc_feature (1)..(816): n is a, c, g, or t
ttgagccaagaactaaaaaaagcgagcaagccggagaattaccgcccacagcaaatagaaaacgcaaatgcgagaattgccctaatacaaaaattgaaacgcaaataccacacagatttgaacggcttaatagatttacgggaaaagagaaaacaagaattggaaagcctagaaaattcagactccgatatagccgaattgcaaaaaaatttctctaaactcaggcttgaatttgagaaaaatgccgctgaactctcaaaaaagagaatttctggtgcaaaaaaactggacacagaggttgaagagattttgcacaccttagcaatgccaaccgcaatattttccacacgctttacacagatggaaaatttgaacgcttctggcgcggagcagggagaattctggcttgccccaaacaagggcgaaggttccaagccattgaagcaagccgccagcggcggcaaactatcccgcgttttgctctcatttaaatgcgcaatggcagaaagagacaaaattcctcttttggtttttgacgaggtggacagcggaattagcggagaaaccgcccataaagtgggagaatgtctgcgggagcttggcaaatatcaccaagtgcttacaataacgcacctgcatcaggttgcggcacaggcaagcggtcaattttgcgtaaaaaagatagaaacaaaggaacgcacatacacaaccgtagaacctttgagcgaaaaagcacgaatttccgagatagccagaatgctaggagacgaaaattcccntgctgttttggctcacgcaagggaattgatgaagtaa

SEQ ID NO: 32964 - protein, 271 aa, Unknown
  Obtained from environmental sample
  misc_feature (1)..(271): Xaa is any amino acid
MSQELKKASKPENYRPQQIENANARIALIQKLKRKYHTDLNGLIDLREKRKQELESLENSDSDIAELQKNFSKLRLEFEKNAAELSKKRISGAKKLDTEVEEILHTLAMPTAIFSTRFTQMENLNASGAEQGEFWLAPNKGEGSKPLKQAASGGKLSRVLLSFKCAMAERDKIPLLVFDEVDSGISGETAHKVGECLRELGKYHQVLTITHLHQVAAQASGQFCVKKIETKERTYTTVEPLSEKARISEIARMLGDENSXAVLAHARELMK

SEQ ID NO: 32965 - DNA, 645 bp, Unknown
  Obtained from environmental sample
  misc_feature (1)..(645): n is a, c, g, or t
ttgttgagggcaattacaaccccgcacccttcccaacttcattttgataaaggaaaaattgccggaaactggggccaatacgtttggttcaacttacgttttcccaatttttccagccgttacaacgcttttctggaaggaaagctgcctaatctttttaacccggcgttttcgggtggcgctttaatggatctgaactactacaatgtgtcctttctccagaggcttttcgggactcccgaaaaactgaactattttgccaataaggcggaaaacggaatagacctttccggcatccttatactgcggtacgacgggtttatcgccagcgccagcgcaaccaaggacagcgaaagccggaattatattcagatccaaggggaaaagggttatctgaccagtgaaagcacagcgggaggcatacgttccggtttttccctggttaccaaagaaaaaactgaacagtttaacgcgcaaaaagaggaaaacgtcctttactatgaacttacggactttatcgcggactgggaatcgggggatccttcctgctgtgacgcatctctggaagacagccttgccacggcccttctcctggatcaggcccggcgagacgcgggcattgtttttgacgcggacaaacggtga

SEQ ID NO: 32966 - protein, 214 aa, Unknown
  Obtained from environmental sample
  misc_feature (1)..(214): Xaa is any amino acid
MLRAITTPHPSQLHFDKGKIAGNWGQYVWFNLRFPNFSSRYNAFLEGKLPNLFNPAFSGGALMDLNYYNVSFLQRLFGTPEKLNYFANKAENGIDLSGILILRYDGFIASASATKDSESRNYIQIQGEKGYLTSESTAGGIRSGFSLVTKEKTEQFNAQKEENVLYYELTDFIADWESGDPSCCDASLEDSLATALLLDQARRDAGIVFDADKR

SEQ ID NO: 32967 - DNA, 480 bp, Unknown
  Obtained from environmental sample
  misc_feature (1)..(480): n is a, c, g, or t
gtgtccgggcttttcagccgccggggttttaatattgacagcctancagtcggcgtaccgagggatcccctaatctcccgcatgaccattgcggttaacggcgaggaaagggtgctggatcagattgtaaagcagctcgaaaagctggttgacgttattgccgtgaaagaacttgaaaacgaatcatgcctgcgccgggaaataatgctggtaaaaataaaaacggacgagaaaacccgccccgccgttatggaaataaccggcattttccgcgcccgcgtagttgacgtttcccccgaaacaatcaccatagaagccaccggcagcgcggagaagcttaacggcctcttgctgctcctgcgcccctacggcattatggaacttgcccgcaccggccttgtcgccctggagcgcggggaccgggtgctgagtgtcgattctgctggtgaaccggcaggcgcggctgcggatactatgtga

SEQ ID NO: 32968 - protein, 159 aa, Unknown
  Obtained from environmental sample
  misc_feature (1)..(159): Xaa is any amino acid
MSGLFSRRGFNIDSLXVGVPRDPLISRMTIAVNGEERVLDQIVKQLEKLVDVIAVKELENESCLRREIMLVKIKTDEKTRPAVMEITGIFRARVVDVSPETITIEATGSAEKLNGLLLLLRPYGIMELARTGLVALERGDRVLSVDSAGEPAGAAADTM

SEQ ID NO: 32969 - DNA, 882 bp, Unknown
  Obtained from environmental sample
  misc_feature (1)..(882): n is a, c, g, or t
atggtggcctcctacggaaagtatcccaacgttatttacgaaatatataacgagccgataatatctgattggggcactatcaggtcgtaccacaacgacgtgatatccaccatcaggtcggctgaaaccaccgccggggtcacaaaccccaatcttatagtagtaggcacccccttttacagttcgcaacccaacgtcagcggcgacgttaccgattccaagaataacgtagcctacacattgcatttttacgcggcgaccggcgcgcacgactcttacagaggcaacgccaccagcgccaaaagcgcgggccgcacggtatttgttacggagttcggtaccaccgccgccgatggaggcggttccgtcaacaccggcaacaccggaacatggataaccggaacgcttaacccgaacaatataagctgggccaattggcagatcagcaatagggacgagaagtcgtctatactcaaatctaccgtcacctcggtaaacggaaactggacatcggccatgttctcggaatccggcacatatatccgcagcctctttccgtctagcagcaaccgcacatataccgttacgctcacccagccttcggcgggcggcacgatagccaaaacgccctccggcaatacccacgcatatggctccgatgtatcgatcagggccactcccgccgaggggtgggagattctgacgtggaagggcgacgccactgggggcaacgatgttgtttcggggcttgtcatgggcttaaatctgaacatttcggcggagttttataacgggcggtttaataaagaacggccacttcacatacggtgtcgcgtcgtggtcttccaacaacacctcaagcctcgtcgtgacgcaggataa

SEQ ID NO: 32970 - protein, 293 aa, Unknown
  Obtained from environmental sample
  misc_feature (1)..(293): Xaa is any amino acid
MVASYGKYPNVIYEIYNEPIISDWGTIRSYHNDVISTIRSAETTAGVTNPNLIVVGTPFYSSQPNVSGDVTDSKNNVAYTLHFYAATGAHDSYRGNATSAKSAGRTVFVTEFGTTAADGGGSVNTGNTGTWITGTLNPNNISWANWQISNRDEKSSILKSTVTSVNGNWTSAMFSESGTYIRSLFPSSSNRTYTVTLTQPSAGGTIAKTPSGNTHAYGSDVSIRATPAEGWEILTWKGDATGGNDVVSGLVMGLNLNISAEFYNGRFNKERPLHIRCRVVVFQQHLKPRRDAG

SEQ ID NO: 32971 - DNA, 801 bp, Unknown
  Obtained from environmental sample
  misc_feature (1)..(801): n is a, c, g, or t
atgcgcggcatgagctttttctggagcacctccagctggcccggcgccaagttttacacttcgggagtggtgaattggctggccgacgactggaaagtggacgtagtacgtgtggcgatgaaccctgacgacaggggggcttgggagacggtggtcaacgccgccatagccaagggtttgtacgtcatcatagactggcactcccataaagccacacagcagcaatccgcggcggtaacgtttttcaccactcagtcaaacacgcataaaaacacgcccaacgtcatatacgagctatacaacgagccatgcccgaaaggcgagcaagaaggacagtgtttgggggaagattgggccactatcaagacatacgcgcaggcggtaaccaacgccatcaggaataacgacaaaaacaatctcattgtgataggatccccggattacagtaaacgggtggatatggcggctcaaaatccggtcagcggcgacaatttggtttactcagtgcactactatacggccgaacccggtacgcagcatcaggccacgttgcgcggccagtgcgctcaggcgttgagcaaggggcaggcgcttttggttactgaatttgggctatccgaagcggacggcggacagaaaaataactcaaagatagatacggacgaagccaacatttggtttgatttcctcgacgagaaccaaatcggctggatcaattggtcgattgtcgacaagggagaggccgcttccgcgctcaccagcggagcaagcgcgaccggcaatggagcgacggcaacttga

SEQ ID NO: 32972 - protein, 266 aa, Unknown
  Obtained from environmental sample
  DOMAIN (1)...(250): Cellulase (glycosyl hydrolase family 5)
  misc_feature (1)..(266): Xaa is any amino acid
MRGMSFFWSTSSWPGAKFYTSGVVNWLADDWKVDVVRVAMNPDDRGAWETVVNAAIAKGLYVIIDWHSHKATQQQSAAVTFFTTQSNTHKNTPNVIYELYNEPCPKGEQEGQCLGEDWATIKTYAQAVTNAIRNNDKNNLIVIGSPDYSKRVDMAAQNPVSGDNLVYSVHYYTAEPGTQHQATLRGQCAQALSKGQALLVTEFGLSEADGGQKNNSKIDTDEANIWFDFLDENQIGWINWSIVDKGEAASALTSGASATGNGATAT

SEQ ID NO: 32973 - DNA, 588 bp, Unknown
  Obtained from environmental sample
  misc_feature (1)..(588): n is a, c, g, or t
atgggtgtaattgcgcctaatccccattacacggacgaaatagccgcagtgtgcgaaaagaccatttttatacccagtattaacgccatgcgggaagaaggctgtcctttcaaaggctgtctgtacttcgggcttatgcttacaaaacgcggccccgctgtaattgagtacaactgccgcttcggagaccctgaagctcaggcggtactcccattattggaaacaagtttacttgaaataatggaagccgttacggacgaaaggctttctgaaatagagattcgctggaaaaacgcccattgcgcctgcgtaatactggcaagcggagggtatccgcatgggtacaagacgggttttgccatttcagggcttaccgcggcggaaaacagcggggctgttgtctaccatgccggaaccgaatacagacaggcggaaaacacaggttctttttacactacaggaggccgtgttttaggcataaccgcccttgcaccggcgcttgacgccgcccttgtcaaggcgtacaaagccgtggacttaattaattttgatggaattcactaccgcagggatattgggaagtattaa

SEQ ID NO: 32974 - protein, 195 aa, Unknown
  Obtained from environmental sample
  DOMAIN (1)...(66): Phosphoribosylglycinamide synthetase, ATP-grasp (A) domain
  misc_feature (1)..(195): Xaa is any amino acid
MGVIAPNPHYTDEIAAVCEKTIFIPSINAMREEGCPFKGCLYFGLMLTKRGPAVIEYNCRFGDPEAQAVLPLLETSLLEIMEAVTDERLSEIEIRWKNAHCACVILASGGYPHGYKTGFAISGLTAAENSGAVVYHAGTEYRQAENTGSFYTTGGRVLGITALAPALDAALVKAYKAVDLINFDGIHYRRDIGKY

SEQ ID NO: 32975 - DNA, 411 bp, Unknown
  Obtained from environmental sample
  misc_feature (1)..(411): n is a, c, g, or t
ttggaaccgttacataatacgcaaattcaaacaccaatcgggttaatttcagcttttgacccaaacgcgatcggcgttaacgcggatgtcaattcgctcatgtttgacaaacagggcagggttatctctcttgttactgcaagtaatcgtatcgccgtacaaacggaagacggccgatttttaacattcgccccgcgtgagcttgtgaatcccttaaacaatgaaacgatgatgacggaagggcttgccatatcctttgattatgacggatctgccgtaacctttggggaaagcgacgaaaaatcaactttctccgtagacaaaaacgggtttacggttattgagtacaaaagttcggtttatatgtgcagccccgaagattgcgcgagttgttctttgggctgcaagtaa

SEQ ID NO: 32976 - protein, 136 aa, Unknown
  Obtained from environmental sample
  misc_feature (1)..(136): Xaa is any amino acid
MEPLHNTQIQTPIGLISAFDPNAIGVNADVNSLMFDKQGRVISLVTASNRIAVQTEDGRFLTFAPRELVNPLNNETMMTEGLAISFDYDGSAVTFGESDEKSTFSVDKNGFTVIEYKSSVYMCSPEDCASCSLGCK

SEQ ID NO: 32977 - DNA, 681 bp, Unknown
  Obtained from environmental sample
  misc_feature (1)..(681): n is a, c, g, or t
gtgatgcggttcgttttcagcgccgttattcttatcctcctcggctctttttccgctttcgcccagtcgcctggcggagccgagacgccatccgtttccgcgatggagaattaccgtcttggcagggaccttgaaagcctgaaccgcatgagcgaggcgaatacccattacaatgaagcggtacggcaatgccttgaagaagtgaccggcaacgccgcctcgcgcactacctatacggttttaacatggacattgcagaggcaaagaaaatataacgatgtcgtaacctggggagaacggggtctcagattattccccgacgaataccgcattatggaaacaatgggagaggcgtttttttatcttgaagattacacgcgttcgctttcctatatgcagcgttatacaagcgccttgccccagggggatcgggtttccgtcgcgtattttttctccggtgaaatttaccgtttaacgcaaaaataccgccatgcggatatcgcctataccacggcgttacgttttgagccaaacctcgccctttggtggtacaggctcggttccgtgcgtgaagaaatcggcgaaagaagttccgcgattgacgcctaccagcaagccctgcggataaaccccaattacaacgaggccaaaaacggcatcgcgagactacagggcaattag

SEQ ID NO: 32978 - protein, 226 aa, Unknown
  Obtained from environmental sample
  SIGNAL (1)...(21)
  DOMAIN (180)...(213): Tetratricopeptide repeat
  misc_feature (1)..(226): Xaa is any amino acid
MMRFVFSAVILILLGSFSAFAQSPGGAETPSVSAMENYRLGRDLESLNRMSEANTHYNEAVRQCLEEVTGNAASRTTYTVLTWTLQRQRKYNDVVTWGERGLRLFPDEYRIMETMGEAFFYLEDYTRSLSYMQRYTSALPQGDRVSVAYFFSGEIYRLTQKYRHADIAYTTALRFEPNLALWWYRLGSVREEIGERSSAIDAYQQALRINPNYNEAKNGIARLQGN

SEQ ID NO: 32979 - DNA, 306 bp, Unknown
  Obtained from environmental sample
  misc_feature (1)..(306): n is a, c, g, or t
atgagcgccgaaaaacctcctcttgagaagccaataatcagaatagagcatctttccaaatcttttgggaaacagcgggttttagcagacgtgagctttaatgtgcctgaaaaatgcatttacgccattgtgggacaaagcggaaccggaaaaagcgtgctattcaaatcgataatcggaatgataaaaccggacggcggaaaagtctggtttaaggacacggaactcaccgcactggactatgattctcttatgaaagaagaaaatcatttggctatgccttcagaacgccgcccccggcgataa

SEQ ID NO: 32980 - protein, 101 aa, Unknown
  Obtained from environmental sample
  misc_feature (1)..(101): Xaa is any amino acid
MSAEKPPLEKPIIRIEHLSKSFGKQRVLADVSFNVPEKCIYAIVGQSGTGKSVLFKSIIGMIKPDGGKVWFKDTELTALDYDSLMKEENHLAMPSERRPRR

SEQ ID NO: 32981 - DNA, 765 bp, Unknown
  Obtained from environmental sample
  misc_feature (1)..(765): n is a, c, g, or t
atgcttagtaaccttagctcttctcttgaaaccctgggacactattttgtttttctgggagagataatacgcagttttttcaaaaggccgtcccgcgttagccaaattatggctgaaattgaacacctgggcgtaaactcggtcgcgattattttcctgtccggagcggcaatgggaatgatattcgccctgcaaatggttacgtttcttcagcccttttcggtagagataggcgtgggcgctgcggttgccatcgcgctggccagagaacttggccctgttattaccaccntgatgctaatcgccaaaaacggctcggctatggcggcggaacttggaaccatgaaagtaaccgagcaaattgacgcattggaatccatgtccatcaacgtcgtccattaccttgtcatgccaaaagtcgcggcgtcttttctggtttttccgcttcttacacttctggctgacgtagtcggggctttgggctcctttgttatcgcggttcccctttttaacatagactcagccggatacttggactatatgtttgattttattaatccgcgcgatattattatcggccttatcaaagcggcgataatgggggttatgatcgccaccatctgctgttttaacggccttaggacgacacagggcgccaggggggtgggcgacagcgccaccagggcggttgtgatctcgtcggtatccattcttgtggcggactacctcatgaccaccatcatgctgccattcatttatatatga

SEQ ID NO: 32982 - protein, 254 aa, Unknown
  Obtained from environmental sample
  DOMAIN (5)...(249): Domain of unknown function DUF140
  misc_feature (1)..(254): Xaa is any amino acid
MLSNLSSSLETLGHYFVFLGEIIRSFFKRPSRVSQIMAEIEHLGVNSVAIIFLSGAAMGMIFALQMVTFLQPFSVEIGVGAAVAIALARELGPVITTXMLIAKNGSAMAAELGTMKVTEQIDALESMSINVVHYLVMPKVAASFLVFPLLTLLADVVGALGSFVIAVPLFNIDSAGYLDYMFDFINPRDIIIGLIKAAIMGVMIATICCFNGLRTTQGARGVGDSATRAVVISSVSILVADYLMTTIMLPFIYI

SEQ ID NO: 32983 - DNA, 603 bp, Unknown
  Obtained from environmental sample
  misc_feature (1)..(603): n is a, c, g, or t
gtgggaagcacagtaattacagtacgtcctttaacacgcctaacgcttacagagattcgcgcttcatcgggtagtgaaagccttaatgtcaatcttcagagcgggcgaatacgtgtagacgtgaacccgccagccggggcaaaagcttcgatggcggtaagcagccctagcgcgaccgcctctgtgcgcgggacgagtttcgaatttgacacccggaaccttcatgtaatcagcgggaatgtgatattcaagggggtaaggggagtatcaacgcttataacgactgggcttaacagcacaacggatcagaaaggaagcgcggtaaacccgcttgcctttggtgacgccacccataagccgcaaatgccggcaggggcacagtcaaacgcgacgccagccccaattactacagggaacggcagggaggagcagccttcacaacccagtacgccaagtaaaccgggcaatccctccaaccctaagcccagcaatccaaataagcccaacaatccgagcaaccccacaaatccgggtagtccgacaaaaccaaacaatccacccggcaacggtgataacacaggtgttgatgtgcatttcaattaa

SEQ ID NO: 32984 - protein, 200 aa, Unknown
  Obtained from environmental sample
  misc_feature (1)..(200): Xaa is any amino acid
MGSTVITVRPLTRLTLTEIRASSGSESLNVNLQSGRIRVDVNPPAGAKASMAVSSPSATASVRGTSFEFDTRNLHVISGNVIFKGVRGVSTLITTGLNSTTDQKGSAVNPLAFGDATHKPQMPAGAQSNATPAPITTGNGREEQPSQPSTPSKPGNPSNPKPSNPNKPNNPSNPTNPGSPTKPNNPPGNGDNTGVDVHFN

SEQ ID NO: 32985 - DNA, 435 bp, Unknown
  Obtained from environmental sample
  misc_feature (1)..(435): n is a, c, g, or t
atgttcggggcggagcggtttgacatttcgtggcttagcggcgggcggcttctcaacttggatatggtgcaagagggcgccatcgtggtggcgcgcgcgcacgaggacaatcctgatatgctcatccccatacccatcactacaaccgcccagatgaaggcggcggccatcccggattggccgtacagggccgactcgccgcttagggataggatggtcgaggtgttcagggattactacggcgaagagccgatgatcgcggggcttcagcacgccgcggtcgaatgttccatgttcgcctcaaaaatgccggacgcggatatggcctccatcggcccgaacctcgtcggcatccacacgccgaacgagaaaatgagtttatcctcgtacaatcgggtgtacggctatcttgtcgcgctgttggagaggctgtga

SEQ ID NO: 32986 - protein, 144 aa, Unknown
  Obtained from environmental sample
  misc_feature (1)..(144): Xaa is any amino acid
MFGAERFDISWLSGGRLLNLDMVQEGAIVVARAHEDNPDMLIPIPITTTAQMKAAAIPDWPYRADSPLRDRMVEVFRDYYGEEPMIAGLQHAAVECSMFASKMPDADMASIGPNLVGIHTPNEKMSLSSYNRVYGYLVALLERL

SEQ ID NO: 32987 - DNA, 372 bp, Unknown
  Obtained from environmental sample
  misc_feature (1)..(372): n is a, c, g, or t
ttggaggatggcgccgaggcacatgatgcacggctcaagcgtcacgtagagtgtgcaaccgaccagccgccagccgccgacgtggttcgacgcggcggtgatggcgatgatctcagcgtgcgccgtggcgtcgccgagcgcctctacgcggttgtacccccgcccgatgatccgcccgcccaactccaccacggcgcccaccggcacctcgccctcgttgaacgcggaaagggcctctcggtaggccgccgacatgaagtaagcgtggtcgggtacggcgacgaccggagacccgcccgcgccgccggtgcctacggccgcaccgtaatccttatccgtgctcacagcctctccaacagcgcgacaagatag

SEQ ID NO: 32988 - protein, 123 aa, Unknown
  Obtained from environmental sample
  misc_feature (1)..(123): Xaa is any amino acid
MEDGAEAHDARLKRHVECATDQPPAADVVRRGGDGDDLSVRRGVAERLYAVVPPPDDPPAQLHHGAHRHLALVERGKGLSVGRRHEVSVVGYGDDRRPARAAGAYGRTVILIRAHSLSNSATR

SEQ ID NO: 32989 - DNA, 423 bp, Unknown
  Obtained from environmental sample
  misc_feature (1)..(423): n is a, c, g, or t
atgcgggggcgctacagcgcctacgccgtgggggcgatagacttcatcatctcctcaacgcacccggacaagcgctcggagtgcgacgagaagtccattcgcgcgtggtcggccaactccgagtggacgggcttctcggtgctctccacggaggccgggcaggccgccgacagcgagggcacggtggagttcatagcgcgcttcaccgaagaccgcatgaagaagacgctccacgagaccggatcgttcaagaagaaagacgggcagtggtactacgtggacgggatgatgcacgcgcacaagcccttcgtgcgcgatacggagaagatcaaccggaacgcgccgtgccgctgcgggagcgggaagaagtacaaaaaatgctgcatggagaaagacttggcggcggagaactcacagagttag

SEQ ID NO: 32990 - protein, 140 aa, Unknown
  Obtained from environmental sample
  DOMAIN (112)...(132): SEC-C motif
  misc_feature (1)..(140): Xaa is any amino acid
MRGRYSAYAVGAIDFIISSTHPDKRSECDEKSIRAWSANSEWTGFSVLSTEAGQAADSEGTVEFIARFTEDRMKKTLHETGSFKKKDGQWYYVDGMMHAHKPFVRDTEKINRNAPCRCGSGKKYKKCCMEKDLAAENSQS

SEQ ID NO: 32991 - DNA, 660 bp, Unknown
  Obtained from environmental sample
  misc_feature (1)..(660): n is a, c, g, or t
atggatcttggtgttttttcccgttttatgcggatattccagaacgatgaaataatctttagtgaatatgaaccgggggatactttttatgttatccagtccggaagggtaaagctgttaaaatacgacggtgaatccgagcggagcctggatattctgcagccatcggaaatgtttggtgaaatggcaatacttgaaggttcgccgcgtagcgccaccgccattgccctggatgaagtaaaagcgctggaattcaacgcgcagaattttgagctccttatgaccggaaacccgcagattggcattaatctgctgaagattttcgcaaagaggatttacgattcaaaacggcgttacatgatccttaccctgcccaacccccaggcaaagatcgccgacgtgtttcttatgcttgatgaaactatgccggatattaacaggaaaactgaaacccgtgaatttcaaactactattgaagatatagcccattgggcaggagtgagcatcgagcagacaagggaaatacttcatacctttgttgtgcagaaccgcctggaggtgtacgctacccgcatggtggtaaaaaatattaatgatttaaaccgcattgtcaattcccggcgtaaacaagcaatgaatccgaccagaataaagacctga

SEQ ID NO: 32992 - protein, 219 aa, Unknown
  Obtained from environmental sample
  DOMAIN (10)...(99): Cyclic nucleotide-binding domain
  misc_feature (1)..(219): Xaa is any amino acid
MDLGVFSRFMRIFQNDEIIFSEYEPGDTFYVIQSGRVKLLKYDGESERSLDILQPSEMFGEMAILEGSPRSATAIALDEVKALEFNAQNFELLMTGNPQIGINLLKIFAKRIYDSKRRYMILTLPNPQAKIADVFLMLDETMPDINRKTETREFQTTIEDIAHWAGVSIEQTREILHTFVVQNRLEVYATRMVVKNINDLNRIVNSRRKQAMNPTRIKT

SEQ ID NO: 32993 - DNA, 939 bp, Unknown
  Obtained from environmental sample
  misc_feature (1)..(939): n is a, c, g, or t
atgcccaaagctcatcaatattttacaggttcgatggtttacgcgcgcggagatgaggcaagcaaactttttatcctccaaagcggaaaggtaagccttgccactatagaccctgaaacagggattgaaacgcgcgatctggtatcgccgggcgaatttttcggcgttaaatccgcgcttgggcgcttcccgcgcgaagaaaacgccatcgcggtagcggactctaccgcaatggtgttcacggttcccgaatttgaagcgtttgccatgtcaaacccaaaaatcattattaagatgctcaaggtattttccacccaaatgcggcgtgttcaccagcagattgcgaaacttaaggaaaaagaagatgtaaaacccgatgaagggctttacggcataggcgagacatacctgaaacttaaacgttacccccacgcaaaatatattttcagccgttatctggttcattacccctcaggcccgaaggcggcccaggcctctaaaaacctccagattgcggaaaaagccatcgcgaatacagtcgtcaagagtcagcaaaaaggaacagccagagaatatcgtgaagcgataagccttatctcaaaacatgaatacgaagaggcaattcaggctttcacaaaaatcattaatacttgcaaagaacaggaatggatttccaaaagcgaatactcaatcggccactgtcagtttcttctgggaaagtatgaggattgcattaatcatttttctaacatgctttcaaaaaatccggagcatcccgacgtgaatgaggcgatgttctatataggagaggcttccgagaagatcggaaacaagaggcaggcggcgttttggtataacaaactcctcgcgatgcccggcctggaagcgaacgggatgagggcaaaggtaagacaggcgcttaagggtttgggagcataa

SEQ ID NO: 32994 - protein, 312 aa, Unknown
  Obtained from environmental sample
  DOMAIN (225)...(258): Tetratricopeptide repeat
  misc_feature (1)..(312): Xaa is any amino acid
MPKAHQYFTGSMVYARGDEASKLFILQSGKVSLATIDPETGIETRDLVSPGEFFGVKSALGRFPREENAIAVADSTAMVFTVPEFEAFAMSNPKIIIKMLKVFSTQMRRVHQQIAKLKEKEDVKPDEGLYGIGETYLKLKRYPHAKYIFSRYLVHYPSGPKAAQASKNLQIAEKAIANTVVKSQQKGTAREYREAISLISKHEYEEAIQAFTKIINTCKEQEWISKSEYSIGHCQFLLGKYEDCINHFSNMLSKNPEHPDVNEAMFYIGEASEKIGNKRQAAFWYNKLLAMPGLEANGMRAKVRQALKGLGA

SEQ ID NO: 32995 - DNA, 330 bp, Unknown
  Obtained from environmental sample
  misc_feature (1)..(330): n is a, c, g, or t
atgacaaaccttagacaattacttgggaccaatattaaaatctacagaaatgcctgtggcatatcgcagtccaaattggctgaacgggttgatacggcaaccaactatatttccgcaatcgaggcgggaaggcgttttccgtctgtagaaatgcttgaaaaaatcgctttagcgctggaaattgacacaccagagctattttctgtaaaaaacgtgcaattttccatagaaaaaagagaaatagaagaacaaatttggctgaatatcggacaaaatttatcaaattacatatcaaaaaacgtgatagagctaaaaaagcagaaaatctga

SEQ ID NO: 32996 - protein, 109 aa, Unknown
  Obtained from environmental sample
  DOMAIN (12)...(66): Helix-turn-helix
  misc_feature (1)..(109): Xaa is any amino acid
MTNLRQLLGTNIKIYRNACGISQSKLAERVDTATNYISAIEAGRRFPSVEMLEKIALALEIDTPELFSVKNVQFSIEKREIEEQIWLNIGQNLSNYISKNVIELKKQKI

SEQ ID NO: 32997 - DNA, 585 bp, Unknown
  Obtained from environmental sample
  misc_feature (1)..(585): n is a, c, g, or t
atggagaaagtatataggatgacggaacgcagagagataatgaacgagaaagtgcctgttgaggaaaaaattttttcgatatacgagcagcatacggacataataatgaaagggcagagggaagcacagtttgggcataaagtaaaccttggcagcgggagaagcaatttaatattaacctgcgagatagtggaaggaaattctaaagacagcgaattgtatgagggaacaataaggaagctgaagaaggattacggcaagacgccgaagtcaagtacggcggacggcggttttgcgagcaaggcgaacatagaatattcacagaaagtaggaatagcaaatatagtgttcaacaagatacgggggagcatgcaaaacatagcgaaaagcaaatgggtggaaaacaaactaaaacgatggaggggcgggatagaggcaataatatccaacctgaaacgtggttttcaaatacgccggtgcatttggaaaggtattgcacattatggacaaaaggtattttggagtgtcattggatataatcttcgggtaatgaccggcgctatactgcaaacaatgactttttag

SEQ ID NO: 32998 - protein, 194 aa, Unknown
  Obtained from environmental sample
  DOMAIN (17)...(181): Transposase DDE domain
  misc_feature (1)..(194): Xaa is any amino acid
MEKVYRMTERREIMNEKVPVEEKIFSIYEQHTDIIMKGQREAQFGHKVNLGSGRSNLILTCEIVEGNSKDSELYEGTIRKLKKDYGKTPKSSTADGGFASKANIEYSQKVGIANIVFNKIRGSMQNIAKSKWVENKLKRWRGGIEAIISNLKRGFQIRRCIWKGIAHYGQKVFWSVIGYNLRVMTGAILQTMTF

SEQ ID NO: 32999 - DNA, 1197 bp, Unknown
  Obtained from environmental sample
  misc_feature (1)..(1197): n is a, c, g, or t
atgactgattttttcaggctcattaacaaggtcagacattacgattggggctccccctatgatattccccgtctgctgggcatgatgcccgatggaacgccctgggcggagctttggcttggcgccaattcgggtttttcttcaaccacgattctggactcgcgcgaaattaaccttgcggaattgatagcaggcgatccgcgccgtttcctcgggtcggaaacggcaaggcgttatggttcgcttccttttttattaaagcttctgtcggcggaaaagccgctttccattcaggctcaccccaatctggatcaggcccgcgaaggttttgaaagggagaacagggcgggtttgaccattgattccccgaagcgcaattataaggacgcgaaccacaagccggaaatcatagcggcgcttaccccgtttacaggcttgtgcggcttccggagtgttgatgagatccgcggcctgctcgcttcttttcttgagcccgcgtctgttgtcctgcgtgaggaattcctcccgttgactcgcgcgctttcaaaccgcgaacccgccgccgcgttgcgtgattttttggccgggcttttcggattttcacaaaaggtacgggagacccttgggaaatatattctttcgttgaaggggccattgccaggttttgaattggagctaatacaggatttagcccggctgtatcccggcgacccggcggtgattgcgcccctttaccttaatgttttccgcctggaaccgggcgaagcgatttttctggaagccggggtactccatgcctacattcacggctttggcgtggagcttatggcggactcggacaacgttctgcggggcggcctgacccccaagcatgtcgacgttccggaactgatgaagatactggattttaaaccgtttaagccccaggtcattgcgcctaacgccaaatgtttcagctacccgacgccatgcgaagaattcacgctcaccaaaatccgcggcaatggcggcggagcggagtcctggcccctgtcccatgaaactccctctatttgcattgtcaccgaaggggaacttgttgtcgcttccaaggacagggaaacagttgttaagcaaggggaatcgctgtttatccctcctgttaaagagaaccctttttcgctaaaggggaaatttaccatgtttgttgcatcctga

SEQ ID NO: 33000 - protein, 398 aa, Unknown
  Obtained from environmental sample
  DOMAIN (4)...(366): Phosphomannose isomerase type I
  misc_feature (1)..(398): Xaa is any amino acid
MTDFFRLINKVRHYDWGSPYDIPRLLGMMPDGTPWAELWLGANSGFSSTTILDSREINLAELIAGDPRRFLGSETARRYGSLPFLLKLLSAEKPLSIQAHPNLDQAREGFERENRAGLTIDSPKRNYKDANHKPEIIAALTPFTGLCGFRSVDEIRGLLASFLEPASVVLREEFLPLTRALSNREPAAALRDFLAGLFGFSQKVRETLGKYILSLKGPLPGFELELIQDLARLYPGDPAVIAPLYLNVFRLEPGEAIFLEAGVLHAYIHGFGVELMADSDNVLRGGLTPKHVDVPELMKILDFKPFKPQVIAPNAKCFSYPTPCEEFTLTKIRGNGGGAESWPLSHETPSICIVTEGELVVASKDRETVVKQGESLFIPPVKENPFSLKGKFTMFVAS

SEQ ID NO: 33001 - DNA, 786 bp, Unknown
  Obtained from environmental sample
  misc_feature (1)..(786): n is a, c, g, or t
ttgatcgttttgagcttgagggggaacaatagattggataacggcttgcgtttgcacgtataccttgcccatgcgggcgtcgcgtcccgcagggctgccgaggaaattatcgcggagggaagagtcggcgtaaacggaaccgttgtaagagggcaggggagtaaggtttttcccggcgacgttgtaacgcttgacggaaaggcgctgcgtcccgaaagccgcaaagtttaccttgcgctgaataaaccccccggctatatttgcagttcttctgacccgcaagggcgaccgcttgcgctggaactgctgccggacagcattggcgaacgaatgtacaatgtcgggcggctggacttcatgtcctgcggcctcatcttttttaccaatgacggggattttgccgcccggctggggcatcccggttccgggctggaaaaagagtacattgtcgaagcgacaggccatataccggatgaagttatcgcggcgtttgaagaaggcataacaatagaagacgtgcattatcatgcaaaagccgtcagccgcgtcggttcacggtgcctccgcattgtgctgattgaaggcaaaaacagggaaatacggcgggtgttttcctattttcaccttcacccggcaaaactccgccgcgtgcgcatcggccctgttctgctggggaaacttgaagaaggggcctgtaggccgctgtcaaaacacgagtggaatcgctgcaaaccggccccgtttcccattcactggtttccaatccccccaaaaaaaggagcatga

SEQ ID NO: 33002 - protein, 261 aa, Unknown
  Obtained from environmental sample
  DOMAIN (76)...(206): RNA pseudouridylate synthase
  misc_feature (1)..(261): Xaa is any amino acid
MIVLSLRGNNRLDNGLRLHVYLAHAGVASRRAAEEIIAEGRVGVNGTVVRGQGSKVFPGDVVTLDGKALRPESRKVYLALNKPPGYICSSSDPQGRPLALELLPDSIGERMYNVGRLDFMSCGLIFFTNDGDFAARLGHPGSGLEKEYIVEATGHIPDEVIAAFEEGITIEDVHYHAKAVSRVGSRCLRIVLIEGKNREIRRVFSYFHLHPAKLRRVRIGPVLLGKLEEGACRPLSKHEWNRCKPAPFPIHWFPIPPKKGA

SEQ ID NO: 33003 - DNA, 552 bp, Unknown
  Obtained from environmental sample
  misc_feature (1)..(552): n is a, c, g, or t
gtgtcggaaaatttagaaaaagaaaccgccttggtcgagacagtgctttttatggaatcggaagccatagacgaggccggtatcagccgtatttgcgggctttcaaaagaattggtactggaagcgctggaaaggctcggcgaacgttacgccctcgcggattccggcattgagttgtcccgcgtcggcggcggagtcatgatctcccccaaacgggaatactgggaaagcctgaaagaccgttacggcaaaaaaaacgacggaaagatttcccgcgccgccatggagaccctttcaatcattgcctattcccagccgataaccaaagccgaaataaagggctatcggggggttacgccggacaatatgctccatttactgctggaaaagggtttgatccgcgaagtgggaaaaaaggacgttcccggcaaaccggtgcaatacggcacgaccaaagaattcctcaaacagttccggctcaattccatcgcggatttacccaaactcagcgacagcgaccttgatcgttttgagcttgagggggaacaatag

SEQ ID NO: 33004 - protein, 183 aa, Unknown
  Obtained from environmental sample
  DOMAIN (10)...(169): Putative transcriptional regulators (Ypuh-like)
  misc_feature (1)..(183): Xaa is any amino acid
MSENLEKETALVETVLFMESEAIDEAGISRICGLSKELVLEALERLGERYALADSGIELSRVGGGVMISPKREYWESLKDRYGKKNDGKISRAAMETLSIIAYSQPITKAEIKGYRGVTPDNMLHLLLEKGLIREVGKKDVPGKPVQYGTTKEFLKQFRLNSIADLPKLSDSDLDRFELEGEQ

SEQ ID NO: 33005 - DNA, 657 bp, Unknown
  Obtained from environmental sample
  misc_feature (1)..(657): n is a, c, g, or t
atggctgatgacattatgtattttgcaacaggcccaagtgtggatcaagtcggcccttttgatattaataagagggagttcctgtggtttttgccgtatcatcaaattaacgctacatggtattcattctgcgcgatacgcggaaatcttttatacatgggaacagcgggtattggttacggaacggagcttagttattacgccattaacaggaataacggaagaattgagtgggaacagcactgtgatggtaagatgcctttatttaatcttgaaaatgaatacagatattttttaaggaacatagatttactggactttatggctccgattgtctggaagaatctggtcatttttacaggcggcgattgcgctgcccgggcttttgacgctgacaacggtgttcttcgctgggaacggctctttgacacgccggtaagttctgcgccgacactgtccgccggcagggtttatttcggcttgcttggagatgaaatacgcaaaccgcagctcgtgtgtatttcagcgcgggacggcaggcttctctggcagatggaaactgacgggtcaatactgtccgctcctgtcattgcgggaaagaggataatttttggcactgatgaaaatgtcttttatgtccttgaacaggtgttgtag

SEQ ID NO: 33006 - protein, 218 aa, Unknown
  Obtained from environmental sample
  misc_feature (1)..(218): Xaa is any amino acid
MADDIMYFATGPSVDQVGPFDINKREFLWFLPYHQINATWYSFCAIRGNLLYMGTAGIGYGTELSYYAINRNNGRIEWEQHCDGKMPLFNLENEYRYFLRNIDLLDFMAPIVWKNLVIFTGGDCAARAFDADNGVLRWERLFDTPVSSAPTLSAGRVYFGLLGDEIRKPQLVCISARDGRLLWQMETDGSILSAPVIAGKRIIFGTDENVFYVLEQVL

SEQ ID NO: 33007 - DNA, 1275 bp, Unknown
  Obtained from environmental sample
  misc_feature (1)..(1275): n is a, c, g, or t
atgttagattataaatttatagcggaaaatttgcatgcggttacggcaaacattgccgaccgttttatgaaagccgacgcggaggcggtagcgcgcctgtataacaaaagaacggaacttgccaccagattgcagtcgttccagcagaagcgtaacgcaaacgccgacgccatgaagggcaagcttgatcaggaagagcgtaatgttcttattgaagaagggaaaaaattaaaagaggaaatcgccgcggcggaaagcgaattaaccgcagtggaagcggaacttttaacagaggcgcggaaaattcccaacatggcgcatcctgacgcgccggtcggcaaggaagacaaggacaatcttgaggtaaagagagtaggggagcctaccaaatttgattttgaacccgccgaccatgtgaagcttgggcaagaccttgatgttatcgactttgattccggcacaaaagtgtcaggcactaaattttactatctaaagaacgaaggcgtatatcttgagcttggtcttgtgcgttacgcgcttgatattctgcaaaaaaagaaatttaccccgtttattacgcccgacattgcgcgtgaggaaatacttgaaggcataggttttaatccgaggggagcggaatccaacgtatacaaaattgaaggggaagatatctgccttgtcggaaccgcggaaattacccttggcggttattattccaacatgatccttcccaaagaaaaactgccgcttcgcatggccggtctttcccactgtttccgccgtgaagcgggcgcagcgggtcaattttcaaaggggctttaccgcgtccatcaatttaccaaagttgaaatgtttgtttactgtctgcccgaagaatcggggcgttttcacgaggaattgcgttcaatagaagaggaaattttcgagagtcttaacatacctttccgcgtggttgacacctgcacaggcgacttaggcgcgcccgcttaccgcaagtgggatttggaagcttggatgcccgggcgcaacggaggggagtggggagaggtaacctctacctcaaactgcacggattatcaggcgcgcaggcttaacatacgctttaaggatgacgacggaaaaaataaatttgtacatatgctaaacgggacggcgattgccatctcccgcgcgataatcgccattttggaaaatttccagcaagcggacggctcggtgcgcctgcctcgcgcgcttgtcccttactgcgggtttgatgttataaaaaagaagtaa

SEQ ID NO: 33008 - protein, 424 aa, Unknown
  Obtained from environmental sample
  DOMAIN (1)...(106): Seryl-tRNA synthetase N-terminal domain
  misc_feature (1)..(424): Xaa is any amino acid
MLDYKFIAENLHAVTANIADRFMKADAEAVARLYNKRTELATRLQSFQQKRNANADAMKGKLDQEERNVLIEEGKKLKEEIAAAESELTAVEAELLTEARKIPNMAHPDAPVGKEDKDNLEVKRVGEPTKFDFEPADHVKLGQDLDVIDFDSGTKVSGTKFYYLKNEGVYLELGLVRYALDILQKKKFTPFITPDIAREEILEGIGFNPRGAESNVYKIEGEDICLVGTAEITLGGYYSNMILPKEKLPLRMAGLSHCFRREAGAAGQFSKGLYRVHQFTKVEMFVYCLPEESGRFHEELRSIEEEIFESLNIPFRVVDTCTGDLGAPAYRKWDLEAWMPGRNGGEWGEVTSTSNCTDYQARRLNIRFKDDDGKNKFVHMLNGTAIAISRAIIAILENFQQADGSVRLPRALVPYCGFDVIKKK

SEQ ID NO: 33009 - DNA, 558 bp, Unknown
  Obtained from environmental sample
  misc_feature (1)..(558): n is a, c, g, or t
atgctggaaagatttcgggataaattaaaaaaatccggtaagcaattacaggaaaatatacatattcgtaaaggtgatatgtcaaattttaatcttgatcaaaaatttgaatatataataataccgtggcgggcattacagtggctgcccataaaagaaaaaaccatagaatgcttaaattgcgtgtataaacatcttacagataatggtatttttatatttgatatattcaaaccaagaacctatgatgaaaaatggcttggtaaagaagatatatcctatgatattattgacggggacaaacgcattattcgctcaacaataaaccatcacgcggataccgaaaaaaaatatattcaatataaaaataaaatacgtatattggaaaatggcgctgaaagagtaaaagaagatttgttgacaataaaatattatgaatataatgacattgttgacatattaaaagagctaaaatttaaaataaaagaagaatacgggtattatgataaaagagcaataaaagacggcgaagaaatgatatttgtatgtacaaaataa

SEQ ID NO: 33010 - protein, 185 aa, Unknown
  Obtained from environmental sample
  misc_feature (1)..(185): Xaa is any amino acid
MLERFRDKLKKSGKQLQENIHIRKGDMSNFNLDQKFEYIIIPWRALQWLPIKEKTIECLNCVYKHLTDNGIFIFDIFKPRTYDEKWLGKEDISYDIIDGDKRIIRSTINHHADTEKKYIQYKNKIRILENGAERVKEDLLTIKYYEYNDIVDILKELKFKIKEEYGYYDKRAIKDGEEMIFVCTK

SEQ ID NO: 33011 - DNA, 390 bp, Unknown
  Obtained from environmental sample
  misc_feature (1)..(390): n is a, c, g, or t
ttgaacccggacgctctttatgtaggcgacagcggtattttaataacggaagtagtattaatttcaaggaaaactcatacggcgcttaaccgctgggtatatcttgatacgggaaaatttaacggacttatagaaacattaaacgaatcgattaaatatcccattattacggaaaatgaggacgatgaggcggaggaagaagaagtaattatcgccggacccacctgcgatagtcaggatattctatacgaagaacacaaatacctgcttccgataaacttaaaaataggcgacaaactttatttcctttccgccggagcgtataccgcaagttacgcttcagttagttttaacggtttcccgccgattaaaacttatattatggagtag

SEQ ID NO: 33012 - protein, 129 aa, Unknown
  Obtained from environmental sample
  DOMAIN (13)...(128): Pyridoxal-dependent decarboxylase, C-terminal sheet domain
  misc_feature (1)..(129): Xaa is any amino acid
MNPDALYVGDSGILITEVVLISRKTHTALNRWVYLDTGKFNGLIETLNESIKYPIITENEDDEAEEEEVIIAGPTCDSQDILYEEHKYLLPINLKIGDKLYFLSAGAYTASYASVSFNGFPPIKTYIME

SEQ ID NO: 33013 - DNA, 1161 bp, Unknown
  Obtained from environmental sample
  misc_feature (1)..(1161): n is a, c, g, or t
ttggaaacgcgttcaccgaaccgggggcaaatgcccttgaagtcatctgggaaaggagcaagcaattttatacggaacaggcgggtcaaatacccggcggaaaaaaatacgattctctttgcgcaggatgcgatgaatactatacctacaacttttaaccaggattttccgtcatataccgttatcggaggcagggaaaattatttttcaacagggctttctgttgtattgctgaacaggggcggacgctatgcccggcgcggcctattccatgatcttgagaaaacaggctttgatgccgtcatttccgtagagcctgaacctgcccattatgatcttgatgagctttccgcccgattcccttttgtacgatttgtaataccgcatacacggatcagccttggggaacagattaacctggcggtatccgaacttgattcccccctctttttcgtcctctggaacgatcttaaaatgattgccgggggcgccgcccacaggatggctgaaagactgacccgtcccgccgaaaccaatggcaagggaaaaggaaaaagaaaattcatgcggctctgcactgtccccgtgattcaaaactcacgccatgatacgcttcctacaataatcgcgcctgttatacgccacaataaaattcagacccgctttctcaacccttcaggcgagggactccccagcctgtacccatttgacggagtcggcatatatgaccgtgaacgttttatccggctgggaggatttgacgggacattcaagaatacctattggcagcttatggattttggttttcgcgcctatctttggggtgaggaaatttcctccacgcaggcgctgaaactgtcctatgagtcatccgtccctgctgaagaaaacaaaggcgacgcggactataaccgtttttacctcaagaatcttgcccccctattccagggcgacagcgcccaactgcccctgcgacgctttcccggttttttactgcaaaccgacggcagtattcttgccgcctgggatgatttttccgaaagccgccgctgggtaaacgccaaccgtttccgctggcactgcgacccgcggaccattgtcaaacgctgggacctggaatccgccgaagaaaattttctccccggaaacgggggactttaa

SEQ ID NO: 33014 - protein, 386 aa, Unknown
  Obtained from environmental sample
  misc_feature (1)..(386): Xaa is any amino acid
METRSPNRGQMPLKSSGKGASNFIRNRRVKYPAEKNTILFAQDAMNTIPTTFNQDFPSYTVIGGRENYFSTGLSVVLLNRGGRYARRGLFHDLEKTGFDAVISVEPEPAHYDLDELSARFPFVRFVIPHTRISLGEQINLAVSELDSPLFFVLWNDLKMIAGGAAHRMAERLTRPAETNGKGKGKRKFMRLCTVPVIQNSRHDTLPTIIAPVIRHNKIQTRFLNPSGEGLPSLYPFDGVGIYDRERFIRLGGFDGTFKNTYWQLMDFGFRAYLWGEEISSTQALKLSYESSVPAEENKGDADYNRFYLKNLAPLFQGDSAQLPLRRFPGFLLQTDGSILAAWDDFSESRRWVNANRFRWHCDPRTIVKRWDLESAEENFLPGNGGL

SEQ ID NO: 33015 - DNA, 924 bp, Unknown
  Obtained from environmental sample
  misc_feature (1)..(924): n is a, c, g, or t
ttgaaaaaacaaaaggtcgatctgcttttttcaaaaggcggttttgtcagtgtgccgccctgcgccgcggccgcttcactggggattcctgtttttacccatgagtctgattttagtccgggccttgccacaaggcttaacctgcgctttgtgcgtaaaaccaaaggcagggtttttatcgcgtatgaggatacggctaggtttctggcaaaaagccgactcgccaaagagcaggtgatcgttagcggtaatccggttcgcgccgcctttcgttcagccgatccggcaaagggccgggcctttctgaggctggagcagaacgaaagggtgcttcttgttctggggggcagtcagggcgcaagggagctaaacacgctggttcgcggcgctatgccggatctgcgccgccattacacagtagtacaccagtacgggcccgcgcaggactgggacttgccaagaacgcaagggtatattccgcttccctatataaaagaagaaatgccccatgtacttgcggcggctgaactggtgcttgggcgcagcggagccggaactgtctgggaaagcgcggctttgggcaagccaatggtattgatccccctttgcggctccggcacaaggggcgatcaggttgaaaacgcccggttctttgaaagacaaggggcagcgctggttttgttaggcgaagaggcgcagcctaaaaatctttccgctttgatcaacgcccttgccgaagatccttcaaggcgggaagcaatggcgaatgtggcaagggggattggcagtcttgacggatcggcgattatcagtggttctcttttgggtggaatacagggcaantcccgcctgccgagtgaaacactttctcagcgagggcataagacgggactttatcgaaaaaacagcgcaggaatggggtag

SEQ ID NO: 33016 - protein, 307 aa, Unknown
  Obtained from environmental sample
  SIGNAL (1)...(24)
  DOMAIN (110)...(270): Glycosyltransferase family 28 C-terminal domain
  misc_feature (1)..(307): Xaa is any amino acid
MKKQKVDLLFSKGGFVSVPPCAAAASLGIPVFTHESDFSPGLATRLNLRFVRKTKGRVFIAYEDTARFLAKSRLAKEQVIVSGNPVRAAFRSADPAKGRAFLRLEQNERVLLVLGGSQGARELNTLVRGAMPDLRRHYTVVHQYGPAQDWDLPRTQGYIPLPYIKEEMPHVLAAAELVLGRSGAGTVWESAALGKPMVLIPLCGSGTRGDQVENARFFERQGAALVLLGEEAQPKNLSALINALAEDPSRREAMANVARGIGSLDGSAIISGSLLGGIQGXSRLPSETLSQRGHKTGLYRKNSAGMG

SEQ ID NO: 33017 - DNA, 414 bp, Unknown
  Obtained from environmental sample
  misc_feature (1)..(414): n is a, c, g, or t
atgaatataagcaatataccgtatccctcattcccaagcgtggggtatgcgatcagcattgcccagagcaatggcagggcgtcggttcccgtttccccttcggcctatatttactcgcaatttgagcatgtttccggtgtgccagccccagaaggcgtgagaggggtaaacatcgacaagctgaaaatcctcgacactcttattggtcagctttcccgcatgaaacaacagcctgaagccgctgaagcgtttgaattccaggagattgggccggatcagggcaacgagaagcgtataaacaaccttattgagcaataccagaaccagatacggacaactcaggcggcgaacgcgaataacccttacgcagcttcggctccaatggttggcgcagtattcagcattagcgtttag

SEQ ID NO: 33018 - protein, 137 aa, Unknown
  Obtained from environmental sample
  misc_feature (1)..(137): Xaa is any amino acid
MNISNIPYPSFPSVGYAISIAQSNGRASVPVSPSAYIYSQFEHVSGVPAPEGVRGVNIDKLKILDTLIGQLSRMKQQPEAAEAFEFQEIGPDQGNEKRINNLIEQYQNQIRTTQAANANNPYAASAPMVGAVFSISV

SEQ ID NO: 33019 - DNA, 579 bp, Unknown
  Obtained from environmental sample
  misc_feature (1)..(579): n is a, c, g, or t
atggaacaacaggcggacacgcaaaaacaggctattgcgttgaaaatgaaacaagcggcaggcaaggtggctgttgattcgcttgtaaaaagcgggatgaagctcggccttggcaccggctctaccgccattcacgcgatccgcagggtgggcgaactcatgtcgcagggattgttaagcgatatttgcgcttttgccacaagtttccagtcggaaattgaatgtgaaaaattgaagattccttttttccccctgaattcacgggaactggccggcagtcttgacctaactatagacggcgcggatgaggttgatccgcaaagttacttgataaagggcggcggcggcgcgatgcttattgaaaaactcgccgcttatgcttccgccgcttttgccattacggttgacgaatcaaaagttgtcaaccgcggtttgggaacgggattccctgttccagtggaagtgatcccggaggcaagagccagcgcgagcatggcgcttgaggctatgggcgcggcggtcactctgcgcgaggctctgcggaaagccggcccggttatcaccgagcaggaaacctga

SEQ ID NO: 33020 - protein, 192 aa, Unknown
  Obtained from environmental sample
  DOMAIN (62)...(192): Ribose 5-phosphate isomerase A (phosphoriboisomerase A)
  misc_feature (1)..(192): Xaa is any amino acid
MEQQADTQKQAIALKMKQAAGKVAVDSLVKSGMKLGLGTGSTAIHAIRRVGELMSQGLLSDICAFATSFQSEIECEKLKIPFFPLNSRELAGSLDLTIDGADEVDPQSYLIKGGGGAMLIEKLAAYASAAFAITVDESKVVNRGLGTGFPVPVEVIPEARASASMALEAMGAAVTLREALRKAGPVITEQET

SEQ ID NO: 33021 - DNA, 1116 bp, Unknown
  Obtained from environmental sample
  misc_feature (1)..(1116): n is a, c, g, or t
gtgggcaaaatacgctcaatacgccattcngaagatgaaatagttaaactggccgtaatggtaaattccacaagggaagtgcttgatctcctgcgcgccgggaaggaaagcaaggggcaggaaaagatcctgattgcgatggggcctctcggggtgtacagcaggatacttgccgagcagttcggttcctttctgagttactccagcgcgtatgccgagcctgacatcccccatgtcgcgcagggccagcttgatatccgggaacttgcgaagctataccgtttccgcagcattacaactaacacaaaagtgtacggcgttacagggtttccgcccaatgtagccggaaatctccattttttcaacatgatcttcgggttggaggatattgacgctgtttacgcgccttttcccatggactcagttgacacgttcatggagttggcgaaagaactgggcgtgaatggtctttcggtaaccgtcccatacaaagaggctgttatgccctttcttgaggaccaaagccctgaggtacagaacattaaagcgtgcaatactctttgccaaagtcaatatggctggatgggaacaaacacagaggcaagagggttttcaaattcactgctggcttttttgaacaggtcaaacctcaagcggacgatggttaccgttatcggagcgggcggcgcggcaagggctgttgcctcggaactgcacaggctgggcgcaaaggccctgatcctgaacaggaccgtccacaaggctcgtaatctcgccgccgcctacaaatttacctggggcggcctggacaaccgcggcattgacatgatggacaaatatagtgatattataatacagaccaccccggccgggatggaaggaaatgattcaagcgatcctgtagcgatgtatagtttcggcggacgggaaatcgtgatggatctgctctaccggccggaaagaacagatttccttaaaagagccgcagacgcgggctgtaaagtacaaaatggatatgatatgtttatcagacaggcacaataccagtatgccttgtttacaggaaaggaattcccggaatatctgatggcgcggcttcagatggacggtgactga

SEQ ID NO: 33022 - protein, 371 aa, Unknown
  Obtained from environmental sample
  DOMAIN (204)...(325): Shikimate / quinate 5-dehydrogenase
  misc_feature (1)..(371): Xaa is any amino acid
MGKIRSIRHSEDEIVKLAVMVNSTREVLDLLRAGKESKGQEKILIAMGPLGVYSRILAEQFGSFLSYSSAYAEPDIPHVAQGQLDIRELAKLYRFRSITTNTKVYGVTGFPPNVAGNLHFFNMIFGLEDIDAVYAPFPMDSVDTFMELAKELGVNGLSVTVPYKEAVMPFLEDQSPEVQNIKACNTLCQSQYGWMGTNTEARGFSNSLLAFLNRSNLKRTMVTVIGAGGAARAVASELHRLGAKALILNRTVHKARNLAAAYKFTWGGLDNRGIDMMDKYSDIIIQTTPAGMEGNDSSDPVAMYSFGGREIVMDLLYRPERTDFLKRAADAGCKVQNGYDMFIRQAQYQYALFTGKEFPEYLMARLQMDGD

SEQ ID NO: 33023 - DNA, 1029 bp, Unknown
  Obtained from environmental sample
  misc_feature (1)..(1029): n is a, c, g, or t
ttggccgagggcattacagaaatgaatgagcgccgtcttgtcgccgagcaggagttttatgatatagccgatttagcgtcttccgccgggcttttaagttttatggatgaaacctttaacgatataatgataaatgcccttaaaagatgcaccaccctcgaaggactgataatctccggccctaacggcgaagaaggttttgaaaaagaacctggaagggcgataacatgggtgaataactcgccgcgattcaggaatcgtcttgatttttcccggcagcagctttaccagcaattacgcatacatggtctgcggaatgtcaatattcaggcggtggccggggcttttgattatacggagatttcaaaaattcttaagaaggctttgcttcctgttatcattgcctttgtgttggcgtttcttaccttgttaatgggagcgctgaacaggagacaggtaaaaacagaaaagaaaaccgataccgctgaaaccgtcagggaagccccaaagcaaaacacacgcggcggttattccgagcggggccgcatcgtcagacaggaaaacaccgaaaccaggcttaccgaggaactgcgccgctgcgccgccgcgggccaggatctgtcttttatcgcgatggaattcaaacttgttgttgacgatcccacctacgcccgtattagcgccgacaccgcgcgttttttctcatccagggattttatctgcgagaggggcgaacgcggcatttcggtgatttgtccgggccttaacctggacgcgggattccttaacgcgggcgaattccatacccgcctggtcgggaaatacccaagcctgattaaatccaaaaccgatctttgcataggtctttcagcccgctccggacggcctgttgacgccgagcgcctgatgttcgaggccgaggaagctctggaacgcgccatgatggatccaatatcgtttattgtcgccttcaaaagcgaccctgaaaaatacagggcgtttatggcatcacgaaacgagaattattaa

SEQ ID NO: 33024 - protein, 342 aa, Unknown
  Obtained from environmental sample
  misc_feature (1)..(342): Xaa is any amino acid
MAEGITEMNERRLVAEQEFYDIADLASSAGLLSFMDETFNDIMINALKRCTTLEGLIISGPNGEEGFEKEPGRAITWVNNSPRFRNRLDFSRQQLYQQLRIHGLRNVNIQAVAGAFDYTEISKILKKALLPVIIAFVLAFLTLLMGALNRRQVKTEKKTDTAETVREAPKQNTRGGYSERGRIVRQENTETRLTEELRRCAAAGQDLSFIAMEFKLVVDDPTYARISADTARFFSSRDFICERGERGISVICPGLNLDAGFLNAGEFHTRLVGKYPSLIKSKTDLCIGLSARSGRPVDAERLMFEAEEALERAMMDPISFIVAFKSDPEKYRAFMASRNENY

SEQ ID NO: 33025 - DNA, 354 bp, Unknown
  Obtained from environmental sample
  misc_feature (1)..(354): n is a, c, g, or t
atggagagctcggccgaaggcggcagacaatttttccccataagccatttcgatactgcttttacgtacattgacaggcttatagccgaataccggagtcttgataaaaatgacaagaaaaaaaacgcccaaaaacttgctgaaattctggataacgtgaattatctgcacccgttccgagaagggaacggcagaacacaacgggaatttctgcgaaccctcgcgtctgagaaaggatatatccttaatctgaacccgcctgataatgccgatgtctacgagcgttatatgagcggaacgatagagggcgatgtaggtaagctggcggaattgattggggaattgcttgagtaa

SEQ ID NO: 33026 - protein, 117 aa, Unknown
  Obtained from environmental sample
  DOMAIN (1)...(102): Fic protein family
  misc_feature (1)..(117): Xaa is any amino acid
MESSAEGGRQFFPISHFDTAFTYIDRLIAEYRSLDKNDKKKNAQKLAEILDNVNYLHPFREGNGRTQREFLRTLASEKGYILNLNPPDNADVYERYMSGTIEGDVGKLAELIGELLE

SEQ ID NO: 33027 - DNA, 471 bp, Unknown
  Obtained from environmental sample
  misc_feature (1)..(471): n is a, c, g, or t
ttgacggaagaaatatttgaaatgtacaatctggccgaaggaaaatttaaggtttacaataaaaaagatattgaagttctttccggaccaacccatgttattacatccgattatccggagaccgcgttcaggcagatactatgtaatgccattttacatcgccgctacgaggaaaataacgcgccgattcatttttactggtacaaagacagaatagaaattaacagtcccggcggtccctttggggatgttacgattgataatttcggaacgccgggtctggtttcttaccgtaaccgcaatcttgctgaagttatgaaaaacctggatctgggccagcgctttgggtttggaattaaatgggcaagagaaacaatggcggaaaacggcaatccgccgatagaatttcaggtgagtaatggcaatgtgtgctgcattttgaggaagaggcctgatatttccggtcaataa

SEQ ID NO: 33028 - protein, 156 aa, Unknown
  Obtained from environmental sample
  misc_feature (1)..(156): Xaa is any amino acid
MTEEIFEMYNLAEGKFKVYNKKDIEVLSGPTHVITSDYPETAFRQILCNAILHRRYEENNAPIHFYWYKDRIEINSPGGPFGDVTIDNFGTPGLVSYRNRNLAEVMKNLDLGQRFGFGIKWARETMAENGNPPIEFQVSNGNVCCILRKRPDISGQ

SEQ ID NO: 33029 - DNA, 552 bp, Unknown
  Obtained from environmental sample
  misc_feature (1)..(552): n is a, c, g, or t
atgctggcgactgagggagtaatgggcgatgcccttgcgtacctcggttattcggtaaacacggtggatccggcaaaggtggaagaggcaagaaagcttatcaacaatttatggaagcctaaccttgttaaattcgacgccgaggctttcggaaaaggctatgccaacggcgatttttgggtggtacagggttatcccgaagtcgtatttgaggaaattgcggataatgacaagctgatggcagatacggttttctttattccttccgaaggggggccggcgtacattgacagtatgtgcatcttaaaaggctcaaagaatattgatgtcgcccataagtttatagattttatccaccgcccggaaatttacgctgagtttgccgacatcttcggttttcccgcaacggcgaatatccccgcgcgaaaacttaaaaccggaaattcatggtacacggaaacggaacttgaaaatgtagaagtcaaaaaagatatcggagacaaattagagctctataacgaggcttggtttaattcgataaggattgactaa

SEQ ID NO: 33030 - protein, 183 aa, Unknown
  Obtained from environmental sample
  misc_feature (1)..(183): Xaa is any amino acid
MLATEGVMGDALAYLGYSVNTVDPAKVEEARKLINNLWKPNLVKFDAEAFGKGYANGDFWVVQGYPEVVFEEIADNDKLMADTVFFIPSEGGPAYIDSMCILKGSKNIDVAHKFIDFIHRPEIYAEFADIFGFPATANIPARKLKTGNSWYTETELENVEVKKDIGDKLELYNEAWFNSIRID

SEQ ID NO: 33031 - DNA, 744 bp, Unknown
  Obtained from environmental sample
  misc_feature (1)..(744): n is a, c, g, or t
gtgtttttatccgacaggcacgccggagtaggcggcgacggcgttgtgttgattatgccgtctgacactgcggacgcgaaaatgcgtatgtttaacatagacggaagcgaaggcggcatgagcggaaacgccattcgctgtgtcgcaaaatatttgttcgataacggcattgtaaaaaaacacgatatgcaaattgagacaaagagcggcttaaagaaactctatctttctacccgcaacggaacagtatcgtccgtaaaagttgatatgggatgcgcggaattacgccccgaacaaatccccgttaaattaaccggagaaaacgttataaaaagaaaagtaatcattgacgatgaaggatacgaaattacctgcgtttccataggcaatccccacgctgtgattttttgcgataaaattgacgatattcatttgggcacaataggcccgctgtttgaaaacgatccgttgtttcccgaccgtgtaaacgttgagtttgtaaaagtgatggacaaaaaccatttaaagctccgtatatgggaacgcggaagcggcgaaacacaagcaagcggaaccgccgcctgcgccgccgctgtagccgccgtgttgaacggatactgcgaaaaagataccgatatcaaagtacgcctgcccggcggcgatttatttatccgttacaccgataaagctgtttacatgaccggagattgcataaaagtttttgacggcacggtggagatataa

SEQ ID NO: 33032 - protein, 247 aa, Unknown
  Obtained from environmental sample
  DOMAIN (1)...(96): Diaminopimelate epimerase
  misc_feature (1)..(247): Xaa is any amino acid
MFLSDRHAGVGGDGVVLIMPSDTADAKMRMFNIDGSEGGMSGNAIRCVAKYLFDNGIVKKHDMQIETKSGLKKLYLSTRNGTVSSVKVDMGCAELRPEQIPVKLTGENVIKRKVIIDDEGYEITCVSIGNPHAVIFCDKIDDIHLGTIGPLFENDPLFPDRVNVEFVKVMDKNHLKLRIWERGSGETQASGTAACAAAVAAVLNGYCEKDTDIKVRLPGGDLFIRYTDKAVYMTGDCIKVFDGTVEI

SEQ ID NO: 33033 - DNA, 348 bp, Unknown
  Obtained from environmental sample
  misc_feature (1)..(348): n is a, c, g, or t
atggttgtagccgctattacacaatgcgtaacaagagatgaagattttaccgcaagatacggcggagaggaatttgtagtagttttaccgaataccgaccaaaacggcgctcagatgattgctgaaaaaatactggagaaagtacgcagctgtaatatacctcacgaaaaaaatgaagtagcaaagtatataactgtttctatcgggggcacaaccggtgttgttaatcatttacagattggaagcgactacataaagtgcgccgataaagcattatacgaatccaagaaaaacggccgcaacagatacacatttgagaattttgagcattatggaattaatgaataa

SEQ ID NO: 33034 - protein, 115 aa, Unknown
  Obtained from environmental sample
  DOMAIN (1)...(102): GGDEF domain
  misc_feature (1)..(115): Xaa is any amino acid
MVVAAITQCVTRDEDFTARYGGEEFVVVLPNTDQNGAQMIAEKILEKVRSCNIPHEKNEVAKYITVSIGGTTGVVNHLQIGSDYIKCADKALYESKKNGRNRYTFENFEHYGINE

SEQ ID NO: 33035 - DNA, 381 bp, Unknown
  Obtained from environmental sample
  misc_feature (1)..(381): n is a, c, g, or t
ttgggatatataaagcgcccgcgcctgatattttttttgagccttgccataattctctatgttatactggtcttttttgtgcccctgcggggctggactatggcgttccggaatttcaggcccccgagaaaattttttcagcaagaatgggtgggtttacaatggtttaaaatgctgtttgaggataagacctttctgaggaccattcgcaatacccttgccatgagcgttataaacacctcactgggctttataacggccataggcttcgcgcttattctgaacgaagtaagaaaaatattatttaaacggtttattcagactatatcctaccttccccacttcctttcatgggtcatagttaccagccttgtattctag

SEQ ID NO: 33036 - protein, 126 aa, Unknown
  Obtained from environmental sample
  misc_feature (1)..(126): Xaa is any amino acid
MGYIKRPRLIFFLSLAIILYVILVFFVPLRGWTMAFRNFRPPRKFFQQEWVGLQWFKMLFEDKTFLRTIRNTLAMSVINTSLGFITAIGFALILNEVRKILFKRFIQTISYLPHFLSWVIVTSLVF

SEQ ID NO: 33037 - DNA, 912 bp, Unknown
  Obtained from environmental sample
  misc_feature (1)..(912): n is a, c, g, or t
ttggagccaaatttggaagtcccggaaaaaccgggcatcattcaaaagaaaccgggtgaaaacaggcctgaaccctattacggagatgattcagatgaatctgatacggaagacatcgatcaggaagagacggatgaagacgacattgattatcctgacgccgatcaggaagaggcggataatccccgccctaaacttacggacttctatttgttttccaaaaaagaaatacgcattaatttttccgaaactgttaaaattgtttcctgtacttttacccagtatcaggaaattgaaagtattcaggacggaaaaaccgtaaaaatttatttaaaagaaaaccttgaattacagacggattgtttaattaagcttaatttgaaagataattgtgacaattcgttatccgtcgaagttcccctttctgccaattacctgattccggaaattgaaataaatgaattacgcactgaaaaatcaactaacttgaaagaatttattgaatttaaaataaagtcagatgggaatttgggtggattactgctttacattatgtgggaatcaaaaaaaccatatatatttgaattccccgccgtaaacgtaaaatcaggtgaatatgtggtgtttcatcttcgtactaagggaaatggttgcattaatgaattaggagatgacctgtctgaatctataggaaatgactcctgccctactgcgcgtgatttatgggttcccggcgatgatgattggcttcataaaactgatattgtgtatttacaggatttaaacggcatgattctggatgcgattattatgaatgaaacccccggtgaaaaatggaaaaagacttttcgcatttcgcggaaattactgaagatctttttaacaagggtgcatggaaatccgcggacgtaa

SEQ ID NO: 33038 - protein, 303 aa, Unknown
  Obtained from environmental sample
  misc_feature (1)..(303): Xaa is any amino acid
MEPNLEVPEKPGIIQKKPGENRPEPYYGDDSDESDTEDIDQEETDEDDIDYPDADQEEADNPRPKLTDFYLFSKKEIRINFSETVKIVSCTFTQYQEIESIQDGKTVKIYLKENLELQTDCLIKLNLKDNCDNSLSVEVPLSANYLIPEIEINELRTEKSTNLKEFIEFKIKSDGNLGGLLLYIMWESKKPYIFEFPAVNVKSGEYVVFHLRTKGNGCINELGDDLSESIGNDSCPTARDLWVPGDDDWLHKTDIVYLQDLNGMILDAIIMNETPGEKWKKTFRISRKLLKIFLTRVHGNPRT

SEQ ID NO: 33039 - DNA, 369 bp, Unknown
  Obtained from environmental sample
  misc_feature (1)..(369): n is a, c, g, or t
atggctagaattgctggtatagatttgcccaagaacaagagcgttgaatatggcttaacggctatnttcggcgtgggcttgcacacttcccgcgaagtttgcggcaaacttgggatagacaaaaacaaaaaggtggaaaccctttcagaagaagaacagggcaaaatacgccgtatgctcgaagaggagtataaggtagaaggtcagttgagggcagagataaccctgaacatcaagcgtttgcaagacatcggttgctatcgcggctctaggcaccgcaaaggtttgcctgcaaggggtcagcgtacccgcaccaatgctcgcactcgcaagggtccaaagaaaacagtggctaacaagaagaagtaa

SEQ ID NO: 33040 - protein, 122 aa, Unknown
  Obtained from environmental sample
  DOMAIN (3)...(109): Ribosomal protein S13/S18
  misc_feature (1)..(122): Xaa is any amino acid
MARIAGIDLPKNKSVEYGLTAXFGVGLHTSREVCGKLGIDKNKKVETLSEEEQGKIRRMLEEEYKVEGQLRAEITLNIKRLQDIGCYRGSRHRKGLPARGQRTRTNARTRKGPKKTVANKKK

SEQ ID NO: 33041 - DNA, 720 bp, Unknown
  Obtained from environmental sample
  misc_feature (1)..(720): n is a, c, g, or t
atgattatggaatacgagcaattcgcagccggcaaccaaaaattgatgatagaggtgatggtaattggaatggtgatagccattataggttttattgtgttcattgagcaggcaaatagacgcattccgcttcaaagccccaaaagggttgttgggcgcaaggttatgggcgggcagtccagttatttgccattcaaagtaaataccgcgggcgttattcctgttatttttgcatcttccattatgtttgttccagctatgatagcttcttggttcccaaatacaggctggatagaagcatttgcaggagcgtttttgccgggccacataacatatagcgttatttttgctttattaattatattcttcacctatttctacacagcaattcaatacaacccaagcgatattgcagacaacctaaagaaatctggtggttttatcccaggcattcgcccagggcgcaaaaccgctgaatacatagataatattttaacccgcataacacttcctggtgcaatatttttagcaaccataagtgttggcccattgcaccttaaagatgctttgaatatgtctttttatatgggcgggacatctgttttgattgtggtgggcgtagccctagacactttaaggcaaatagaggctcaattgcacactaagaattatgaaggtttcttaaagcacggccgcattcgcggcaggatggcatcttag

SEQ ID NO: 33042 - protein, 239 aa, Unknown
  Obtained from environmental sample
  DOMAIN (1)...(214): eubacterial secY protein
  misc_feature (1)..(239): Xaa is any amino acid
MIMEYEQFAAGNQKLMIEVMVIGMVIAIIGFIVFIEQANRRIPLQSPKRVVGRKVMGGQSSYLPFKVNTAGVIPVIFASSIMFVPAMIASWFPNTGWIEAFAGAFLPGHITYSVIFALLIIFFTYFYTAIQYNPSDIADNLKKSGGFIPGIRPGRKTAEYIDNILTRITLPGAIFLATISVGPLHLKDALNMSFYMGGTSVLIVVGVALDTLRQIEAQLHTKNYEGFLKHGRIRGRMAS

SEQ ID NO: 33043 - DNA, 357 bp, Unknown
  Obtained from environmental sample
  misc_feature (1)..(357): n is a, c, g, or t
gtgacgccggctttaaccctattgctaaaaccaaagccggccgcacttctcccgaagttacgtgcgcattttgccgagttccttaacgcgagttctctcgtgcgccttagatttctcatcccgcccacctgtgtcggtttgcggtacggtcttcctgaccttagccagaggggattgtttctcggcgccttgattacgcccgcttcgccttcccgtagtcaggctcgctgtcaccactcgcctgaaggcgtttcctccgcccccattagcttgcggcttcgaccgggacaaccgtcgcccggccgggtttcacctcacgcgtcatcccttgaaatcaggaacggtaccggaatatga

SEQ ID NO: 33044 - protein, 118 aa, Unknown
  Obtained from environmental sample
  misc_feature (1)..(118): Xaa is any amino acid
MTPALTLLLKPKPAALLPKLRAHFAEFLNASSLVRLRFLIPPTCVGLRYGLPDLSQRGLFLGALITPASPSRSQARCHHSPEGVSSAPISLRLRPGQPSPGRVSPHASSLEIRNGTGI

SEQ ID NO: 33045 - DNA, 798 bp, Unknown
  Obtained from environmental sample
  misc_feature (1)..(798): n is a, c, g, or t
atggacgcgtccggatgtgttcactacaagaccgacgtagaataccagggatttaacatggacgagagcttctacaagctgtccggccagattgagataaagaaccttactttcggatacaacaggctgtccgagcctttattggctaatttcaacatgactctgaaacccggcgggagcgtggcgctggtcggggcctcggggtgcggaaaatccaccatagccaagctcatcagcaacctctataaaccgtggagcggcgagatcctcttcgacggcaaggcgagcggagagataccgcgcgaaatcttcacaagctcggtgtcggtggttgaccaagacatcatactgttcaacgacagcataaacaacaacataaaaacgtgggacaagtcaatcgaagacttcgaggtgatcttggcggcgcgggacgcgcagatacacggcacaatcatggatcgcgacggcggctatagcggcgacgtgctggagggcggcaaaaacttttcgggcggcgagcgccagcggctggagatcgccggggctttggcaaacgacccgaccatcgtgatactggacgaggcgacaagcgccctcgacgccaagaccgaacacgacgtcatcaaagccattcggaaaaggggcatctcaatggtagtcgttgcccatcgcctgtcaaccatacgcgactgcgatgaaatcatcgtattggacaaaggcagtgtggtgcagcgcgggacgcacgacgaattattcgctgccgggggcagatacagagagttggtgagcgtaaattga

SEQ ID NO: 33046 - protein, 265 aa, Unknown
  Obtained from environmental sample
  DOMAIN (58)...(240): ABC transporter
  misc_feature (1)..(265): Xaa is any amino acid
MDASGCVHYKTDVEYQGFNMDESFYKLSGQIEIKNLTFGYNRLSEPLLANFNMTLKPGGSVALVGASGCGKSTIAKLISNLYKPWSGEILFDGKASGEIPREIFTSSVSVVDQDIILFNDSINNNIKTWDKSIEDFEVILAARDAQIHGTIMDRDGGYSGDVLEGGKNFSGGERQRLEIAGALANDPTIVILDEATSALDAKTEHDVIKAIRKRGISMVVVAHRLSTIRDCDEIIVLDKGSVVQRGTHDELFAAGGRYRELVSVN

SEQ ID NO: 33047 - DNA, 1170 bp, Unknown
  Obtained from environmental sample
  misc_feature (1)..(1170): n is a, c, g, or t
gtgaaaatacagaaaaagtcgcttaacgtgtctgcgcagctttccggcatgacctattccatgctgtcgggcatccaaaaggtcaagctgaccggctcggaaaagcgcatattcgcgcggtgggcgcccaaatacaaggcggcggcgaatttcacttacaacccgccgttcatactgaaataccaaagcgttttgagctatgtcatctcaacggctgggctggcggcggtgtacttcatcgccatcatgtccaaaatgggcgttggcgaatacatggcttacaacacggcatacggcatggtgtccgcgtcggttttggcgcttggctctatcaccacggttttttcgtctctgaagccgcagcttgatattgtgtcgccgatcctgaaaacccagcccgaagtcagcgggagcaaaacagttgtgacaagcctgtcgggcggcgtcgagataaacaacctcacgttccgctatggcgagggcgggaaaaacgtgctggacggaatcaacatcaaaatccgtccgggccaatatgtggcagtcgttggcaaaaccggctgcggcaagtccacgcttgtgcggcttctattgggttttgagcagccgaacaaaggcgccatctattatgacgggaaagacataaacaagctcgacctgccctccctgcgccgcaggataggcgcggtgttgcagagcggcaaattgttcacgggcgatatttacggcaatatcgtcatatccgctccgaacctgacgcttgacgacgcgtgggaagcggcgcggatcgccgacatggccgaggacattgaggctatgcccatggggatgcacacgatcatcaccgagggcggcggcggcatctcgggtgggcagaaacaacggctgatgattgcgcgggccgtggccccaaaaccgaaaattctgatattcgacgaatcaacaagcgcgcttgacaacatcacgcaaaaacacgtcgccgattcgcttgccaagatgaagtgcacccgcatcgtcatcgcccacaggctttccaccatcaaggactgcgacaggatatatgtgctggaaaacggcaaaatcaccgaggaaggcacgtttgacgagctatacgcaaacaaaggctatttccacgaacttgtcagccgccagatgatcggcgagaccatatga

SEQ ID NO: 33048 - protein, 389 aa, Unknown
  Obtained from environmental sample
  DOMAIN (176)...(358): ABC transporter
  misc_feature (1)..(389): Xaa is any amino acid
MKIQKKSLNVSAQLSGMTYSMLSGIQKVKLTGSEKRIFARWAPKYKAAANFTYNPPFILKYQSVLSYVISTAGLAAVYFIAIMSKMGVGEYMAYNTAYGMVSASVLALGSITTVFSSLKPQLDIVSPILKTQPEVSGSKTVVTSLSGGVEINNLTFRYGEGGKNVLDGINIKIRPGQYVAVVGKTGCGKSTLVRLLLGFEQPNKGAIYYDGKDINKLDLPSLRRRIGAVLQSGKLFTGDIYGNIVISAPNLTLDDAWEAARIADMAEDIEAMPMGMHTIITEGGGGISGGQKQRLMIARAVAPKPKILIFDESTSALDNITQKHVADSLAKMKCTRIVIAHRLSTIKDCDRIYVLENGKITEEGTFDELYANKGYFHELVSRQMIGETI

SEQ ID NO: 33049 - DNA, 654 bp, Unknown
  Obtained from environmental sample
  misc_feature (1)..(654): n is a, c, g, or t
atgcgccgcgccttcaacaaagttgacctccgaaaactcgtgatactttccggcggcgtcgcggtacgtcgccgccaagactatcccttgatggcgcagttttttaaacggctctttggtggacacatatcccaaatcatacagcaccttgtgccaaaagcgggcgtaaagcaggtggagaacggcgtgttccgcgccgcctacgtagaggtctacgttcatccactgcttctccgcctctttgctccacggctcggcgccgttcttcgggtcgagataacgcaggtagtaccagcacgaccccgcccactgcggcatggtgtttgtctcacgcttcgcgtcggctccgcatttagggcacttcgtatttatccactcgttgatattggcaagcggcgactcgcccgtgccggagggttcgtatttgtcaacttcgggaagcatgaccggcaacgcgtcttccgggacgggaaccgcgccgcaggcggggcaatggacaatcggtatcggctcgccccaatagcgttggcgggagaaaatccagtcgcgcaacttgtaacttacggcggctttaccgtgacggcgctcctcaagccaagcgttcattttacgcttagcgtcgttgtagaaatccgggataagccctcgcgataa

SEQ ID NO: 33050 - protein, 217 aa, Unknown
  Obtained from environmental sample
  misc_feature (1)..(217): Xaa is any amino acid
MRRAFNKVDLRKLVILSGGVAVRRRQDYPLMAQFFKRLFGGHISQIIQHLVPKAGVKQVENGVFRAAYVEVYVHPLLLRLFAPRLGAVLRVEITQVVPARPRPLRHGVCLTLRVGSAFRALRIYPLVDIGKRRLARAGGFVFVNFGKHDRQRVFRDGNRAAGGAMDNRYRLAPIALAGENPVAQLVTYGGFTVTALLKPSVHFTLSVVVEIRDKPSR

SEQ ID NO: 33051 - DNA, 1230 bp, Unknown
  Obtained from environmental sample
  misc_feature (1)..(1230): n is a, c, g, or t
atgaacgcttggcttgaggagcgccgtcacggtaaagccgccgtaagttacaagttgcgcgactggattttctcccgccaacgctattggggcgagccgataccgattgtccattgccccgcctgcggcgcggttcccgtcccggaagacgcgttgccggtcatgcttcccgaagttgacaaatacgaaccctccggcacgggcgagtcgccgcttgccaatatcaacgagtggataaatacgaagtgccctaaatgcggagccgacgcgaagcgtgagacaaacaccatgccgcagtgggcggggtcgtgctggtactacctgcgttatctcgacccgaagaacggcgccgagccgtggagcaaagaggcggagaagcagtggatgaacgtagacctctacgtaggcggcgcggaacacgccgttctccacctgctttacgcccgcttttggcacaaggtgctgtatgatttgggatatgtgtccaccaaagagccgtttaaaaaactgcgccatcaagggatagtcttggcggcgacgtaccgcgacgccgccggaaagtatcacgagttttcggaggtcaactttgttgaaggcgcggcgcatctaaagtccacgggcgagaagttgaccgccgagatagagaaaatggcgaagtcgaaactcaacggcgtaaaccccgacgaagtggtggcgaagcacggcgcggacgttctgcgcctctacgagatgttcatgggcgagttcgaactgcccaagccgtgggatccgcgggcgattgagggttgcagccgctttctccgcaggttgtgcaaattggtcgatgagtttgtcgaaaagggcggggtaggggacgaggtcaacgcccgcgtccgccacaagaccataaaaaaagttacaagcgacctcgaagccatgaagttcaataccgcaatcgcggcgatgatggagtttgtcaatgtcctcacctcaaacggcgcgtcaaaagaagatttaatcgcgtttgtcaagttggtaagcccctacgccccccatctcggcgacgaactgtgggagaaactcggcgggaaaggcttcgtggtcaacgccgagtggccgaagtgggacgaggctatgacgctcgacagcgtggtcaccgttgtggtgcaagtcaacggaaaactccgcggagatttcaaacggcgcacgacgccggggaggagaactgaaagcggcggcgatggtcgttga

SEQ ID NO: 33052 - protein, 409 aa, Unknown
  Obtained from environmental sample
  DOMAIN (285)...(404): Anticodon-binding domain
  misc_feature (1)..(409): Xaa is any amino acid
MNAWLEERRHGKAAVSYKLRDWIFSRQRYWGEPIPIVHCPACGAVPVPEDALPVMLPEVDKYEPSGTGESPLANINEWINTKCPKCGADAKRETNTMPQWAGSCWYYLRYLDPKNGAEPWSKEAEKQWMNVDLYVGGAEHAVLHLLYARFWHKVLYDLGYVSTKEPFKKLRHQGIVLAATYRDAAGKYHEFSEVNFVEGAAHLKSTGEKLTAEIEKMAKSKLNGVNPDEVVAKHGADVLRLYEMFMGEFELPKPWDPRAIEGCSRFLRRLCKLVDEFVEKGGVGDEVNARVRHKTIKKVTSDLEAMKFNTAIAAMMEFVNVLTSNGASKEDLIAFVKLVSPYAPHLGDELWEKLGGKGFVVNAEWPKWDEAMTLDSVVTVVVQVNGKLRGDFKRRTTPGRRTESGGDGR

SEQ ID NO: 33053 - DNA, 873 bp, Unknown
  Obtained from environmental sample
  misc_feature (1)..(873): n is a, c, g, or t
gtgcgagctagggcctggatatatcacgattggagcggaaaacttgccgcctatctgaaatggcgcagggcgaatcagggtattgattcccgctctgcggccaaggttatttcctgtctgcgttctttctttcgttttgccgcgggtgaaggcattcgctctgataaccctgcggcccttttggaaagtccgcggcggcgttcccggcttccggaaactatggatcgccagacggttgaacggcttttggcagcgatagattcaaaaaatccgctgggattgcgggatcgggcgctgtttgagatgatctattcggcgggtttaagaatatcagaagcggcgggattgaatgtgcgcgacattgattttaaggaaggaatcgcgcgggtaaagggaaagggaagcagggaacggctcgttgtttttggccctgaagcggctgcatggctgaaacattaccttgaagaatcacggcctgttttggcgaagggcggcggacatgctccggccctgtttgttggcagaagcggtaagaggctttcacgcaaggggatatggaaaaactatgcgcgttatgcggcgattgcgggaacaggttcccgtgttcacacgctgaggcacagttttgcaagcggcctcttgcggggcggggctgatttaagaacagtacaggctttgctgggccatgccgatcttgccacaacccagatttatacccatgtggacgcgggtttattgaaagagagtcaccgcaaatatctgcccgcccttgggcacgccttagggcgcacccgtgtgcggtggccgggacgacacaaagaacggcttacggtcgacgaggagacggagaggacgataatgaggaaattttaa

SEQ ID NO: 33054 - protein, 290 aa, Unknown
  Obtained from environmental sample
  DOMAIN (82)...(248): Phage integrase family
  misc_feature (1)..(290): Xaa is any amino acid
MRARAWIYHDWSGKLAAYLKWRRANQGIDSRSAAKVISCLRSFFRFAAGEGIRSDNPAALLESPRRRSRLPETMDRQTVERLLAAIDSKNPLGLRDRALFEMIYSAGLRISEAAGLNVRDIDFKEGIARVKGKGSRERLVVFGPEAAAWLKHYLEESRPVLAKGGGHAPALFVGRSGKRLSRKGIWKNYARYAAIAGTGSRVHTLRHSFASGLLRGGADLRTVQALLGHADLATTQIYTHVDAGLLKESHRKYLPALGHALGRTRVRWPGRHKERLTVDEETERTIMRKF

SEQ ID NO: 33055 - DNA, 606 bp, Unknown
  Obtained from environmental sample
  misc_feature (1)..(606): n is a, c, g, or t
gtggggtactctcgatatnnggatggggaatgggtccggatataccgttatcagcaaaataaagttcgcaccagtttggcgaaacgcatcgcggatttgagtccgcgcggaggggggcctcccgaaacgattgaagacttaaaagcggctattgccgcttatgaggcgcagatcgagcaaaatgtaaaagacggcgtccagaccggcatatactggaaaatactggcgataaggctttccgaccgggagatgcaccgtgaagcccttgacgcttttgaacgggcgctccaattcaaaggcgatgaccccacgctgttctacctgaccggcgaatccgcttcggccgccgcgtccgcgactttgggtttttcaggaaattccgacgctgaaaaacaacgctatctgaaccttgccgaatcagcgtatctgcgttccattcaattagacgctacctatgccaaaccccgtttgggtctgggtattttatatacttttgagatgaaccgcccggctgaggcgattccccatttggaacgctttagggaacttgttcccaaagatcttaagggaatgttgtttggcgcgggcaactctcggccgatctga

SEQ ID NO: 33056 - protein, 201 aa, Unknown
  Obtained from environmental sample
  misc_feature (1)..(201): Xaa is any amino acid
MGYSRYXDGEWVRIYRYQQNKVRTSLAKRIADLSPRGGGPPETIEDLKAAIAAYEAQIEQNVKDGVQTGIYWKILAIRLSDREMHREALDAFERALQFKGDDPTLFYLTGESASAAASATLGFSGNSDAEKQRYLNLAESAYLRSIQLDATYAKPRLGLGILYTFEMNRPAEAIPHLERFRELVPKDLKGMLFGAGNSRPI

SEQ ID NO: 33057 - DNA, 750 bp, Unknown
  Obtained from environmental sample
  misc_feature (1)..(750): n is a, c, g, or t
gtgcatagaagaattgaccgcactcggaaagtggattgcaaaatgcctgtaaaaatttcactgggtatttccccttgcccaaacgatacctttatctatcaaaacctcattgagggcaaagtccaaaccccttgccccatttcagttgaatatgccgatgttcaaaccttgaatgaaaaagttttgaaaggcgaattggatatggcaaaagtgagctgtgccgtatatccattggttaaagaccattacagaattttagacagcggcggtgcaatgggctatggctgcggacctctgttgctttcttctttcagcgaaaaatttgaaccagaatttccggtatatttacccggcaaacaaacaaccgccgccgccttattcaaattctggataaaaaaaaataaccataatatccaaatcctaaaatttgacgaactctaccgagagctttgcgaaaaaaaaataaaacagggagtggttatacacgaacatcgctttacttggcaaagagacggtttgcatttaatagcagacctcggcgcatattgggaacaggaattgcaagttccaattccgctgggatgcacggttataaaaaaagatttgggcgaagaacttgccaaagagatggatttatgcgttcaaaaaagtttgaaactcgcttgggaacgcaaagaacctgttaccgatttcataagaaaactagcccaaatagacgatgatgatgtatttgcagctcggccgatctga

SEQ ID NO: 33058 - protein, 249 aa, Unknown
  Obtained from environmental sample
  DOMAIN (18)...(249): Uncharacterized ACR, COG2107
  misc_feature (1)..(249): Xaa is any amino acid
MHRRIDRTRKVDCKMPVKISLGISPCPNDTFIYQNLIEGKVQTPCPISVEYADVQTLNEKVLKGELDMAKVSCAVYPLVKDHYRILDSGGAMGYGCGPLLLSSFSEKFEPEFPVYLPGKQTTAAALFKFWIKKNNHNIQILKFDELYRELCEKKIKQGVVIHEHRFTWQRDGLHLIADLGAYWEQELQVPIPLGCTVIKKDLGEELAKEMDLCVQKSLKLAWERKEPVTDFIRKLAQIDDDDVFAARPI

SEQ ID NO: 33059 - DNA, 312 bp, Unknown
  Obtained from environmental sample
  misc_feature (1)..(312): n is a, c, g, or t
atggacatgcagcaaatgcttcgctcaatgcagaaaatgcagactcaaatgcagaagagtcaggagagcttgcggagccagagctttagttcggaagcgggcggcggcgcggtcaaggtgactctggatggcaacggagctttaacagaactcaaaattgccccatccgctgtggatgctggcgacgtggaagctctggaagaccttctaatggcggctttcaacgaagccatcgctaaaaaagacaaagcctatcaagaaagcgttggagctataaccaaaggcttgaaaatacctggaatgtcattttaa

SEQ ID NO: 33060 - protein, 103 aa, Unknown
  Obtained from environmental sample
  DOMAIN (7)...(99): Uncharacterised BCR, YbaB family COG0718
  misc_feature (1)..(103): Xaa is any amino acid
MDMQQMLRSMQKMQTQMQKSQESLRSQSFSSEAGGGAVKVTLDGNGALTELKIAPSAVDAGDVEALEDLLMAAFNEAIAKKDKAYQESVGAITKGLKIPGMSF

SEQ ID NO: 33061 - DNA, 531 bp, Unknown
  Obtained from environmental sample
  misc_feature (1)..(531): n is a, c, g, or t
ttgggcgaggcgcaaaggcagcgcagaaactttgagagcatttttcntgatttgctcattcacgaaataaacccagttctatttggcaacgaagcgattagctcttccngcataagggaatctttaaaaaacggagaattggacttagcaaactcaatgctcgggcgatgctattccctcggcggaattgttgagcacggctcggggcaaggcaggctgctcggcttccccaccgctaacttgcacctgccggactataaacttttgccgaaaaacggagtgtattttggaacagcctcttttgacaaacagaaacacaaagcagttatcaacataggcaacagaccttcccttgggaaccgccccgttgggctggaagcccatctgctaaattttgacggagatttatacggcaaaaaattatccgttgaactcaccaaacggctaagagacgaaataaagtttgacagcgttgatgctttgaaggaacagatcaagaaagacatcgcatcttgcaattcttgcaaatag

SEQ ID NO: 33062 - protein, 176 aa, Unknown
  Obtained from environmental sample
  DOMAIN (53)...(175): Riboflavin kinase
  misc_feature (1)..(176): Xaa is any amino acid
MGEAQRQRRNFESIFXDLLIHEINPVLFGNEAISSSXIRESLKNGELDLANSMLGRCYSLGGIVEHGSGQGRLLGFPTANLHLPDYKLLPKNGVYFGTASFDKQKHKAVINIGNRPSLGNRPVGLEAHLLNFDGDLYGKKLSVELTKRLRDEIKFDSVDALKEQIKKDIASCNSCK

SEQ ID NO: 33063 - DNA, 318 bp, Unknown
  Obtained from environmental sample
  misc_feature (1)..(318): n is a, c, g, or t
atggtaagtattgcttttaccggcggggggacaggagggcatatttatcccggactggcggttgcggcggagttaaaaaaactgctttccgaccgtgagtttgagttgatttggattggttcctccgctcgtctggatcgttcccttgtggaagaagccggaattaaattttttaatatcccttccggtaaattaagacgctatttttcgcttcggacttttgccgatttcttcaaagttatcgccggttttttcgccgcccgcagaatattgaaaaaacaaaaaacactttttctgttttccaaggcggttttgtaa

SEQ ID NO: 33064 - protein, 105 aa, Unknown
  Obtained from environmental sample
  SIGNAL (1)...(22)
  DOMAIN (4)...(105): Glycosyltransferase family 28 N-terminal domain
  misc_feature (1)..(105): Xaa is any amino acid
MVSIAFTGGGTGGHIYPGLAVAAELKKLLSDREFELIWIGSSARLDRSLVEEAGIKFFNIPSGKLRRYFSLRTFADFFKVIAGFFAARRILKKQKTLFLFSKAVL

SEQ ID NO: 33065 - DNA, 597 bp, Unknown
  Obtained from environmental sample
  misc_feature (1)..(597): n is a, c, g, or t
gtgcggagtgtttttcataacgcggacgccgaaaagggcagagctttnttaggcgttgatgatgacgagcggattcttctggttcttggcggcagtcagggggcggtcgagataaacgaacttatccgcgccaccttgccggaactgacgcaaatttacaccgttgtccatcaaactggaccgaatcttacatgggatgttcctgaaagtaaaaaatataaaccttttccgtacataaaagatgaaatgccgcacgtaatggcggccgcggaacttgttatgggcagaagcggggcgggtatttgggagtgggctgtacttggaaagccaatgttattgatacctttaagaggttccggcacaaggggcgatcaggtacaaaatgccgaatattttcaaaaagagggagccgcgcaggtgttaggtgaaaaaacaacgccgtgggcgttaataaacgcggttaattcttttgcgcaggatggggaaaaaagaaaaaatatgtccaaggcttccgcaaaaataggggagagggacggatctgtaattatcgcccgcgctcttgcggacgatgcgcggcgttttggaggagagaagtga

SEQ ID NO: 33066 - protein, 198 aa, Unknown
  Obtained from environmental sample
  DOMAIN (25)...(183): Glycosyltransferase family 28 C-terminal domain
  misc_feature (1)..(198): Xaa is any amino acid
MRSVFHNADAEKGRAXLGVDDDERILLVLGGSQGAVEINELIRATLPELTQIYTVVHQTGPNLTWDVPESKKYKPFPYIKDEMPHVMAAAELVMGRSGAGIWEWAVLGKPMLLIPLRGSGTRGDQVQNAEYFQKEGAAQVLGEKTTPWALINAVNSFAQDGEKRKNMSKASAKIGERDGSVIIARALADDARRFGGEK

SEQ ID NO: 33067 - DNA, 561 bp, Unknown
  Obtained from environmental sample
  misc_feature (1)..(561): n is a, c, g, or t
ttgcctgatagttttttttggcggtattattctgttgtcaataggtatcctcggacaatatatagcaaaaatgtacacggaaataaaacggcgtccgcattttattgtaaaggaagcacaatgaaaattattgaaatttttgaccggaaatttctcaggtttgttcttgtcggaataatcaatactattgttggctctgcaataatgttctcgttgtataacgcggcgcatttgagttactggctttcctcggcctgtaattattttttcaccagcattttaagtttctttttaaacaagtattttaccttcagtgtccggtattggtcggcatttatggtttttgcgtttatcctgactattgcgttttcgtatctgatcgcttacggcatctcaaaaccggccatgaattatgtgttaagggacagcccgcaaaaaatccgcgaaaatctggcgttacttaccgggatgtgtttgtttacagggataaattatcttggacaacggctggtcgtattcagggacgcaagaaataaaaacgacgagaaaatcgccggataa

SEQ ID NO: 33068 - protein, 186 aa, Unknown
  Obtained from environmental sample
  DOMAIN (53)...(173): GtrA-like protein
  misc_feature (1)..(186): Xaa is any amino acid
MPDSFFWRYYSVVNRYPRTIYSKNVHGNKTASAFYCKGSTMKIIEIFDRKFLRFVLVGIINTIVGSAIMFSLYNAAHLSYWLSSACNYFFTSILSFFLNKYFTFSVRYWSAFMVFAFILTIAFSYLIAYGISKPAMNYVLRDSPQKIRENLALLTGMCLFTGINYLGQRLVVFRDARNKNDEKIAG

SEQ ID NO: 33069 - DNA, 612 bp, Unknown
  Obtained from environmental sample
  misc_feature (1)..(612): n is a, c, g, or t
ttgcccaacgcgaaaaccaggggaataatagccatcaagctggatgaaggtgacaagcttgtcagtgcgcttttaactggcgctcaggacgaggtggtgcttatatcgcgaaagggcagggcgctgcgtacccacggggagcatgtccggcccgtgggcagatcctcgcgcggcgtgaccggcatgaagatgggcgatgacgacgaactcgcgggtctcctgagggtggacgcggaggaaaaaatgctcgtcatttccgcgtatggtttcggaaagcgggtggaattcggcgagtttagttcccacggacggggtacttcggggcagaaggtctacacggtcagcgaaaaaacaggcgagatcgtgggctgtgtcggcgttctggacaacgaagaaataatgtgtattacaagccagggcaaatccattaagttaaaggttgcctcaataagggtgatgggccgcagcgcccagggcgtgaagatactaagcatcgacaagccggattttgttatcggggtagaccgtatcgttaaaagcgaagaggtgaaggaagagccgcagacggagctttttgccgaagatggggacgcttccggggatgcggaataa

SEQ ID NO: 33070 - protein, 203 aa, Unknown
  Obtained from environmental sample
  DOMAIN (79)...(129): DNA gyrase C-terminal domain, beta-propeller
  misc_feature (1)..(203): Xaa is any amino acid
MPNAKTRGIIAIKLDEGDKLVSALLTGAQDEVVLISRKGRALRTHGEHVRPVGRSSRGVTGMKMGDDDELAGLLRVDAEEKMLVISAYGFGKRVEFGEFSSHGRGTSGQKVYTVSEKTGEIVGCVGVLDNEEIMCITSQGKSIKLKVASIRVMGRSAQGVKILSIDKPDFVIGVDRIVKSEEVKEEPQTELFAEDGDASGDAE

SEQ ID NO: 33071 - DNA, 1377 bp, Unknown
  Obtained from environmental sample
  misc_feature (1)..(1377): n is a, c, g, or t
ttgatcgcgaggaccggagttggccgcctacaccaaacgcatcatcaccctgcgcgacgggcaactggtgtccgacaaacaggtaacggacaggcgcagcgccgcggaggatctcgcgcaatggaaacgggatcacgcccttcttgccggggaggaagcgtgaacatagtccagcttttgcacacctgttttcgctcgattttccgcaaccgtatgcgtagcctgttaacatcattgggagtcataatcggcgttggatcggtaatcatcatggttgcgttaggcgaaggttcccagcgggcgattgaggcgcggattaccgccatggggaccaatttgctgcagatcatgccccggcggcagatgagccgcagcgggcagaatatgttaatgcggatgaacgcgtttaccaaaaatgacattcagaaactgagggaagagtcgagttttgccgcggctatatccggccttgtccagaccagcgccaatgtaacgggtagcgcggggaacgcccaggttggcgttcagggcgttgagccggattacattgtcgcccggaactggaatgttaactccggctccttttttgacgcggaggatatggcggcccgcagcaaggtggcagtcctaggccgcaccacggcgaagaatttattcggcgatgagaacagcgccctgtccgcccagatacggatcgggactgattattttaccgtcatcggccttttggaaagcaagggcgcggggatgaacggcaacgatcaggacgatgttgttatggttccgatggacacggcaatgacgcggctgaacaattcccgaaacatcaacacgattattatgagcgtgaacggcaaagaatacatggaagcggcacagaaagagacaacagcgatcctatgtgaatccagaagaatcaccgatacggcaaacgccgattttgacattatgaatcaggccgatatgatcgacatggcgtcggcaacgatgaaaacactgacaacgctgcttgccgctattgccggggtatctcttcttgtcggcggcatcggcatcatgaacattatgctggtttccgttaccgagcgcacacgcgagatcggcatacgaatggcaataggcggccgcaagcgggacatactttttcagttcctttacgaatcggtgatcctcagccttatgggaggccttattggtgtaggcatggctttccttgcctgcagtgcattgtcgaaaattggaatacctgcagccatcaacccgctgattgtggcggtttcggctatttttgccgccttggtgggggtcgtttttggctactatcccgccatgaaagccgcccggctttatcctattgacgcgctgaggtacgaataa

SEQ ID NO: 33072 - protein, 458 aa, Unknown
  Obtained from environmental sample
  DOMAIN (276)...(451): Predicted permease
  misc_feature (1)..(458): Xaa is any amino acid
MIARTGVGRLHQTHHHPARRATGVRQTGNGQAQRRGGSRAMETGSRPSCRGGSVNIVQLLHTCFRSIFRNRMRSLLTSLGVIIGVGSVIIMVALGEGSQRAIEARITAMGTNLLQIMPRRQMSRSGQNMLMRMNAFTKNDIQKLREESSFAAAISGLVQTSANVTGSAGNAQVGVQGVEPDYIVARNWNVNSGSFFDAEDMAARSKVAVLGRTTAKNLFGDENSALSAQIRIGTDYFTVIGLLESKGAGMNGNDQDDVVMVPMDTAMTRLNNSRNINTIIMSVNGKEYMEAAQKETTAILCESRRITDTANADFDIMNQADMIDMASATMKTLTTLLAAIAGVSLLVGGIGIMNIMLVSVTERTREIGIRMAIGGRKRDILFQFLYESVILSLMGGLIGVGMAFLACSALSKIGIPAAINPLIVAVSAIFAALVGVVFGYYPAMKAARLYPIDALRYE

SEQ ID NO: 33073 - DNA, 1095 bp, Unknown
  Obtained from environmental sample
  misc_feature (1)..(1095): n is a, c, g, or t
atgtcaggccgcgcagacgagcgtcaatcgttatctgactccgctttgaatcttaccgcgtctgtcaccatgctgccatgcaggggcgatacaggtatgctgaacaaggtttttgaacctctgggatacgaagtaagctataaggtctttaatgcagacgagaattttccagcctgggataaaattaaatatgtaaacctgaccattaatggcaaagtacgcttgcgcgatctactcaggcatatctatgtacttgttcccgtatttgacaggcaaaagcactactggtttggcaaagaagaagttgaaaagttaatgcagcatgcggaagaatggctgccgaatcaccctgaaaagaaattcataacaagccgctatttaaaatatatgcgcccactggttaatatggcttttgcccggcttgtttccgaagacgccccggatgttctttcggatgatgagctgcctgaagaaccaaccgaaaggaaattaaccctcaacacccagcgccttggcagcgtggttgcggcgcttaaaagttgtggggcgagaagtatcattgacatcggctgcggggaaggaaatcttttgtctttgctgataaaagaaaaacagtttgagcggatcgctggcgcggatgtctcgcattacgcgcttgagcatgccgctgaaagattaaatcttgataaggccggtgaaagcctgctaaagcgcatctcgttattccaaagctcgctcacatacaaagattcccgttttaaggattatgacgccgcctgcgttattgaagtaattgagcatttggacataccgcgcctgacagcttttgaacgggtgttgtttgaatacaccaaacctcctgtcgtggttcttaccacgccaaaccgtgaatacaatgtaaaatatgagcatctggacgaaacagccctgcggcacagcgatcatcgttttgaatggacacgctcggagtttcacaaatgggcgcaggatgccgccgggaaaaatggttactcggtacgattctcagaaatcggcgattctgatgaagcactcggtgcaccgacccagatgggagtgtttaccctatgcgaatag

SEQ ID NO: 33074 - protein, 364 aa, Unknown
  Obtained from environmental sample
  DOMAIN (187)...(290): Methyltransferase domain
  misc_feature (1)..(364): Xaa is any amino acid
MSGRADERQSLSDSALNLTASVTMLPCRGDTGMLNKVFEPLGYEVSYKVFNADENFPAWDKIKYVNLTINGKVRLRDLLRHIYVLVPVFDRQKHYWFGKEEVEKLMQHAEEWLPNHPEKKFITSRYLKYMRPLVNMAFARLVSEDAPDVLSDDELPEEPTERKLTLNTQRLGSVVAALKSCGARSIIDIGCGEGNLLSLLIKEKQFERIAGADVSHYALEHAAERLNLDKAGESLLKRISLFQSSLTYKDSRFKDYDAACVIEVIEHLDIPRLTAFERVLFEYTKPPVVVLTTPNREYNVKYEHLDETALRHSDHRFEWTRSEFHKWAQDAAGKNGYSVRFSEIGDSDEALGAPTQMGVFTLCE

SEQ ID NO: 33075 - DNA, 699 bp, Unknown
  Obtained from environmental sample
  misc_feature (1)..(699): n is a, c, g, or t
atggccttaaaaatccaggcgaaaaacaaaaccgctgaaatttggctctacggcgacatcggcgatggtttttgggccgagtctatcagcgccaagcagttcgtggacgaactgaaaaaggcgggaaacgtctcatccatacttttgcacgtcaattcgccgggagggtcagtctttgacggcctagccatctacaactccttgcgggcccactccgcccgggtggacgtggaaatagacggcatggccctatccatcgcttcggttatagctctggccggcgactcggtaaaaatggccggcaacgccttcatgatgattcacaacccctggacctggacctccggcgaggccaaggatttaaggaaagaggctgatcgtctggaccaggtgcgcgacagccttttaaatacctacgccgccaaggtctcaccaaaggccactaccgagcaggtcacggcctggatggacgaagaaacctggtttaacgccgaggacgccctgaaatacggcttcgcggacgaaattttcaatgctttggacgtggcggccaaatacgatttgagccgcttcggcttcaaaaatacgccggcgggtgccaaagaaaggtttgaaatgccgcaagagagcgccacgagagcccgactggcccgcatgagtttgattgtgcagcgcaacggcctgaaagccaggctttga

SEQ ID NO: 33076 - protein, 232 aa, Unknown
  Obtained from environmental sample
  DOMAIN (10)...(180): Clp protease
  misc_feature (1)..(232): Xaa is any amino acid
MALKIQAKNKTAEIWLYGDIGDGFWAESISAKQFVDELKKAGNVSSILLHVNSPGGSVFDGLAIYNSLRAHSARVDVEIDGMALSIASVIALAGDSVKMAGNAFMMIHNPWTWTSGEAKDLRKEADRLDQVRDSLLNTYAAKVSPKATTEQVTAWMDEETWFNAEDALKYGFADEIFNALDVAAKYDLSRFGFKNTPAGAKERFEMPQESATRARLARMSLIVQRNGLKARL

SEQ ID NO: 33077 - DNA, 936 bp, Unknown
  Obtained from environmental sample
  misc_feature (1)..(936): n is a, c, g, or t
gtgccgcttgatgccgatgtctgggatgaaaataactggcttttggcaaacccggccctgggcgattttcgcagtctcaaagaattgcgggaagtggcccaaaaggccaagcggatgcctggccaggaatccgcctaccgcaacctctacatgaaccagagggtttgcgtcgatgggcgcttaattcctcaagaagtttggaaagccaacggggcggagccggacttggatttgttctatgaccaaccctgttggggaggcctggacctgtccaaaaagaacgacttaacggccttggttttcgtgacccggacccaggagggcaagtggggcgtcctgccctatttctggacccccggcggcaaccttcttgagcgggccgaccgcgacaaggccccctatgacctctgggtgcaacagggctttatgagcgccacccagggcatggttattgactacgctttcgtggcccggaaagtggccgagctgcacggccgcctcaacatccagggaatcaagttcgaccgttggaagattgacgactttctgagggccctccatgccgaaggtgtggatgcctggatagataacggccaaaatgccccgccgccgggcggtggtttgaggctcattccccacggccaagccttccgcgatatgaccccggccattgaaaccctggaagacctgctcttggaaggccggattgaacacggcaacaatccggtcctaaccatgtgcgcggccaatgtcaaagcccagaacgacccggccggcaaccggaaattcgacaaaatcaaatccaccggacgcattgacggcatcgtggccctggccatggccttaaaccgggccgtggggccggaagtcccggacacgaaagcgtttaccaaacccggggatttgtggagtgttacggagtgtttggcggcctaa

SEQ ID NO: 33078 - protein, 311 aa, Unknown
  Obtained from environmental sample
  DOMAIN (1)...(290): Phage Terminase
  misc_feature (1)..(311): Xaa is any amino acid
MPLDADVWDENNWLLANPALGDFRSLKELREVAQKAKRMPGQESAYRNLYMNQRVCVDGRLIPQEVWKANGAEPDLDLFYDQPCWGGLDLSKKNDLTALVFVTRTQEGKWGVLPYFWTPGGNLLERADRDKAPYDLWVQQGFMSATQGMVIDYAFVARKVAELHGRLNIQGIKFDRWKIDDFLRALHAEGVDAWIDNGQNAPPPGGGLRLIPHGQAFRDMTPAIETLEDLLLEGRIEHGNNPVLTMCAANVKAQNDPAGNRKFDKIKSTGRIDGIVALAMALNRAVGPEVPDTKAFTKPGDLWSVTECLAA

SEQ ID NO: 33079 - DNA, 453 bp, Unknown
  Obtained from environmental sample
  misc_feature (1)..(453): n is a, c, g, or t
ttgtttccgcccatggatccgatagacacctacatcaaaagcctgagcgccaggcccaaggactccgacgcaacggagcatacgcaccgtcccgccctacagaacctcttggaggcgcttctgccggacttgaccgtcatcaacgagccgaagcggcaggcctgcgggatgcctgatttcaagctactccgcaaccgcgaactatttcgcggcgtgcccattgcctacatcgagacaaaggacataggcgatggcgacctcgacggcacaggcaaaaacaaagggcagttcgaccgctacaagggccgcgctggacaacctagtattcaccgactacctggacttcgtcttttacaaaaagggcgtgcgcttgggcagcgtggcggttggcgaactgaatggcaaagagataaagcccgcaaggggctaactacgacacattccgcangatga

SEQ ID NO: 33080 - protein, 150 aa, Unknown
  Obtained from environmental sample
  misc_feature (1)..(150): Xaa is any amino acid
MFPPMDPIDTYIKSLSARPKDSDATEHTHRPALQNLLEALLPDLTVINEPKRQACGMPDFKLLRNRELFRGVPIAYIETKDIGDGDLDGTGKNKGQFDRYKGRAGQPSIHRLPGLRLLQKGRALGQRGGWRTEWQRDKARKGLTTTHSAX

SEQ ID NO: 33081 - DNA, 963 bp, Unknown
  Obtained from environmental sample
  misc_feature (1)..(963): n is a, c, g, or t
ttgaaggccgataactggaccaatcctaaagacgtttcgtggagcgaaaagggatggacggtttcaaaggctgctctcggcgagccgatgggcaacatggcgactaacgaccagtaccttatcaatccgatttatgaaacggagataatgtctgatgtggcaaagaaatcggttatgatgggccttgtccggcatcgcccgatgatggggccgtctatcttccttcccacaagagacaggggcggggttcagcttaactggcttacggcttacggccaaaaaatcgagggcagtaaaccgcaaggggctgaaagagtagagcttaaagcctacacattggcagggtacattccgtggttcgatgaatttgaagaggacgtttttgtcgatttgggtgctatgttcgtggacgaatttcttgaaacatacgggcaggaatttgacaggcaatgtttgctggccgataacgatccgttcacaggggctatgaagtgcgccgatgttaccgaggtaacaatcaagggaaacaccatagaggatttgacttggaaggatttccgtgatgccgtctacaaggttccggcagaggaacggaaagattgcgcgtggttcatcaatgaaacaatcctaaaccatgtagccaatatcgaggacaccacaggccgcccgatttggcggcggcctacggaggctatgccggggcgattggatttgtacccctatcacgaagtttcaatccttccgcagattgcggacatcgaggaaagacaggcgtttgcaatctttatgaaccccgagcggatacagcacggtaacaggcggggcatcgagcttaaaaagtttgatggtactactgaaagcctggaatatggagaattgtttctgcggttccgcaagcgtgatgggtttcttgtaacaagaccgaaagggaacatggtcgttctgaaaactaaggcttcttaa

SEQ ID NO: 33082 - protein, 320 aa, Unknown
  Obtained from environmental sample
  DOMAIN (37)...(293): Phage capsid family
  misc_feature (1)..(320): Xaa is any amino acid
MKADNWTNPKDVSWSEKGWTVSKAALGEPMGNMATNDQYLINPIYETEIMSDVAKKSVMMGLVRHRPMMGPSIFLPTRDRGGVQLNWLTAYGQKIEGSKPQGAERVELKAYTLAGYIPWFDEFEEDVFVDLGAMFVDEFLETYGQEFDRQCLLADNDPFTGAMKCADVTEVTIKGNTIEDLTWKDFRDAVYKVPAEERKDCAWFINETILNHVANIEDTTGRPIWRRPTEAMPGRLDLYPYHEVSILPQIADIEERQAFAIFMNPERIQHGNRRGIELKKFDGTTESLEYGELFLRFRKRDGFLVTRPKGNMVVLKTKAS

SEQ ID NO: 33083 - DNA, 1251 bp, Unknown
  Obtained from environmental sample
  misc_feature (1)..(1251): n is a, c, g, or t
atgggcggctccggctcggaagaatttatggtggaaagcgaaataggcgacaacacgctgatcctctgcaagaaatgcggttacgccgccaatgtggaaaaagcctcatgcaagcctgattttacagctcaagcttctgtcgaagccgcaaaaaccgcttccgcgagtattccgcccattgaaaaaatagacactcccaacgtaaaaaccatagacgaactttgtgccttcctgaaaacatcgccgcaaagttttattaagacgctgatttaccgcgccctcaatgttgagttggacctctcttccgcccccggctgcgccaatcttgagcgaaagaaaccgtcgcctgacgcgccagccgtgtatccgcaagcgttcttcgccgtggcaatccgcggcgaccttgacgttaatgaggtaaaactagcgtccgttctaaaagcgagcgaagtaggccttgccgcggataccgatgttacgcgacttaccaacgcgcctgtcggcttcgcaggacccgtcggtttaaaaaacattcctgttattatcgatcatactgttacgggaatgaatgacgcggtaacaggcgcgcttgaaaaagacctgcactacaaacacgccgcttacgggcgcgattttgaagggtggatgattgacgggcaaatatccgttgatgtgcgaaccgtaaaagccggagacctctgttcacaatgcggcgataatttgtatacaaaaatgggcaatgagcttggacacattttcaagcttggttacaaatatacccgttcaatgaacgtaacctaccttgatgaaaacggaaaaacccaaatgcccgtaatgggctgttacggcatcggggttgaccgcactcttgcttcagtaattgaggaacaccacgatgatgcgggaatcatctggcccgtctctgtagctccttatcatgttatcattgttccgattaagtacgacggcgcgatgaaagatgccgccgacaaacttgccgcggaacttacacaagcgggcatcgaagttttgctggacgaccgcaatgagcgacccggcgttaagtttaacgatgcggatcttatcggcattccatggcgcgttgtaatcggcgacaaggggcttgcgcaatcgcccgcgcaggtggaaattaaaaagcgaagcgagaaagacagccgcatgacggatttaaacgacgcggcggcggaacttacggagaaaataagggaagaactttatggcgcacaataa

SEQ ID NO: 33084 - protein, 416 aa, Unknown
  Obtained from environmental sample
  DOMAIN (60)...(212): YbaK / prolyl-tRNA synthetases associated domain
  misc_feature (1)..(416): Xaa is any amino acid
MGGSGSEEFMVESEIGDNTLILCKKCGYAANVEKASCKPDFTAQASVEAAKTASASIPPIEKIDTPNVKTIDELCAFLKTSPQSFIKTLIYRALNVELDLSSAPGCANLERKKPSPDAPAVYPQAFFAVAIRGDLDVNEVKLASVLKASEVGLAADTDVTRLTNAPVGFAGPVGLKNIPVIIDHTVTGMNDAVTGALEKDLHYKHAAYGRDFEGWMIDGQISVDVRTVKAGDLCSQCGDNLYTKMGNELGHIFKLGYKYTRSMNVTYLDENGKTQMPVMGCYGIGVDRTLASVIEEHHDDAGIIWPVSVAPYHVIIVPIKYDGAMKDAADKLAAELTQAGIEVLLDDRNERPGVKFNDADLIGIPWRVVIGDKGLAQSPAQVEIKKRSEKDSRMTDLNDAAAELTEKIREELYGAQ

SEQ ID NO: 33085 - DNA, 1239 bp, Unknown
  Obtained from environmental sample
  misc_feature (1)..(1239): n is a, c, g, or t
atggcggggatgaggcgctgtttcatggcagtcgagcttcagggagaattgactaaacgtcccgctgtttctccggattcgggcggtgaaggcgaactggaaaaatgcgtatttctggaaggctggctcaaagcgcacggcattacccaactggagcgcttcgacgctcctgacaaacacgccaaaggctgggtgcgtcccaatctggtcgccaccataccgggtagcgacaaggatgcggacggatgcttgtggatcatcagccatcttgatgtcgttcccccgggcgaagcctcgcattgggaaagcgacccctggacaatggtggaagccaaagacggcccgcttggtcacagggttatcggcaggggagttgaagataaccagcaggggctgacttcttccgtgcttgcagcgctcgcccttgttaagcagggcatacagccttgccgtacggtaaaactccttttcgtggctgacgaggaaatgggcaatgattatggcattgcctggcttttgaaacaccacaatgatatgttccataaaaatgatatggcgcttgtccccgattggggggacacaaaaggtgaaggtattgagattgccgaaaaaaatatgatctgggttcgttttacaaccacgggcaagcagacccacgcttccagacccgatctgggcgtaaacgccttccttgccggctctgaccttgctctgcgtcttcactacgggctttccgaaaaattcaacgacagggacagcctttttgagccggaatactccaccttccagccaaccaaaaaagaagccaatgtcccaaatgtaaacaccattcccggcggagatgttttctacattgatatgcgcgtgctgccccgttattcgataaaggaagtattagacgaaattgaccgcatcaaggaagaagttgcggcgaagcacaaagtttccattgattacactgttgtgcaggcaaccgaatcccccgctacttcggcccaagccccgtttatcaaatccctttcgcttgcgataaacgaagtttacggagttactgcacggcccataggcataggcggcggcaccatagcggcatttctgcgaagggaggggattgacagcgcggtctgggcgcggctcagcggcactgcccatcagccaaacgaatacgcccttgtaaaagacatgctgagcgacgcgaaggttatggctctgttgatgtggggagaagtccgcaagtag

SEQ ID NO: 33086 - protein, 412 aa, Unknown
  Obtained from environmental sample
  DOMAIN (201)...(314): Peptidase dimerisation domain
  misc_feature (1)..(412): Xaa is any amino acid
MAGMRRCFMAVELQGELTKRPAVSPDSGGEGELEKCVFLEGWLKAHGITQLERFDAPDKHAKGWVRPNLVATIPGSDKDADGCLWIISHLDVVPPGEASHWESDPWTMVEAKDGPLGHRVIGRGVEDNQQGLTSSVLAALALVKQGIQPCRTVKLLFVADEEMGNDYGIAWLLKHHNDMFHKNDMALVPDWGDTKGEGIEIAEKNMIWVRFTTTGKQTHASRPDLGVNAFLAGSDLALRLHYGLSEKFNDRDSLFEPEYSTFQPTKKEANVPNVNTIPGGDVFYIDMRVLPRYSIKEVLDEIDRIKEEVAAKHKVSIDYTVVQATESPATSAQAPFIKSLSLAINEVYGVTARPIGIGGGTIAAFLRREGIDSAVWARLSGTAHQPNEYALVKDMLSDAKVMALLMWGEVRK

SEQ ID NO: 33087 - DNA, 504 bp, Unknown
  Obtained from environmental sample
  misc_feature (1)..(504): n is a, c, g, or t
atgcggcctgacttaacgaaaaaaaagcttcaccgtgttgtatttcgcagaaaggtatttgtaatttttatccttctcgtacaaatcgtgttctttgttcttttgatcgccggaaccagcaaatccattcgttatgctgatttgatccttaagattatcagtataattgtctgtgtgtatattattaacaaacacgccaaggcggcgtataagatcacatggatctttctgatcatgctttttcccatttttggcggcattctctatatccttttcacatatacgtcaaaccccaaaaaactctggcagttaattaagcgtaattccagggaaagccggagcgctttttatttgggcggggacagcctgccggatctcgacaaggcatatcctgaattcaagccccaggcgcattatttgcaggagtatgccgacttcccggtgtatgccaataccaaagcgttgactttgattcaggcgaggggtttttcaaacgtgtgctga

SEQ ID NO: 33088 - protein, 167 aa, Unknown
  Obtained from environmental sample
  misc_feature (1)..(167): Xaa is any amino acid
MRPDLTKKKLHRVVFRRKVFVIFILLVQIVFFVLLIAGTSKSIRYADLILKIISIIVCVYIINKHAKAAYKITWIFLIMLFPIFGGILYILFTYTSNPKKLWQLIKRNSRESRSAFYLGGDSLPDLDKAYPEFKPQAHYLQEYADFPVYANTKALTLIQARGFSNVC

SEQ ID NO: 33089 - DNA, 1473 bp, Unknown
  Obtained from environmental sample
  misc_feature (1)..(1473): n is a, c, g, or t
gtgcagattctgttttttgtttttcttatcgcaggaaccagcatatacattcgttacgcgaactggattcttcacattatcagcataattgtttgtatttatattattaacaaacacgcaaaggccgcgtataagatcacatggattttcctgatcatgctattccccatttttggagggatcctttatatcgttttcttttatgcctcgcatcagggaaaactcaaatatctgattaagcgtactacaagggaaagccggagcgctttttatctgggcggtgacagcctgccggatctagacagggcatatcccgaattcaagcctcaggcgcattatctacaggagtatgcgggcttcccggtgtatgccaataccaaagcgctgtactttgattccggcgaggggttttataagcgcgtgcttgaggaactgggaaaggcaaagcggtatatttttatggagttttttattctgaaagaagggggaatgttaaactccataatttcgatattggcgcgtaaagtgagggagggccttgatgtgcggcttatgtatgacgaccttggctgtttcatgtcccttcccgaaaattttaagcagaccctggaagaaaaaggcataaagtgttatgtgtttaaccctttcaggccgattctctcctctctgcaaaacaaccgcgaccaccgcaaaataatttctgttgacggcaaagtggcgtttaccggcggccttaaccttgccgacgaatatataaacaccgttcatcgtttcggccattggaaggacgccgccatcatgcttgaaggcgagggggcctggtcgctgacgctgatttttttgcagatgtggaatattcagccgggcgtcaatgacagttatgagtcatattacccgtggaagaaaatcccctgcgagatagtgtctgacgggtttgtgcagccctatgctgacagtcccattgataaggagaatgtcggcgaacacgtatatatccagatcatcaacaaggcgaaaaaatacgtgtatatcaacactccctatctggttttagacgacggcctgctctccgctctgacgcttgccgcaaaaagcggcgtggacgtgagaatcatcacccctcaccgttgggacaaatggtttgtggcgatagtctcgcgttcatatttccgccagctcatttccgcgggggtaaggatttatgaatatagttccggctttatccacggcaagacctttgtctgcgatgacgctattgcaacagttggcaccaccaacctggacttccgcagcctgtatctgcacttcgagactggcgtccttatttaccggggtggggctgtccagtcggtaaaagaagactttctgcgtaccattcccagttcgcaggagataacgctgaatgaatgtacccacagcgctttccaactggttatcgcagatgtgttgaggatttttgcgccgctgatgtga

SEQ ID NO: 33090 - protein, 490 aa, Unknown
  Obtained from environmental sample
  DOMAIN (404)...(431): Phospholipase D Active site motif
  misc_feature (1)..(490): Xaa is any amino acid
MQILFFVFLIAGTSIYIRYANWILHIISIIVCIYIINKHAKAAYKITWIFLIMLFPIFGGILYIVFFYASHQGKLKYLIKRTTRESRSAFYLGGDSLPDLDRAYPEFKPQAHYLQEYAGFPVYANTKALYFDSGEGFYKRVLEELGKAKRYIFMEFFILKEGGMLNSIISILARKVREGLDVRLMYDDLGCFMSLPENFKQTLEEKGIKCYVFNPFRPILSSLQNNRDHRKIISVDGKVAFTGGLNLADEYINTVHRFGHWKDAAIMLEGEGAWSLTLIFLQMWNIQPGVNDSYESYYPWKKIPCEIVSDGFVQPYADSPIDKENVGEHVYIQIINKAKKYVYINTPYLVLDDGLLSALTLAAKSGVDVRIITPHRWDKWFVAIVSRSYFRQLISAGVRIYEYSSGFIHGKTFVCDDAIATVGTTNLDFRSLYLHFETGVLIYRGGAVQSVKEDFLRTIPSSQEITLNECTHSAFQLVIADVLRIFAPLM

SEQ ID NO: 33091 - DNA, 393 bp, Unknown
  Obtained from environmental sample
  misc_feature (1)..(393): n is a, c, g, or t
atgtccacgaagtcgagtcaaaagttttttatctgcaaacactgcggaaatatggtcggccttatcgccaataagggcgggcctttatcttgctgcggcgagagtatgaaagaacttgcgcccaacacggttgaggccagcaccgagaaacacatccccgttgttacggtgtccggcggagtaataaacgtcgccgtgggcagcgcggcgcacccgatggaggaggctcaccgcatcgaattcatattcgtggaaaccgagcacggcgggattcgcaggcgcctttcggttggggataaaccgaacgtgtcgatcactgttggggatgaaaaaccggtcgccgtctccgcatactgcaacctacacgggttgtggagagcggaaatcggttga

SEQ ID NO: 33092 - protein, 130 aa, Unknown
  Obtained from environmental sample
  DOMAIN (3)...(39): Desulfoferrodoxin, N-terminal domain
  misc_feature (1)..(130): Xaa is any amino acid
MSTKSSQKFFICKHCGNMVGLIANKGGPLSCCGESMKELAPNTVEASTEKHIPVVTVSGGVINVAVGSAAHPMEEAHRIEFIFVETEHGGIRRRLSVGDKPNVSITVGDEKPVAVSAYCNLHGLWRAEIG

SEQ ID NO: 33093 - DNA, 468 bp, Unknown
  Obtained from environmental sample
  misc_feature (1)..(468): n is a, c, g, or t
atgaagaaaatagaaatattcaccgacggcgcttgctccggcaacccgggtcccggcggctacggtgtactaatgaggtacgaggagcacgttaaggaactatcgggaggctatgccgagacgacgaataaccgtatggagcttatgggggtcatagtagccttggaggctctgcgcgaaacctgcgacgtgaccgtcacgacagactcgcagtacgtggtccacggcatagagaagggttgggcgaagaagtggaaggcgatggggtggatgcggaacaagaaagagccggcgctcaacgccgacttgtgggagaggctcttgcaggcggtcggccggcacaatgtggggttcgtgtggatacgcgggcacaacgggcacaaggaaaacgagcggtgcgataaactggcggtggccgcggcgtctaagcccggtttgccgaaagacggagggatggcgtcaaaatga

SEQ ID NO: 33094 - protein, 155 aa, Unknown
  Obtained from environmental sample
  DOMAIN (1)...(142): RNase H
  misc_feature (1)..(155): Xaa is any amino acid
MKKIEIFTDGACSGNPGPGGYGVLMRYEEHVKELSGGYAETTNNRMELMGVIVALEALRETCDVTVTTDSQYVVHGIEKGWAKKWKAMGWMRNKKEPALNADLWERLLQAVGRHNVGFVWIRGHNGHKENERCDKLAVAAASKPGLPKDGGMASK

SEQ ID NO: 33095 - DNA, 768 bp, Unknown
  Obtained from environmental sample
  misc_feature (1)..(768): n is a, c, g, or t
ttggcgttgcctgtttttagcgcgtcactggaagagcttgtcgatcaaacccaggcggctttgttgaaagccgcatcggagccgatcacagaggtgcaaataaagaatcccagccccaggctcctgccaagacatgaggaattgcagcgttttgtccgggaaacccttcgcaatctggagcctaatatccttgtggagaccctttccctataccgtcgtccgctgtcttcacggcaaactgcggatccaacaggctggagccgtgatgaacagacgggtttatttaatcagttgcttgctataagcaccctgaccggaatccaatactattcagaaagccggaaagccatgagggttttttattcatcttcaacggtgatagatgatcccaccagaaaaaagtccatgcctgacccgacatttgccgtttgccccgactcacttgtcctatatgcccgacaaaaggatcttacttttggagataacgtttatcgttttgaataccacaccggcgctgacatcattttcttttcacaggaaaatatcagttccatgaatttgggtattatacccgcaataggcagaaacagattccgcacggttatggcggtaattgacgcgggggacacgcttttgatttacacagcggcaatggcaaaaaccgcttcagcttccgggatgggggatcgtataggttcctcatttaccaatcgcgtaaatgctatactcaagtggtttgtggggcgcgcaaacggggtgttcggctaa

SEQ ID NO: 33096 - protein, 255 aa, Unknown
  Obtained from environmental sample
  misc_feature (1)..(255): Xaa is any amino acid
MALPVFSASLEELVDQTQAALLKAASEPITEVQIKNPSPRLLPRHEELQRFVRETLRNLEPNILVETLSLYRRPLSSRQTADPTGWSRDEQTGLFNQLLAISTLTGIQYYSESRKAMRVFYSSSTVIDDPTRKKSMPDPTFAVCPDSLVLYARQKDLTFGDNVYRFEYHTGADIIFFSQENISSMNLGIIPAIGRNRFRTVMAVIDAGDTLLIYTAAMAKTASASGMGDRIGSSFTNRVNAILKWFVGRANGVFG

SEQ ID NO: 33097 - DNA, 681 bp, Unknown
  Obtained from environmental sample
  misc_feature (1)..(681): n is a, c, g, or t
ttgccgtcccgggcgggcagggcgctggtttcgcaaaaggatttctcggaagcgattgaaaaaaccgtcgccggccttcagaaaaagacaagggtaatcaagcccgaggaaaagaggcttaccgcctaccacgaggctggtcatgccctgatggcagcttttacacctaacgccgacccggttcagaaaatttctattattccccgcggctttgccttgggttataccctgcagcttccgctggaggatcgttataccgttaccaaatcggatcttttgggaaggatagacattctgctgggtggccgcattgccgaggaaatgatttccggcgagtactccaccggcgcagccaatgatctgaccaaagccaccgacattgcccgtaaaatgataaccgactacggtatgagcgatcgtttccgccatgtggcgctgacatcgcggggtatgagcatgacaggtcaggaacggcaggaacccgcttttcagcgcgaatacgccgaaagtacccagcagtatgtggatgaagagatagcccggataattgattgtgaatacgcgaaagcaaaagagctgcttgaaaaaaatcgcggtgttttggattgcgtttcagcggcgcttttggaaaaggaaacactggacgaaaaagaattcaaggctttgctggcgggggtgtaa

SEQ ID NO: 33098 - protein, 226 aa, Unknown
  Obtained from environmental sample
  DOMAIN (10)...(222): Peptidase family M41
  misc_feature (1)..(226): Xaa is any amino acid
MPSRAGRALVSQKDFSEAIEKTVAGLQKKTRVIKPEEKRLTAYHEAGHALMAAFTPNADPVQKISIIPRGFALGYTLQLPLEDRYTVTKSDLLGRIDILLGGRIAEEMISGEYSTGAANDLTKATDIARKMITDYGMSDRFRHVALTSRGMSMTGQERQEPAFQREYAESTQQYVDEEIARIIDCEYAKAKELLEKNRGVLDCVSAALLEKETLDEKEFKALLAGV

SEQ ID NO: 33099 - DNA, 849 bp, Unknown
  Obtained from environmental sample
  misc_feature (1)..(849): n is a, c, g, or t
atggtcagattggccgagattggcggcaatgttctttctgttgggcagaaccgtgcggtgattgtggcggagggggatattgctaccaggttctacgatgtcgccggcgttgacgaggcaaaggaagaactggttgaagtggtggattttttgaaaaaccctaaaaagtacaccgatattggcggaaaaatacccaagggcgttctactggtagggccgccgggaacaggcaagaccctgttggcgcgcgccgttgccggagaagcgggcgttgtgtttttccgcatgagcggcgcggactttgttgagatgtttgtaggcgtgggcgcggcaagagtgcgggatctgttcaagcaggcccgcgacaaggcgccttgcattatatttattgacgagttggacgcaatcggcaagagccggattaacaatattgccgggggcaatgacgagcgcgagcagacactgaaccagcttttggttgagatggacggctttaacgctaccagcggccttatcatcctggcggcgaccaacaggcccgatgtgctggatccggccctgctccgccctggacgctttgaccgccaggtgctggttgaccgtccggatctaanaggccgcgaggcgattttatacattcattcaaggccggtaaaacttgacccttcggtggatttgtccgcgggtgcccgcagtacttccggtttttccggagcggatcttgccaatatcgtcaacgagggcggcgctgcttgccgtcccgggcgggcagggcgctggtttcgcaaaaggatttctcggaagcgattgaaaaaaccgtcgccggccttcagaaaaagacaagggtaa

SEQ ID NO: 33100 - protein, 282 aa, Unknown
  Obtained from environmental sample
  DOMAIN (67)...(201): ATPase family associated with various cellular activities (AAA)
  misc_feature (1)..(282): Xaa is any amino acid
MVRLAEIGGNVLSVGQNRAVIVAEGDIATRFYDVAGVDEAKEELVEVVDFLKNPKKYTDIGGKIPKGVLLVGPPGTGKTLLARAVAGEAGVVFFRMSGADFVEMFVGVGAARVRDLFKQARDKAPCIIFIDELDAIGKSRINNIAGGNDEREQTLNQLLVEMDGFNATSGLIILAATNRPDVLDPALLRPGRFDRQVLVDRPDLXGREAILYIHSRPVKLDPSVDLSAGARSTSGFSGADLANIVNEGGAACRPGRAGRWFRKRISRKRLKKPSPAFRKRQG

SEQ ID NO: 33101 - DNA, 546 bp, Unknown
  Obtained from environmental sample
  misc_feature (1)..(546): n is a, c, g, or t
atgtataaaatcgcctcgcggcctnttagatccggacggtcaaccagcacctggcggtcaaagcgtccagggcggagcagggccggatccagcacatcgggcctgttggtcgccgccaggatgataaggccgctggtagcgttaaagccgtccatctcaaccaaaagctggttcagtgtctgctcgcgctcgtcattgcccccggcaatattgttaatccggctcttgccgattgcgtccaactcgtcaataaatataatgcaaggcgccttgtcgcgggcctgcttgaacagatcccgcactcttgccgcgcccacgcctacaaacatctcaacaaagtccgcgccgctcatgcggaaaaacacaacgcccgcttctccggcaacggcgcgcgccaacagggtcttgcctgttcccggcggccctaccagtagaacgcccttgggtatttttccgccaatatcggtgtactttttagggtttttcaaaaaatccaccacttcaaccagttcttcctttgcctcgtcaacgccggcgacatcgtag

SEQ ID NO: 33102 - protein, 181 aa, Unknown
  Obtained from environmental sample
  misc_feature (1)..(181): Xaa is any amino acid
MYKIASRPXRSGRSTSTWRSKRPGRSRAGSSTSGLLVAARMIRPLVALKPSISTKSWFSVCSRSSLPPAILLIRLLPIASNSSINIMQGALSRACLNRSRTLAAPTPTNISTKSAPLMRKNTTPASPATARANRVLPVPGGPTSRTPLGIFPPISVYFLGFFKKSTTSTSSSFASSTPATS

SEQ ID NO: 33103 - DNA, 969 bp, Unknown
  Obtained from environmental sample
  misc_feature (1)..(969): n is a, c, g, or t
ttgcacgatgtatttatccccgaactaaggggagatgttcctattcactctcccggagacaaaataggcaaagaatatgtgcaggttgacccaaacaaaatagtggctatagtggaaacaatactgccagattccttaaaaccattcgctgctccagacgaagagtcaaatgccatagctgcctatattttggaattccttgcgcacgagcgcaaaaaaggtcgcttgccaaatgatgttccttatcaaagcggtgttggcaatgtggcaaacgcagtgcttggtacaatggcaaaagacccagcccaagcacctgtggctctttatacagaagttatccaagattccgtttttgatattttggaagcagacaaactaattattgcaagtggggcttctgttagctattcgcttgccggacaagaaaagtacaaatcaaatgcccacaccaaaaattggaaaagcaagtttgttttgcgcccacaggaaatttccaataaccccgaagtgattcgcaggcttggcgtgatttccatgaacactgcgctggaagcagatatttttggtcacgtgaacagtactcacgtaaatggttcgcgaatgatgaacggcataggcggttctggcgattttgcccgcaactgtttgctcggattttttatgaccccaagcactgcaaagggcgggaaaataagcgcaatagttccaatggtgagccacacagaccacaccgagcacgatacgatgattttcgtatctgaacagggtcttgcggatttaagaggtcttgctccggttaagagagcacgcttgattattgaaaaatgcgctcatccaacctataaaccgcttttgcaggaatacttggagtatggcataaagcattccgcattgcacaccccgcactctctagacaaagcttttgatttccacaaaaggctaatagaaaagggaagcatgattggataa

SEQ ID NO: 33104 - protein, 322 aa, Unknown
  Obtained from environmental sample
  DOMAIN (1)...(320): Acetyl-CoA hydrolase/transferase
  misc_feature (1)..(322): Xaa is any amino acid
MHDVFIPELRGDVPIHSPGDKIGKEYVQVDPNKIVAIVETILPDSLKPFAAPDEESNAIAAYILEFLAHERKKGRLPNDVPYQSGVGNVANAVLGTMAKDPAQAPVALYTEVIQDSVFDILEADKLIIASGASVSYSLAGQEKYKSNAHTKNWKSKFVLRPQEISNNPEVIRRLGVISMNTALEADIFGHVNSTHVNGSRMMNGIGGSGDFARNCLLGFFMTPSTAKGGKISAIVPMVSHTDHTEHDTMIFVSEQGLADLRGLAPVKRARLIIEKCAHPTYKPLLQEYLEYGIKHSALHTPHSLDKAFDFHKRLIEKGSMIG

SEQ ID NO: 33105 - DNA, 693 bp, Unknown
  Obtained from environmental sample
  misc_feature (1)..(693): n is a, c, g, or t
ttggataatctaatggagatagacaaagattttaccatccttgctgtcagcaataattataccggcttagatcttttaagcagtattctttcgccgtattacacaataaaaacaacgtcttccagaagcgaggctttagctacgctgaatacaggcagcataaatttgattattctaggcagtgcaatgtatgaacatgaagacaataattttttaaaggaaataaaatctcacgaagatacaatgcgaattcctgttattctcataggaaactttgacaaacccgaacttgaagaaacagcttttgcatttggagccgtggactacataagcaaaccgttcagagctcctatagtcaaggtgagggtgaataaccaaaggttaattgtaaaacaaataaaggcaatagaagatcttggcttaatggatcatttaacaggtattccaaataggcggggctttgacaataaagttcatgcggaatggctaagggcaatcagagataaaacctcttttagcctagccattgtggacatagaccatttcaaggtatataacgatgactacggacatgcacaaggcgatgttcttttgcgtatgcttgcccaaaaaattacctcttttctgagaagaccagcggaattttttaccacccttgggttggagagggaatttgtgaaaaatgttccctaa

SEQ ID NO: 33106 - protein, 230 aa, Unknown
  Obtained from environmental sample
  DOMAIN (11)...(124): Response regulator receiver domain
  misc_feature (1)..(230): Xaa is any amino acid
MDNLMEIDKDFTILAVSNNYTGLDLLSSILSPYYTIKTTSSRSEALATLNTGSINLIILGSAMYEHEDNNFLKEIKSHEDTMRIPVILIGNFDKPELEETAFAFGAVDYISKPFRAPIVKVRVNNQRLIVKQIKAIEDLGLMDHLTGIPNRRGFDNKVHAEWLRAIRDKTSFSLAIVDIDHFKVYNDDYGHAQGDVLLRMLAQKITSFLRRPAEFFTTLGLEREFVKNVP

SEQ ID NO: 33107 - DNA, 453 bp, Unknown
  Obtained from environmental sample
  misc_feature (1)..(453): n is a, c, g, or t
gtgcattttcaagggcaatgtngaagcaagggatgttcgctttacggcaatgttgtttttttcgcaaacgaattccaaaaagatgcagattttcagaatgtttccatttttggcacagtaaatttcagcaagagcgttttcaaggggagggcgatttttgccaatatagctgcatgggcaaaaaatagctacttcagcgaggtcaaggcgagcaacaaattttctcttgaaggaagtgattttcacggtgatttatcgctgatggattccgagttttcagacgtattttctttgcaggagacctttgtactggggaatttgcaagggtcaaacgcaaagttcaacggcagcacagatttttctatgttaagtgttttacggagaaccatattcaaatatgcaacttttaaaaacgaaccggatttttcaaacagcaaaatagcgaaggagtaa

SEQ ID NO: 33108 - protein, 150 aa, Unknown
  Obtained from environmental sample
  misc_feature (1)..(150): Xaa is any amino acid
MHFQGQCXSKGCSLYGNVVFFANEFQKDADFQNVSIFGTVNFSKSVFKGRAIFANIAAWAKNSYFSEVKASNKFSLEGSDFHGDLSLMDSEFSDVFSLQETFVLGNLQGSNAKFNGSTDFSMLSVLRRTIFKYATFKNEPDFSNSKIAKE

SEQ ID NO: 33109 - DNA, 651 bp, Unknown
  Obtained from environmental sample
  misc_feature (1)..(651): n is a, c, g, or t
gtgcatatcggcgcctataaacccgccgataaacccatgaactgcggcggcaataatcacggaagcatcatcgaaataaaagggaaatggtatatcttttatcaccggcataccaacggaaatgaattcagccgccagggatgccttgagccgatagaaataaaggcggacggttccattccgcaggcggagatgacttcgtgcggtccgaacggcaagccgcttaacggcaaaggggagtttccggcatatattgcgtgtaacatattttccgtcgaaaataatcaacagttaatcagacaatggccgcttcacaaccagtctctgccgaaaatttcgcaggatggccgggacggcgatgaagaacaaggttatgtgaccaatatttcagacaattacggtattggttttaagtattttgattgtaaaggaattaagaagattaaaataaaaacgcgcggttacaacgacggtgtttttcatgttaaaacaaaatgggacggcgattctttagcgtgtataaagattgaatacagcaatatctgggttgaatattcttcggatataaaccttccggacggaatacacgcgctttactttatatataaaggtaaaggatacgcttctatggcctcctttactttggaatag

SEQ ID NO: 33110 - protein, 216 aa, Unknown
  Obtained from environmental sample
  misc_feature (1)..(216): Xaa is any amino acid
MHIGAYKPADKPMNCGGNNHGSIIEIKGKWYIFYHRHTNGNEFSRQGCLEPIEIKADGSIPQAEMTSCGPNGKPLNGKGEFPAYIACNIFSVENNQQLIRQWPLHNQSLPKISQDGRDGDEEQGYVTNISDNYGIGFKYFDCKGIKKIKIKTRGYNDGVFHVKTKWDGDSLACIKIEYSNIWVEYSSDINLPDGIHALYFIYKGKGYASMASFTLE

SEQ ID NO: 33111 - DNA, 393 bp, Unknown
  Obtained from environmental sample
  misc_feature (1)..(393): n is a, c, g, or t
atgacaacactctccgctttcaacgtccgcacaggcggagaaaccgactggatcaacattacaggtgaggtgcaaaaaattgtcgcagcttctggtgtgcgcgaagggatttgcgtggtctttgtaccgcacaccaccgcggcggtaaccattaatgaaaacgccgatcccgacgtaccccgtgacgtgaatttagcgttaaacataatatcccccgaccgccgcgaatttcatcatagcgaaggcaattctgcggcgcacaccaaaacaagcctcgtggggccttcaataactttagttgttacggaaggacggctgcttctaggcacatggcagggaatttggttaatgagtacgatgacccgcgcacgcgcaaagttcatgtgcgtgtaa

SEQ ID NO: 33112 - protein, 130 aa, Unknown
  Obtained from environmental sample
  DOMAIN (17)...(128): Uncharacterised protein family UPF0047
  misc_feature (1)..(130): Xaa is any amino acid
MTTLSAFNVRTGGETDWINITGEVQKIVAASGVREGICVVFVPHTTAAVTINENADPDVPRDVNLALNIISPDRREFHHSEGNSAAHTKTSLVGPSITLVVTEGRLLLGTWQGIWLMSTMTRARAKFMCV

SEQ ID NO: 33113 - DNA, 948 bp, Unknown
  Obtained from environmental sample
  misc_feature (1)..(948): n is a, c, g, or t
ttgaacgtggttgtttccagtccgccggattattacgtaagcggtacgcccaaagatgtgacaatttattatgccaccaatgttacattcaacggcgtaagcgccgatggtggcacatcgcagaccaccacaactttaacactgacctttagccaggcaatccctggcctttccgccgacgacataactttaaccggagttacaggggtaaacaaaggaacccttactgcctccggggcaacatacaccctgccgatcagcggctttacaagcggcgggactttgaacgtggaggttgcaaaatctggctttaatataagcggttcaccaaagacagtaaccgtctattacgctaccgccgttgcttttaacagtgtaactgccaacggcagcacctcacagactaccacacagttgaccctaacctttgacaaggcaatcaccggccttagcgccagtaacataaccttaagcggcgtttcaggcgtaagcagaggaactttaagcggatctgggacaacgtacaccttgnggatcagcggctttaccgctggcgggactttgaccgttacagttgtcagcccggcaggctataacgtaagcggttcgccaaagacagtaactatatatgtcaaaccagttatcacaatcggcacccagcccgttgcgacaacaaacgtaacggcaggaagcataagcggcagcctttcggttacggccagcgtcagttcaaacgcggaactccgttatcagtggtatagcaacacaagcgccgtcaacaaagacgggactatacaaagcggcgctacaagcgcaagtttcacaatacccgcaactcttgaagcgggaacctactactacttctgcgaagtcagggcggccggggcagctgctgtcaggtcaatgtggcgacagttactgtggcgtccgcaaaacccgttattataa

SEQ ID NO: 33114 - protein, 315 aa, Unknown
  Obtained from environmental sample
  misc_feature (1)..(315): Xaa is any amino acid
MNVVVSSPPDYYVSGTPKDVTIYYATNVTFNGVSADGGTSQTTTTLTLTFSQAIPGLSADDITLTGVTGVNKGTLTASGATYTLPISGFTSGGTLNVEVAKSGFNISGSPKTVTVYYATAVAFNSVTANGSTSQTTTQLTLTFDKAITGLSASNITLSGVSGVSRGTLSGSGTTYTLXISGFTAGGTLTVTVVSPAGYNVSGSPKTVTIYVKPVITIGTQPVATTNVTAGSISGSLSVTASVSSNAELRYQWYSNTSAVNKDGTIQSGATSASFTIPATLEAGTYYYFCEVRAAGAAAVRSMWRQLLWRPQNPLL

SEQ ID NO: 33115 - DNA, 417 bp, Unknown
  Obtained from environmental sample
  misc_feature (1)..(417): n is a, c, g, or t
gtgggggatatcctggcggagctgaacacggacatgcttaagctaaagcgggagcagcagcaggccgcgcttatcaaggcgcaggccaactacgagctgcagcttgtcagctaccagggccaggaagcccttgcccggaggaactttatctccgagttcgagcttaagaacagcctgaccgcgctgcaaaacctcagggccgatttaagggtcgccgaagcgaacctgaaggcaatcgagaccgagataaaccagtacgccttcattacctcgcccatcgacggcattgtgcttgaccgcaacgtcaacgtaggcgacacggtagtggaatcctccagcagcaactcggcaagcatcttcaccctggcggagaacctcagggagatgcagatcgaagcgtcggtaggccagctttga

SEQ ID NO: 33116 - protein, 138 aa, Unknown
  Obtained from environmental sample
  misc_feature (1)..(138): Xaa is any amino acid
MGDILAELNTDMLKLKREQQQAALIKAQANYELQLVSYQGQEALARRNFISEFELKNSLTALQNLRADLRVAEANLKAIETEINQYAFITSPIDGIVLDRNVNVGDTVVESSSSNSASIFTLAENLREMQIEASVGQL

SEQ ID NO: 33117 - DNA, 699 bp, Unknown
  Obtained from environmental sample
  misc_feature (1)..(699): n is a, c, g, or t
ttgtcagaatataccattagaatattaagttcttgccataaaaaaggtttaaaaattatatttgcaactgcaagaccagtaagaagtactaaaaattatatggatataataaaacctgacggggttatatttcataatggtgcaattgtgatggctggtaataaaatattaagtaaaaatggaataaatccagataaaacaaaagagattgttaataaaattatttgtgaatatccaatgtcaacaattactgtcgaaataaatgatacaatgtatacaaattttgatatatatggaaattgggtttatacaaaaatcgatcttatggaattacctaattataatgcagacaaaattattattggaacaatttctgtaaatgaaattttaagtataaaaaaatatataacagaagagttatatttagagattaacgatggaaaatatggaatgataatgaataaaaatgcttcaaaatggaatggaataaaggaattatcagacttttttagaataaaaattgaaaacataatagcatttggagatgatataaatgatttggaaatgataaaaaattgtggtaaaggaatatgtgtaaaaaatggagtggaagaagtaaaggcagtagcaaaagaaatttgtgatgacaatgacaatgacggaatagcaaaatggattgagaaaaatatattatgttag

SEQ ID NO: 33118 - protein, 232 aa, Unknown
  Obtained from environmental sample
  DOMAIN (1)...(226): haloacid dehalogenase-like hydrolase
  misc_feature (1)..(232): Xaa is any amino acid
MSEYTIRILSSCHKKGLKIIFATARPVRSTKNYMDIIKPDGVIFHNGAIVMAGNKILSKNGINPDKTKEIVNKIICEYPMSTITVEINDTMYTNFDIYGNWVYTKIDLMELPNYNADKIIIGTISVNEILSIKKYITEELYLEINDGKYGMIMNKNASKWNGIKELSDFFRIKIENIIAFGDDINDLEMIKNCGKGICVKNGVEEVKAVAKEICDDNDNDGIAKWIEKNILC

SEQ ID NO: 33119 - DNA, 405 bp, Unknown
  Obtained from environmental sample
  misc_feature (1)..(405): n is a, c, g, or t
atgatgggttccgatatgtcttacgaagatgccgttaataacgaccctctttctgctcgctacgaacctgtgcttgctggttcagaagtttggaatgggcaggatgcctgggtgctggaattgaatgcaaagaaaaaaaccgaaagctacccaaaacgcaaattgtggatagacaagaaaaccggagatatgttgcactatgaactttacgctctttctggagcaaagctaaaagaatatagccttataaaagtcggcacttttgcaaaccgccgttttccagttgaaattgagcttcgcgaccttttgaggaaaaacagcaaaacaacctttataatgaaaaacgtggtgatggataaaccaattgcagatgcggtgtttagccaacgaaatttggagagatag

SEQ ID NO: 33120 - protein, 134 aa, Unknown
  Obtained from environmental sample
  misc_feature (1)..(134): Xaa is any amino acid
MMGSDMSYEDAVNNDPLSARYEPVLAGSEVWNGQDAWVLELNAKKKTESYPKRKLWIDKKTGDMLHYELYALSGAKLKEYSLIKVGTFANRRFPVEIELRDLLRKNSKTTFIMKNVVMDKPIADAVFSQRNLER

SEQ ID NO: 33121 - DNA, 399 bp, Unknown
  Obtained from environmental sample
  misc_feature (1)..(399): n is a, c, g, or t
ttgttgagaagtgcggcaaaagcaggcgatgatgtgtggcttgcaggctcgccaagtggtttagaaataggtccaataaccgtaaatcctccgcttagtttgggaaaagaactcgcaaaaataaaaggcattggggcttgcatagatacaagcgattccatcgcggaaagcttgcagcatatatccgagaaatcgaaagttcgtttggatgtggaagatgttattttgaatagcgcagaggatttttgtttattattcacggcaagggaatcggcgagggatagtattttgaaactcacaaaaaaatttcccataaataaaataggtaaagcaaaaaagggtagtggtatttttttgaaaggaaaaaaaattgaggtgaaaggatggcagcatttttag

SEQ ID NO: 33122 - protein, 132 aa, Unknown
  Obtained from environmental sample
  misc_feature (1)..(132): Xaa is any amino acid
MLRSAAKAGDDVWLAGSPSGLEIGPITVNPPLSLGKELAKIKGIGACIDTSDSIAESLQHISEKSKVRLDVEDVILNSAEDFCLLFTARESARDSILKLTKKFPINKIGKAKKGSGIFLKGKKIEVKGWQHF

SEQ ID NO: 33123 - DNA, 549 bp, Unknown
  Obtained from environmental sample
  misc_feature (1)..(549): n is a, c, g, or t
ttggcaggtcccgtggtggctggtgctgttgttttggtggctggctctgcaatatcaactttaaacgattccaaaaaattaactgaaaaacaacgcgaacaaattttcgcagaattgccaaaatactgcgaataccattccattgccgaagcttcagcaggggaaatagacgaaataggaattctaaacgcaaccttcctagctatgaggcgcgcacttgcccctataatttcagagttaaatgaaaaaaaattgcactataaaattttggtggatggaaatttgcacataagggaaatggataaagatttgcaaatgccaatagtgaaaggagacggcagggtagcttgcatcgctgcggcttctatttttgcaaaagtacacagagacgggctaatggtaaaatttgcagagcaattcccaaactatggctttgaaaagcacaaaggctatggcacaaaagcacatttgctcgccgtacaaaaatttgggcaatgcgaaattcaccggaagagttttaaaattccatttatcaataatgaaaattaa

SEQ ID NO: 33124 - protein, 182 aa, Unknown
  Obtained from environmental sample
  SIGNAL (1)...(19)
  DOMAIN (1)...(176): Ribonuclease HII
  misc_feature (1)..(182): Xaa is any amino acid
MAGPVVAGAVVLVAGSAISTLNDSKKLTEKQREQIFAELPKYCEYHSIAEASAGEIDEIGILNATFLAMRRALAPIISELNEKKLHYKILVDGNLHIREMDKDLQMPIVKGDGRVACIAAASIFAKVHRDGLMVKFAEQFPNYGFEKHKGYGTKAHLLAVQKFGQCEIHRKSFKIPFINNEN

SEQ ID NO: 33125 - DNA, 1332 bp, Unknown
  Obtained from environmental sample
  misc_feature (1)..(1332): n is a, c, g, or t
ttgatattaaaaaatatgcagggcgcgggagcgaggaatttccatttcggaaagagcagggctaagcgttatcatgaagaaggaaaaaaggtcagctttacggatgtcgcgggtcaaaaggacgcgaaatttgagcttgaagaagtggttgaatttttgaagaacccgcaaaaatttacaaaaatgggggcgcgtatcccaaaaggcgtgcttcttgtcggaatgccgggaacgggtaaaacattgatggcgcgttccgttgcgggcgaggcgggcgtggctttctttcacatgtccggctcggactttgtggaaatgtttgtcggcgtcggggcaagccgcgtaagggatctttttgaacagggaagaaaaaacgccccctgtatcatttttatcgacgagttggacgcggtagggcgcacgcgcggcgcgggctacggcggcggccatgacgaacgcgaacagacattaaaccagttgttagttgaaatggacggttttgactcaaaagacggcgtaataattctagccgccacaaaccgtcccgatgttttagacccggcgcttctgcgcccgggccgcttcgacaggcaggtggttatagcgatgccagatatcaaagagcgcgaggcaatactgcaaatccacgccgcgaaaattcaaatagacaagactattgatcttacccgtatcgccagggctacgcccggaatgagcggcgcggatatcgccaaccttgtaaacgaagcggctctttttgccgcccgaaaagacaagaatgaagtgcagatgtccgattttgaagaagcgagggacaaggtgctgatgggagtcgcgcgtaaaactctcgtggtatccgacaaggaacgcaggatgaccgccattcacgaggccggacacgctctgcttcattattttctgaagaacgcggatcctctgcacaaagttaccattgttccgcacgggcgcgcgctgggcgcttctctttcacttcccgaagaagacacatacagccgcgcaaagggctggatagaggaccgcatcgccatctgttacggcggctggcttgcggagaaacttttttataacgagactactaccggaaccaaaaacgacatccagcaggctacggaaatggcgcgtaacatggtttgcgaatggggcatggctgaggatatagggcctgtcgcctacgggcaggaagacgagcccatttttatcggaaaagaaatcgcgaggcacaaggattattccgaggataccgcccggcgcatagacaaggcggttatggagattcttgaacgcgcaagaaataacgctaataaaatttag

SEQ ID NO: 33126 - protein, 443 aa, Unknown
  Obtained from environmental sample
  DOMAIN (69)...(203): ATPase family associated with various cellular activities (AAA)
  misc_feature (1)..(443): Xaa is any amino acid
MILKNMQGAGARNFHFGKSRAKRYHEEGKKVSFTDVAGQKDAKFELEEVVEFLKNPQKFTKMGARIPKGVLLVGMPGTGKTLMARSVAGEAGVAFFHMSGSDFVEMFVGVGASRVRDLFEQGRKNAPCIIFIDELDAVGRTRGAGYGGGHDEREQTLNQLLVEMDGFDSKDGVIILAATNRPDVLDPALLRPGRFDRQVVIAMPDIKEREAILQIHAAKIQIDKTIDLTRIARATPGMSGADIANLVNEAALFAARKDKNEVQMSDFEEARDKVLMGVARKTLVVSDKERRMTAIHEAGHALLHYFLKNADPLHKVTIVPHGRALGASLSLPEEDTYSRAKGWIEDRIAICYGGWLAEKLFYNETTTGTKNDIQQATEMARNMVCEWGMAEDIGPVAYGQEDEPIFIGKEIARHKDYSEDTARRIDKAVMEILERARNNANKI

SEQ ID NO: 33127 - DNA, 444 bp, Unknown
  Obtained from environmental sample
  misc_feature (1)..(444): n is a, c, g, or t
atggccgccgccgtagcccgcgccgcgcgtgcgccctaccgcgtccaactcgtcgataaaaatgatacagggggcgttttttcttccctgttcaaaaagatcccttacgcggcttgccccgacgccgacaaacatttccacaaagtccgagccggacatgtgaaagaaagccacgcccgcctcgcccgcaacggaacgcgccatcaatgttttacccgttcccggcattccgacaagaagcacgccttttgggatacgcgcccccatttttgtaaatttttgcgggttcttcaaaaattcaaccacttcttcaagctcaaatttcgcgtccttttgacccgcgacatccgtaaagctgaccttttttccttcttcatgataacgcttagccctgctctttccgaaatggaaattcctcgctcccgcgccctgcatattttttaa

SEQ ID NO: 33128 - protein, 147 aa, Unknown
  Obtained from environmental sample
  misc_feature (1)..(147): Xaa is any amino acid
MAAAVARAARAPYRVQLVDKNDTGGVFSSLFKKIPYAACPDADKHFHKVRAGHVKESHARLARNGTRHQCFTRSRHSDKKHAFWDTRPHFCKFLRVLQKFNHFFKLKFRVLLTRDIRKADLFSFFMITLSPALSEMEIPRSRALHIF

SEQ ID NO: 33129 - DNA, 804 bp, Unknown
  Obtained from environmental sample
  misc_feature (1)..(804): n is a, c, g, or t
atgaggggagggaaggcgtcgccgaagatggcggcggctctgtcggcggtactgttgaaaaaaggcggcgtcgacagcgttggcaatgttgatacgaacggtgttaataaggatcgtatcgatcttaaaaaaatggccgtggatgaagagatcgagatcggcgacgggttcgccataaggcgcgacgccgacttttcggccctgcccggcggcgatcgtcttgagtgggaggcgttttccgaagacgaatccgtatggctctccgcgcttgacatcgagaccttgtctaaactgacgcgaagcgatcttgatttggattcgtcaagcggcgtagatagaagattggttacctttgatttttgggtcaaacgtgagaagggcgtattggtgtcgtcccttcccgtacttagaacgccgacgctcaacgagttgctggcggatagcgcggacgcgattttggaatccgtccccaaaaattcccgccgcgatttcggcgtgccggctcgtattccgctgcgcggcggcaaccgccacgtcgtcacctacttcgggccgaagtcgaagccgtttccgtactccagcttctacgatgttatggagaacaacgaggcgaacttatacgcgatggaggggaatgttttcattgtaggctcgaccgctccggcggtgttcgatataaaatccgcgccgcacgagcggctctttccgggtgtggaggtccacgcgtcgctcttgaactccattttcaccggaaactatgtgcgccgccttgccgagggcaggatatgtgctcggccgatctga

SEQ ID NO: 33130 - protein, 267 aa, Unknown
  Obtained from environmental sample
  misc_feature (1)..(267): Xaa is any amino acid
MRGGKASPKMAAALSAVLLKKGGVDSVGNVDTNGVNKDRIDLKKMAVDEEIEIGDGFAIRRDADFSALPGGDRLEWEAFSEDESVWLSALDIETLSKLTRSDLDLDSSSGVDRRLVTFDFWVKREKGVLVSSLPVLRTPTLNELLADSADAILESVPKNSRRDFGVPARIPLRGGNRHVVTYFGPKSKPFPYSSFYDVMENNEANLYAMEGNVFIVGSTAPAVFDIKSAPHERLFPGVEVHASLLNSIFTGNYVRRLAEGRICARPI

SEQ ID NO: 33131 - DNA, 1341 bp, Unknown
  Obtained from environmental sample
  misc_feature (1)..(1341): n is a, c, g, or t
gtggggataattcaaactgcccgcgcaagcgggatggagcgttttcccatgccctatgtgctgaccaactgccacaacagcctgtgcgctgtcgggggaacgattaatcaggatgatcatgttttcgccctttccgccgcgcagaaatacggcggtatttatgtaccgccccaccttgcagtcattcacagttataaccgcgaaatgatggccggctgcggcaggatgattctgggctccgacagccatacccgttacggggcgcttggcacaatggcggtcggcgaaggcggcggagagcttgcaaaacagcttgtcggcagaacttacgacatgccgtcccctcccgtaatagggatttattttgaaggagagacggcgaagggagtcggtcctcaggatgtggcgcttgcgataattggcgcggtttttaaaaacggatatgtaaaaaacaaggcgcttgaatttattggggacggtgttgataaaatgacggttgatttccgtaatgggattgacgtaatgacgacggagaccgcctgctggtcatccatttggaaaaccgacgacaaggtaaaaacataccttaaagagcggggcagggaaggcgattacaaggaactgaaacccgccaccgtctcctactatgacggttttatcaaaattgatttatctaaaattgagccgtgtatcgcccttccgttccatccaagtaatgtgtacacgattaaagtactgcaaaagaacgcaaaagatattttcgcaaaaatagaagaagaaaacaaggagacgggccttaatgtgaatcttggcgttaaatgtcatgacggcggcgtgtgggctgatcaggcgattatcgcaggttgttcaggcggtatcttttccaacatcatggccgcatctgacattattaaaggacactcaacaggaaagagtaatttttccatgagcgtgtatcctgaaagccagcctacgtatcttgaacttgtgaaaaacggagcggtggaaacatttatgaaagccggagttcttgcgcgtgaagctttctgcggcccatgttttggagcgggagacactccggcaaataacgaactgtcaatccgtcacgttacgcgcaatttcccaaaccgcgaaggttccaagccaaacgacggacaaatcgcttccgtcgcgctaatggacgctagatcaatcgccgcgacggcgattaacggcggaaaaattaccgccgctactgacattgacgtgaaatacggtaaatataagttcttctttgacaaaaacatttacgaccagcgcgtatacaatggtgtgggaaactcaaaaccgcaactgaattga

SEQ ID NO: 33132 - protein, 446 aa, Unknown
  Obtained from environmental sample
  DOMAIN (3)...(405): Aconitase family (aconitate hydratase)
  misc_feature (1)..(446): Xaa is any amino acid
MGIIQTARASGMERFPMPYVLTNCHNSLCAVGGTINQDDHVFALSAAQKYGGIYVPPHLAVIHSYNREMMAGCGRMILGSDSHTRYGALGTMAVGEGGGELAKQLVGRTYDMPSPPVIGIYFEGETAKGVGPQDVALAIIGAVFKNGYVKNKALEFIGDGVDKMTVDFRNGIDVMTTETACWSSIWKTDDKVKTYLKERGREGDYKELKPATVSYYDGFIKIDLSKIEPCIALPFHPSNVYTIKVLQKNAKDIFAKIEEENKETGLNVNLGVKCHDGGVWADQAIIAGCSGGIFSNIMAASDIIKGHSTGKSNFSMSVYPESQPTYLELVKNGAVETFMKAGVLAREAFCGPCFGAGDTPANNELSIRHVTRNFPNREGSKPNDGQIASVALMDARSIAATAINGGKITAATDIDVKYGKYKFFFDKNIYDQRVYNGVGNSKPQLN

SEQ ID NO: 33133 - DNA, 423 bp, Unknown
  Obtained from environmental sample
  misc_feature (1)..(423): n is a, c, g, or t
gtgctgatagttaatgattatcccgaattgggtaggcgcgccggtatagacggcgtgcatgtcgggcaggataccgacccggcggcagtcagaaaaatcatcggcatggacaaaatcctcggctggactacgcacaatatcgcgcaggctaaaaaagccgcggaattaaaagtaaattatatttccgcagggccggtctggagcacgccgaccaagcccggccgtccgccggtgggtttagagtatgtccgcgaagtcgcggcgcagacagatttgccgttcgtggccatcggcggcattgacctaaaaaatgtccgcgaagtcttggcggcgggcgcggatactatcggcgtggtcagaagcgcgggggatacggtaaaatatttgcaacaaattaaagctgctaacgatatctccatgtaa

SEQ ID NO: 33134 - protein, 140 aa, Unknown
  Obtained from environmental sample
  DOMAIN (1)...(122): Thiamine monophosphate synthase/TENI
  misc_feature (1)..(140): Xaa is any amino acid
MLIVNDYPELGRRAGIDGVHVGQDTDPAAVRKIIGMDKILGWTTHNIAQAKKAAELKVNYISAGPVWSTPTKPGRPPVGLEYVREVAAQTDLPFVAIGGIDLKNVREVLAAGADTIGVVRSAGDTVKYLQQIKAANDISM

SEQ ID NO: 33135 - DNA, 936 bp, Unknown
  Obtained from environmental sample
  misc_feature (1)..(936): n is a, c, g, or t
gtgatgaaaataggtattaaatttacaataataatggttgttctggggttattcgccatagcttcggtcagtattactctgcttatcagggcgcgatccagtatcacaggcgtttcggaaaaatacgccgtttccatggctaatgactcgnccgcggatattacaaattttattcaatcatacatgtacgcggtggaaaatatcgctactgttatggaacagtaccgttatatgacaattgcccatcgccgggctttctttaattatatacttgcaggcataactctggaaaaccccgggattatcgcggcatggtgcgtttgggaaccggacgttttggaaggcgacgacaggcagtacattggaaccaaaggaaccagtaccaacggacgtttttccccctactattactgggataacggaaatgtcgaataccttgccctggaagattttgaagaccccgcatatcttttgccgaagaaatcaggacttcagacagttttggatccatacgagtacaaagtgggcggaaagacggttttgatgacttcgcttgccgttcctataagcacggacggcaaggttgtgggggttataggctttgatattcccctgacagaaatccagaaaatttcccagacccaaaagccttttcccaattccataaccgccgtatttagcagcaacggcacggttaccgcccactttgacgaaagccgaatcggaaaaaatttaagggttaccgaaacggacatggctggacggcatcttgatgattttgtgaatgccgttacggccggcagacagtattctttcagtaattacatcgaagcgttacaagagaatatgaaaatatttaccgttcccattcctgtcggttccgcaacaaccccctggagctcgcatagccgtatgcgcatactcgtgccaatctga

SEQ ID NO: 33136 - protein, 311 aa, Unknown
  Obtained from environmental sample
  SIGNAL (1)...(21)
  DOMAIN (167)...(248): Cache domain
  misc_feature (1)..(311): Xaa is any amino acid
MMKIGIKFTIIMVVLGLFAIASVSITLLIRARSSITGVSEKYAVSMANDSXADITNFIQSYMYAVENIATVMEQYRYMTIAHRRAFFNYILAGITLENPGIIAAWCVWEPDVLEGDDRQYIGTKGTSTNGRFSPYYYWDNGNVEYLALEDFEDPAYLLPKKSGLQTVLDPYEYKVGGKTVLMTSLAVPISTDGKVVGVIGFDIPLTEIQKISQTQKPFPNSITAVFSSNGTVTAHFDESRIGKNLRVTETDMAGRHLDDFVNAVTAGRQYSFSNYIEALQENMKIFTVPIPVGSATTPWSSHSRMRILVPI

SEQ ID NO: 33137 - DNA, 486 bp, Unknown
  Obtained from environmental sample
  misc_feature (1)..(486): n is a, c, g, or t
ttgttcccttctaccattgcggaagtaattaacgaatgcctgggcgttgacaaacggcaggtggaaaaatctaagactgcaaatgtttccggtgtttttgctgggcggcgcatactgctggttgaagatgtggaaattaaccgtgaaatcgtacagacgctgcttgaaccgacaaaagtggatatagactgcgctgaaaacggcgaacaagccgtgcgtatgttcagtgagtcgccgcagaaatacgacatgatttttatggatgtacagatgccgataatggacggttatgaggcgacacggagtataagagcattgaatattccggaggcaaaaacaataccaattgttgcaatgactgcgaatgtatttaaagaggatattgaaagatgccttgaagccggtatggacggccatgtcggcaagccgattgattttgatgaagttttcggcaagatgcaatcctattttgacaaagcagagtaa

SEQ ID NO: 33138 - protein, 161 aa, Unknown
  Obtained from environmental sample
  DOMAIN (36)...(154): Response regulator receiver domain
  misc_feature (1)..(161): Xaa is any amino acid
MFPSTIAEVINECLGVDKRQVEKSKTANVSGVFAGRRILLVEDVEINREIVQTLLEPTKVDIDCAENGEQAVRMFSESPQKYDMIFMDVQMPIMDGYEATRSIRALNIPEAKTIPIVAMTANVFKEDIERCLEAGMDGHVGKPIDFDEVFGKMQSYFDKAE

SEQ ID NO: 33139 - DNA, 636 bp, Unknown
  Obtained from environmental sample
  misc_feature (1)..(636): n is a, c, g, or t
atggcaagaattgtctcgtttatgtattcccgtttttgcacggtgttacgcggtttacacgaagagggcggcaatgacaaagagaataccgccgagttatgcgcggaactgttagaaaaagaggaatacattgatgaaatgcgagaaacactcagcggctttttaattgaatgttcccgcgtaaaactcaatccaaagaccgaagcccgtatttcataccttatgcaggtcatttccatgcttgaatcaatgagcgatgaatgttacagcataagccgtttgctggaaaaaagcgttgataagaattacctgctaaaaaacaaggaaatggatgagcttatcccatacgttgggctagttgaggaatttttaagcttgcttgaaaaacagcttgggcgtaatccgtcatcggaactaaaaatacgcgccgccgaactggaaaataaaatcgacaaagaccgcaaaaaattgcaaaaacttgggcgcaagcgtatcgaagccggcggcaatgtaaaaaccgaattgctttttatagatttagtccgcagaatagaaagacttggggattactgttttgagatttcagaagaaaatacgcttaaaaaattgattaacaccattattaataaaaagtga

SEQ ID NO: 33140 - protein, 211 aa, Unknown
  Obtained from environmental sample
  misc_feature (1)..(211): Xaa is any amino acid
MARIVSFMYSRFCTVLRGLHEEGGNDKENTAELCAELLEKEEYIDEMRETLSGFLIECSRVKLNPKTEARISYLMQVISMLESMSDECYSISRLLEKSVDKNYLLKNKEMDELIPYVGLVEEFLSLLEKQLGRNPSSELKIRAAELENKIDKDRKKLQKLGRKRIEAGGNVKTELLFIDLVRRIERLGDYCFEISEENTLKKLINTIINKK

SEQ ID NO: 33141 - DNA, 501 bp, Unknown
  Obtained from environmental sample
  misc_feature (1)..(501): n is a, c, g, or t
atgacagagaaactgacatttaatgacggcagagtgtacgaaggcgaaacacagggcggtaaaccgcatggcaaaggaaaaatgacatggactgacgacgacggagatgtcgatgtctacgaaggcgattgggtaaacggcaaaaaacacggcaaagggaaatacacttgggcggacggttctgtttatgaaggcgattacgcagacaacagcgccaacggcaaagggaaagagacgaaagctaacggcgacgtatacgaaggtgattttgttgacggcaatccccacggcaaaggtaaaaaaacattcgccaacggcgatgtctacgaaggcgatttcgattttgccgattgcataggcaaagggaaaaaaatatttgccaacggtgatgtctacgaaggagatttttacggcgaaccgcacggcaaaggcaaaatgacgtacgccattggcagaattgaggaaggcgaatggaaagacggaaagtttgtgggacagtaa

SEQ ID NO: 33142 - protein, 166 aa, Unknown
  Obtained from environmental sample
  DOMAIN (63)...(85): MORN repeat
  misc_feature (1)..(166): Xaa is any amino acid
MTEKLTFNDGRVYEGETQGGKPHGKGKMTWTDDDGDVDVYEGDWVNGKKHGKGKYTWADGSVYEGDYADNSANGKGKETKANGDVYEGDFVDGNPHGKGKKTFANGDVYEGDFDFADCIGKGKKIFANGDVYEGDFYGEPHGKGKMTYAIGRIEEGEWKDGKFVGQ

SEQ ID NO: 33143 - DNA, 873 bp, Unknown
  Obtained from environmental sample
  misc_feature (1)..(873): n is a, c, g, or t
gtgacgtctaccttgcggctcgtcatcttggcggcttttgaccttgcgccagacgacctcgctcatctgagcaagctcacaaaggaaccgagtgcgaacataataaaacttccaaacatatccgcaagcgttccgcagctcaaagcggcgatagccgaacttcagggcaaaggatacaaaatcccaaactatcccgaaaagccacagaatagtgacgagcagaaaataaaggatgcttacgacaaggttaaaggctccgcggtaaatcccgtgctgaggcaaggcaattcagaccgccgcgctccgcttgcggttaagcaatatgcaaaaaagcatccacattcaatgggtgaatggaaaagcgattttaaaaccgatgtctcctcaatgcaaagcggtgatttttacgaaagcgaaaaatccataactttaaagggaaatacatctttttcaatcgagttcataaacgaaaagggcgagaaaacaaccttaaaaaaatccacaccgcttttggctggtgaaattttggatagctccgtgcttaaaataaaggagttggagagtttttttgaacgagaatatgaacaggcaaaaaaagatggaatgacggtttctgtccacttaaaaaccacgatgatgaaggttagcgaccccgtgatttttggagttgcattcaaaacgcttttcaaatcccttttcaataaattttcaaaggaatttgcggaactcggcatagacccaaataacgggcttcaagacctgcggaaaaaaatcgcgggttctccaaaagaaacggaaatagaaaacgaaattcaaaatacttttgaaaatgctccgagattagcgatggatttcacagcccaagtgatataa

SEQ ID NO: 33144 - protein, 290 aa, Unknown
  Obtained from environmental sample
  DOMAIN (2)...(290): Monomeric isocitrate dehydrogenase
  misc_feature (1)..(290): Xaa is any amino acid
MTSTLRLVILAAFDLAPDDLAHLSKLTKEPSANIIKLPNISASVPQLKAAIAELQGKGYKIPNYPEKPQNSDEQKIKDAYDKVKGSAVNPVLRQGNSDRRAPLAVKQYAKKHPHSMGEWKSDFKTDVSSMQSGDFYESEKSITLKGNTSFSIEFINEKGEKTTLKKSTPLLAGEILDSSVLKIKELESFFEREYEQAKKDGMTVSVHLKTTMMKVSDPVIFGVAFKTLFKSLFNKFSKEFAELGIDPNNGLQDLRKKIAGSPKETEIENEIQNTFENAPRLAMDFTAQVI

SEQ ID NO: 33145 - DNA, 492 bp, Unknown
  Obtained from environmental sample
  misc_feature (1)..(492): n is a, c, g, or t
atggaaagcatcagaatagcctccatgctcaacatgagcgtgggtctgatccacggtcgcgaactgcccgaaccgaacccccgcaaccgccgcaaccgccgcatagacatctggtggcgcggaatgcgcaacggctcgctgatggtcatcttagcccacctaatgtccctgaactccgaatggacgggcgcgaagatacgcatactgcgcgtagcctacacccccgaagaacaggccaaagcgagggaagaactggaacgcctgatcgaagccgcgagaatggacatagaggtggagcccataatctccgacgacaccttccccaacctcctgcgccgctactccggcctatccaccgccgtattcttaggcttcagcgccgacgccgccacagaccctataaaattccaagaggcctatagtggattattgcagggaatgcctactacgataatgatccagtccaccggggaagcggatttgttgtcttga

SEQ ID NO: 33146 - protein, 163 aa, Unknown
  Obtained from environmental sample
  misc_feature (1)..(163): Xaa is any amino acid
MESIRIASMLNMSVGLIHGRELPEPNPRNRRNRRIDIWWRGMRNGSLMVILAHLMSLNSEWTGAKIRILRVAYTPEEQAKAREELERLIEAARMDIEVEPIISDDTFPNLLRRYSGLSTAVFLGFSADAATDPIKFQEAYSGLLQGMPTTIMIQSTGEADLLS

SEQ ID NO: 33147 - DNA, 798 bp, Unknown
  Obtained from environmental sample
  misc_feature (1)..(798): n is a, c, g, or t
ttgtatttgatggaagacggaaaaattaacacacaaaaacatttttccgttcaccccgccgttataagcgtttggtcagccgtcatcgcgctgggacatttattgccgacttttccaattttgggaacaggcgggactttttctttatctacggttctttatccgctttcagggatatttttcggtccgttagccggcgctctttgctctgcggcgggcggctttatcggttcattaatcgcgccttacacggcatggatggggcttggcacttttatcgtaggaacaactacggcgtttacctcaggctgcgccgcgtggggaaagttgccgcctgtcgccgtcagccctgccggaaatattatcatcaacggagggattatcgtatatcttgttgggacgagtctttggtttacgcaggaaataggcagaagcgttatccgctttccgttatttttttacgggctgggttttgttgttatgataatagcgtttattttcgcgcggcggatgtttgagagcaaaaataaatggataaaatttcctgctgtctggttatgcgcattcagcggactcataggcggagctacgataggaaattttttctctcttgttttgtacaaacagccaaaagaagtttggatgttacttacaattaccgcccccattgaacgcgccgtttttgcgtctattgcgatgcttgcaggcgcgccgcttctttcgggtttgaataaactcggcatttttacgggccctcagagtgatatagatgaaaacggagtttcaaatgaaaattga

SEQ ID NO: 33148 - protein, 265 aa, Unknown
  Obtained from environmental sample
  misc_feature (1)..(265): Xaa is any amino acid
MYLMEDGKINTQKHFSVHPAVISVWSAVIALGHLLPTFPILGTGGTFSLSTVLYPLSGIFFGPLAGALCSAAGGFIGSLIAPYTAWMGLGTFIVGTTTAFTSGCAAWGKLPPVAVSPAGNIIINGGIIVYLVGTSLWFTQEIGRSVIRFPLFFYGLGFVVMIIAFIFARRMFESKNKWIKFPAVWLCAFSGLIGGATIGNFFSLVLYKQPKEVWMLLTITAPIERAVFASIAMLAGAPLLSGLNKLGIFTGPQSDIDENGVSNEN

SEQ ID NO: 33149 - DNA, 378 bp, Unknown
  Obtained from environmental sample
  misc_feature (1)..(378): n is a, c, g, or t
atgaaaaatgaattcgcaacaaaattcgagatggtctgcgacattctggatcgccatgaacgcagcccaagtaacctgatcgctattttacaggagattcaggaagcgtattcctatctgccggaggacataatgacttatgtcgccacggctctggaaatctcgcccggcactgtatttggcgtcgctactttttattcgcacttcacccttgagccgaaaggcaagtacattatcagggtgtgcgacggaactgcctgccatgttaaaaaatcggcggacattatcgattatctggagaaagagcttggtcttaacaaaattaaaaagactacaaacgacatgctttttactctggaaaccagtggcatgccttga

SEQ ID NO: 33150 - protein, 125 aa, Unknown
  Obtained from environmental sample
  DOMAIN (5)...(125): Respiratory-chain NADH dehydrogenase 24 Kd subunit
  misc_feature (1)..(125): Xaa is any amino acid
MKNEFATKFEMVCDILDRHERSPSNLIAILQEIQEAYSYLPEDIMTYVATALEISPGTVFGVATFYSHFTLEPKGKYIIRVCDGTACHVKKSADIIDYLEKELGLNKIKKTTNDMLFTLETSGMP

SEQ ID NO: 33151 - DNA, 1458 bp, Unknown
  Obtained from environmental sample
  misc_feature (1)..(1458): n is a, c, g, or t
atgatcagatcggccgaggtcatggaactttaccctgaacgcgtcaacagttccggagggcatatactgcaggggaaagttagaaacaaacagatcaatttgaccgaaaccaaccaggtaagtttctcgctgtcccttgtaaacagcggcgctggcgctatacacataacgttagaataccctgaaaccgccggcattacgcagattaccgtaaaaacttacgccgattcggatgaccctatcaattcggaagactttacccccgaaaccgaaaacccctttgtctataaaaacgaagttgcctcgggggattatgtaatcagtttcgagctttacagggaggatgaactgcgggccgctgtttccgaactggttctggtacggaacaatttaaccagcagtaaagagattatccttgtaggggaagatttgaaacccttgctgaccgggacaataagcataaccggaacttacatattggaggcgaataccgatttacttggcggcattggaaacatttcttaccggtggaacaagggggaaaccgccgtcggggctaacagcaggacttatgttgtgcaatccgccgatataggttcaacgataagcgtaaccgtaacccgtgacggttatgtcggcagcgttaccagtcttcccagcgaaacagtcggcccgataaccgtcaccgcgcttaccgagaataactgggctgacggcaatcttcccgcacctggcgacgagcagtggttcaagttcacagcgaccgcaagcacgcagttcatacatttcagtcccggcacgctgccttttgtgtatgttggggtgtttgactcaagcggcactgcggttggaagccagacactattatatagcagtacccgatttacctcccggacggtaacaacagggcaggagtactatataagggtatggccttccagttcttccggcacgtaccagattgcgttcaatactacaattattccgccaggtggtgtaactccaaccgcgcttaccgaaaacaactgggaggacggcaatatccccgcatcaggcggcgagcagtggttcaagttcattgcaaccgcaagcacgcagatcatacatttcaagcccggcacgctggcttctgtgtatgttcaggtgtatgactcaaatggcactgcggctggaaacgaggcatctttatccagcagtacccgatttacctcccggacgataacaacagggcaggagtactatataagggtatatcctttcatttcttccgacagcggcacataccagattatgttcaatactgaatttctcctgaccggtgtaattccaaccgtccttaccgagaacaactgggaggacggcaatatccccgcatcaggcggcgagcagtggttcaagttcactgcaaccgcaagcacgcagatcatacatttcaggccagacacgctgcttctgtga

SEQ ID NO: 33152 - protein, 485 aa, Unknown
  Obtained from environmental sample
  misc_feature (1)..(485): Xaa is any amino acid
MIRSAEVMELYPERVNSSGGHILQGKVRNKQINLTETNQVSFSLSLVNSGAGAIHITLEYPETAGITQITVKTYADSDDPINSEDFTPETENPFVYKNEVASGDYVISFELYREDELRAAVSELVLVRNNLTSSKEIILVGEDLKPLLTGTISITGTYILEANTDLLGGIGNISYRWNKGETAVGANSRTYVVQSADIGSTISVTVTRDGYVGSVTSLPSETVGPITVTALTENNWADGNLPAPGDEQWFKFTATASTQFIHFSPGTLPFVYVGVFDSSGTAVGSQTLLYSSTRFTSRTVTTGQEYYIRVWPSSSSGTYQIAFNTTIIPPGGVTPTALTENNWEDGNIPASGGEQWFKFIATASTQIIHFKPGTLASVYVQVYDSNGTAAGNEASLSSSTRFTSRTITTGQEYYIRVYPFISSDSGTYQIMFNTEFLLTGVIPTVLTENNWEDGNIPASGGEQWFKFTATASTQIIHFRPDTLLL

SEQ ID NO: 33153 - DNA, 558 bp, Unknown
  Obtained from environmental sample
  misc_feature (1)..(558): n is a, c, g, or t
ttgcaatttccacagtctaatatacgagggggcaagagagggtttgtgaagggagatgaaacgccggaataccttgccggacaggcgtcgcggggcgatgaagaaagttttgccgctctctgcgatgttttgaagacaaagcttttccgtactgcaaaaggcgtacttggcaatgaaaccctcgcccttgacgccgtcagtgaagctgttttaagggcgtttaagggaataaaacggctccgcgaacccaaatacgcggaaacatggtttatccgcatcgtattgaatgcggcgaaggatgtaaagaggaggcaaaaatatgagctagtcatggaaacagtgcctgaaagcgcgtattacgataatcacggtgatatggaatttttcgctttgattgaatctttacaaaaggagcttcgcgaaatcatcagtttgaagtattattccgattatacgctggctgaaatatcggaaatactgaaaataccggaaggaacggttaaaagccgcttaaacagggcgttaaatcaactgcggctggaggtttcaaatgaataa

SEQ ID NO: 33154 - protein, 185 aa, Unknown
  Obtained from environmental sample
  DOMAIN (40)...(107): Sigma-70 region 2
  misc_feature (1)..(185): Xaa is any amino acid
MQFPQSNIRGGKRGFVKGDETPEYLAGQASRGDEESFAALCDVLKTKLFRTAKGVLGNETLALDAVSEAVLRAFKGIKRLREPKYAETWFIRIVLNAAKDVKRRQKYELVMETVPESAYYDNHGDMEFFALIESLQKELREIISLKYYSDYTLAEISEILKIPEGTVKSRLNRALNQLRLEVSNE

SEQ ID NO: 33155 - DNA, 861 bp, Unknown
  Obtained from environmental sample
  misc_feature (1)..(861): n is a, c, g, or t
atgggagaggttgaagaagaggatgcctttgaattccttaccagaatgtcagtcaaaaaacttaaagacggatgcccaatggggggaacccgcacttttgccggtgtagtgaaatttgtcatcatggcgttcaatgtatacaagcgccggaaccgccgatggcataacccctttcaagagatcgatcctccgtcatataacaagaaaacaagggattttcttccggaagaagaaatgatccggttattctacccaggggtactccagagtacaatggagttggctgtctgcgccgccatgtttctttcgggcctgcgccgggcggaagtggccgccctaaagccggaagatttagactggcatactccgaaaataactgtccgcaggacatggcagatgtttaattccagaaaaaaaatattgtcgactacgaaggggaaaaagccgcgagagtcgccgtttgatccgattcttcagatggcaataaaaaaattatgggaagaacaaggagagcatgaatttgttttttcctatgtcgataaaaacgtcgttaaaattatcggttcatcatggattaagggcaggtttccaaaatggctgaaacgcgccggaattgaattgggcggccgtaaaatagttccacacagctcgcgccattccctggcctcgttattggaagggaaaggattttcgctcaggtacattcaggatttgctagggcattcggatctgaaaaccactataggatatcttcacagtccggagaaaataatccgcgatattggaaacgcaataactgaagaaatacagttggcggaacagaaaccagaggagaatattattgaatttaaggtgtcttag

SEQ ID NO: 33156 - protein, 286 aa, Unknown
  Obtained from environmental sample
  DOMAIN (87)...(260): Phage integrase family
  misc_feature (1)..(286): Xaa is any amino acid
MGEVEEEDAFEFLTRMSVKKLKDGCPMGGTRTFAGVVKFVIMAFNVYKRRNRRWHNPFQEIDPPSYNKKTRDFLPEEEMIRLFYPGVLQSTMELAVCAAMFLSGLRRAEVAALKPEDLDWHTPKITVRRTWQMFNSRKKILSTTKGKKPRESPFDPILQMAIKKLWEEQGEHEFVFSYVDKNVVKIIGSSWIKGRFPKWLKRAGIELGGRKIVPHSSRHSLASLLEGKGFSLRYIQDLLGHSDLKTTIGYLHSPEKIIRDIGNAITEEIQLAEQKPEENIIEFKVS

SEQ ID NO: 33157 - DNA, 873 bp, Unknown
  Obtained from environmental sample
  misc_feature (1)..(873): n is a, c, g, or t
atgaaagaattccgggtcggcatactttctggggacgaaaaactcacggacttttaccctgacgacagttatgaccagcccgttcactgggacgacaaacgccaccttaatgtaaccacgtccatttgcgatgaccacgcggctgagcgggcgagggtatacgtcaaaaaacgggactgttccgccgccgctattgacgcgatagggacaataaagaaactgaaaggcaagccggatatgccttcggcggtctttcttaacagcgacggggtggatgacagtttccccattgaagacaacatggatcacatggcaaagaagttctactattccgtattgcggatgtttatagaaaacgacgacgatcccgccaaaggatggggaacctcggtaagggaacttgcggcttaccttcccgatctcagcaaacgcggctccggtgacgacatctcggtggcaggcatcatagatatggacgcggtaaagaccgagcctttccgcgaggcgctccggaaagcaaaagcggaagccgatgaacgccgcgcgagggagaaggaagaacgggaaaaagccgtgaaagaggcggaagaggcgagggcgaaagcggctgaggaaaagaaagccgccgaagaagcggccgcgaaagcggaaccaagcgctcgccaacagttggccgatgacccgtcggttcaggagacggcggagtataaaagggatttggagaaaatggataacagtaactttatattttcagaaaccgtgcaaccgagtccgcagaagcaagccagtgaaggagactccgacatcccctcaagcgacgccgcgtacaaggcgcagcctcaaaccggagcgaatgtagacaccctggcgtaa

SEQ ID NO: 33158 - protein, 290 aa, Unknown
  Obtained from environmental sample
  misc_feature (1)..(290): Xaa is any amino acid
MKEFRVGILSGDEKLTDFYPDDSYDQPVHWDDKRHLNVTTSICDDHAAERARVYVKKRDCSAAAIDAIGTIKKLKGKPDMPSAVFLNSDGVDDSFPIEDNMDHMAKKFYYSVLRMFIENDDDPAKGWGTSVRELAAYLPDLSKRGSGDDISVAGIIDMDAVKTEPFREALRKAKAEADERRAREKEEREKAVKEAEEARAKAAEEKKAAEEAAAKAEPSARQQLADDPSVQETAEYKRDLEKMDNSNFIFSETVQPSPQKQASEGDSDIPSSDAAYKAQPQTGANVDTLA

SEQ ID NO: 33159 - DNA, 558 bp, Unknown
  Obtained from environmental sample
  misc_feature (1)..(558): n is a, c, g, or t
gtggacatcaaggagaatgtagaaaataatttttatacattggcaattaaaactatgccagctgaacccattactcgcacccacttgctccgcctctccgatgtggagcttttgaggctttgcgaaacgcaggcatataaaggttctggtcctggcgggcagcataggaataagactaattcgggggttaagctcaaattgataaattttggcattgaaacttattcctgcgatgataggagtgcgcatataaataaactttttgctttgaaaaaattgcgtatgaaaatcgctttgcaaatgagggaagagcctgctttgcaaattccctttgcttttcccggaacagctgggaaaatttccgcagacaataaactttatcccgaatttattgcagatgttttagatagggcaaaagtagcaggcggcgatttgggcgatgccgcgagaatgtggggtctaagcaaaagtgctttgaataaaattatacttgcagacaaaaaaatcttggaggttttgaaacgttatttcatacggcgcattgaccaaaaatgttga

SEQ ID NO: 33160 - protein, 185 aa, Unknown
  Obtained from environmental sample
  misc_feature (1)..(185): Xaa is any amino acid
MDIKENVENNFYTLAIKTMPAEPITRTHLLRLSDVELLRLCETQAYKGSGPGGQHRNKTNSGVKLKLINFGIETYSCDDRSAHINKLFALKKLRMKIALQMREEPALQIPFAFPGTAGKISADNKLYPEFIADVLDRAKVAGGDLGDAARMWGLSKSALNKIILADKKILEVLKRYFIRRIDQKC

SEQ ID NO: 33161 - DNA, 966 bp, Unknown
  Obtained from environmental sample
  misc_feature (1)..(966): n is a, c, g, or t
ttgatgtccactcacacgccactgcctccgggtttcaaattgccacctcttgctggcagcacggaggagttttttgtaaatatggggcctcagcaccccagcacgcatggcgcgcttaggcttgttttgcgtttggatggcgaaacaatagtggaaattgtgccgcattttggctacatacacaggggtttggaaaaacaggcagaaagcgaaacttacattcaatacattcacctaacagataggcaagattatttaacctcgcatcaaaacaaccactgcgtttgcctagcaatagaaaaagctatgggcattggcgttccagaacgtggcgaatacataagggttatgctctgcgaactcaatcgcatagcctcgcatttggttttttacgcttgctttggcggagatttgggcgggcaaacagcattgctttacggattcaaggaacgcgagatgattcacgatatttttgaagaggtgtgcgggcagcgtttgactatgaattattttagaccaggcggttcttctaaagatgttccagataccttcattccaagggttaaggcttttttgaaacatatgaagcccacaatgaaagattacgaaactctgcttaccaaaaatgtgatagtgctgtttcgctcgcagggaataggggttctctcaaaagaaagggctgttgcgctcggctgttccggtccggttttaagagcaagcggagtgaattacgatgttcgcaaaaatgacccttattcaatttacagttcctttaatttcaatatccctattgcaaccgagggcgactgctatgctcgctatgttgtgcgtatgcaagaaatttacgagtctatgaaaattttggagcagtgcatagagaaattcccaagcggtccttatcgttccaagccttcgccaagttataaacttccccaaggtagctatatgcccaaacctcggccataa

SEQ ID NO: 33162 - protein, 321 aa, Unknown
  Obtained from environmental sample
  DOMAIN (137)...(320): Respiratory-chain NADH dehydrogenase, 49 Kd subunit
  misc_feature (1)..(321): Xaa is any amino acid
MMSTHTPLPPGFKLPPLAGSTEEFFVNMGPQHPSTHGALRLVLRLDGETIVEIVPHFGYIHRGLEKQAESETYIQYIHLTDRQDYLTSHQNNHCVCLAIEKAMGIGVPERGEYIRVMLCELNRIASHLVFYACFGGDLGGQTALLYGFKEREMIHDIFEEVCGQRLTMNYFRPGGSSKDVPDTFIPRVKAFLKHMKPTMKDYETLLTKNVIVLFRSQGIGVLSKERAVALGCSGPVLRASGVNYDVRKNDPYSIYSSFNFNIPIATEGDCYARYVVRMQEIYESMKILEQCIEKFPSGPYRSKPSPSYKLPQGSYMPKPRP

SEQ ID NO: 33163 - DNA, 840 bp, Unknown
  Obtained from environmental sample
  misc_feature (1)..(840): n is a, c, g, or t
atgcggcgaggtttctcgttcccccgttccctgttccctggttccccgttccccgttccctcttcttccccagtccccagtccccagtcccctattcaagagaaccttcggctcaaatttgattcccttacttcccatgacattacctatgtcggaattatccagacggcaagggcaagcggtatggaaaaatttccggtgccgcttgttatgactaattgccataacagcctctgcgcggtaggcggtacgataaatcaggatgatcatgtgtttgcgctaagcgcggcgaaaaagtacggggggatctatgtgccgccgcaccttgccgtgatacatacctataaccgcgagatgatggcaggctgcggcaaaatgatactgggttcggacagccatacacgctacggagcgctgggaaccctggctgtgggcgagggcggcggcgaattggcaaagcagcttgtgggaaggacttatgacatagcccgcccgcaggttgttgctgtttatttaaccggcgagccagccgcgggggtggggccccatgatgtcgcgctggagattatcgcggcggtttttaaaaacggttatgtgaagaataaggtgatggaatttgtcggggacggcatagcgaaacttccggtggatttccgtaacggcattgacgtgatgaccaccgaaacaacctgctggtcgtcgatctggaaaacggataccagtgtcagggattaccttgagatcaggggcagacaaggggattaccgcgaattgcagccagccgatatagcgtattatgacggccttatctatgttgaccttgcaaagatagagccctga

SEQ ID NO: 33164 - protein, 279 aa, Unknown
  Obtained from environmental sample
  DOMAIN (22)...(279): Aconitase family (aconitate hydratase)
  misc_feature (1)..(279): Xaa is any amino acid
MRRGFSFPRSLFPGSPFPVPSSSPVPSPQSPIQENLRLKFDSLTSHDITYVGIIQTARASGMEKFPVPLVMTNCHNSLCAVGGTINQDDHVFALSAAKKYGGIYVPPHLAVIHTYNREMMAGCGKMILGSDSHTRYGALGTLAVGEGGGELAKQLVGRTYDIARPQVVAVYLTGEPAAGVGPHDVALEIIAAVFKNGYVKNKVMEFVGDGIAKLPVDFRNGIDVMTTETTCWSSIWKTDTSVRDYLEIRGRQGDYRELQPADIAYYDGLIYVDLAKIEP

SEQ ID NO: 33165 - DNA, 561 bp, Unknown
  Obtained from environmental sample
  misc_feature (1)..(561): n is a, c, g, or t
gtgatcgcgagatggggtttcattgggataagcggccgccgtagcatgtatgcctataaagcgcttgccccggtacgaggcaacatcgctttcgggggacggcaaatcagattaaaacaggattcctgttcagggtttttctgcgattataaagggtattttccctaccggatgcagacgaccatctgctccgccatgggttttgacgaagaaaacaggcgttttggctttaatattgccgaaaatcagaatagagacacaaacaagaataacgaaaacgcgttatggttaaacggacaattaacccccctgccgccggttttgataacaatgccgaacggcattgaggccgattgggttattcaggatgttgagggcatggtggatttgacatttacgcctaaggaacaaaacaaaacctctatgaatttgattcttacaaaagccgagttaaattcccccgtcggatactataatggaatgttaatggattccgaagggaaaaaaattcaaataaaaaatctctttggaacaggagaaaaactttatttacgggtgtaa

SEQ ID NO: 33166 - protein, 186 aa, Unknown
  Obtained from environmental sample
  misc_feature (1)..(186): Xaa is any amino acid
MIARWGFIGISGRRSMYAYKALAPVRGNIAFGGRQIRLKQDSCSGFFCDYKGYFPYRMQTTICSAMGFDEENRRFGFNIAENQNRDTNKNNENALWLNGQLTPLPPVLITMPNGIEADWVIQDVEGMVDLTFTPKEQNKTSMNLILTKAELNSPVGYYNGMLMDSEGKKIQIKNLFGTGEKLYLRV

SEQ ID NO: 33167 - DNA, 804 bp, Unknown
  Obtained from environmental sample
  misc_feature (1)..(804): n is a, c, g, or t
atgagcggaaaactaaaaaccggattactgttaacgttattcatagtgttaatatcattaacaagcgctgtttggatacgcggagtttttaacgcgcaatataacgcgatgaatcctgaaattcgttttcagcctccgaatattgggcatccgcttggaacggacaatttcggcagggacgtcctgctgcgggtaatagccggttcaaggcataccatcgtcctcgcgatctgcgttgtcgccggcgcggtaatactgggaagcgcgttggggctttttgccggctattcaggcggaatccgcgatgaaattgtcatgcgcctcatggacgcggtaagttcatttccggggattcttttcgcccttgtaatggtcgcggtttttggcaacagccaatttacccttttcaccgccctgctgattctttttgtccccagctttacccgcattatacgaagcggaacattgcaatacagggacgccgacttcatactggcggaacgcttgcttggggccggcggcgcgagaatcgtattcatccatattttgcctaaccttgcggcgcaactgctgccggccgccgccctaggcctatccaacgcgatcctcgccgaagccgccatgagctacctcggattgggaattcagccgcccgaaccaagctggggaaggatgctttccgaatcgcagaattacctgatcaacgcgccctggtgcgcccttgctcccggagttttcatcatgctgacggtcattggcttccactgccttagcgacggcctccgccgctattttggagattag

SEQ ID NO: 33168 - protein, 267 aa, Unknown
  Obtained from environmental sample
  SIGNAL (1)...(23)
  DOMAIN (69)...(266): Binding-protein-dependent transport system inner membrane component
  misc_feature (1)..(267): Xaa is any amino acid
MSGKLKTGLLLTLFIVLISLTSAVWIRGVFNAQYNAMNPEIRFQPPNIGHPLGTDNFGRDVLLRVIAGSRHTIVLAICVVAGAVILGSALGLFAGYSGGIRDEIVMRLMDAVSSFPGILFALVMVAVFGNSQFTLFTALLILFVPSFTRIIRSGTLQYRDADFILAERLLGAGGARIVFIHILPNLAAQLLPAAALGLSNAILAEAAMSYLGLGIQPPEPSWGRMLSESQNYLINAPWCALAPGVFIMLTVIGFHCLSDGLRRYFGD

SEQ ID NO: 33169 - DNA, 849 bp, Unknown
  Obtained from environmental sample
  misc_feature (1)..(849): n is a, c, g, or t
ttggcggttttgccacatagcaatgtttttgaagacattgcaaaattatcaaaagaggccgaacatataccctatccattaatggtaaaagcagcaggagccgccggcggcaggtgcatcagagaggcaaaaagcgctatagaattgcaaaccgccatagatagcgtgcttcgccaatgcgatcgttttggctatgaaaaaagcctttatttagaaaaaacattaacacatccacatataatatctttccctgttctgcgcgataaaaacggcaaacatgtaatttttccagaaatagaaagctctgtgcagtttcgttttcgcaagttgctggcagaaagcccaagcccttatctgtcaaaagagaacaagggcaaaataatggctatgcttccggatcttatagatggtcttgacattgtaggttacgcaaatgtggaatttctcgtttcagaaaacgatatttatctattggacgttaaagagaacattcaacgctttcacggcataaccaacctgctaacaggcgtggatattttgcgcgagcaaataaggctgcattctggcgaacctcttttattgcaaaaagatggttttagaaaagaaggctccgttatagccgtaaatgtggatgctatggacccttacagcaatttttccgcatcgcctggcaaaatagagagaatgtttgttccctttggcgagggaatagtggttcaaagcccttatgtttctggcgacactgtttctgccaactacgaatctgttttggcaaaatcatggcatattccggcacaagggaaaaggcaatttcaaatatggagtctgctcttgccaacttccgcatag

SEQ ID NO: 33170 - protein, 282 aa, Unknown
  Obtained from environmental sample
  DOMAIN (1)...(199): Carbamoyl-phosphate synthase L chain, ATP binding domain
  misc_feature (1)..(282): Xaa is any amino acid
MAVLPHSNVFEDIAKLSKEAEHIPYPLMVKAAGAAGGRCIREAKSAIELQTAIDSVLRQCDRFGYEKSLYLEKTLTHPHIISFPVLRDKNGKHVIFPEIESSVQFRFRKLLAESPSPYLSKENKGKIMAMLPDLIDGLDIVGYANVEFLVSENDIYLLDVKENIQRFHGITNLLTGVDILREQIRLHSGEPLLLQKDGFRKEGSVIAVNVDAMDPYSNFSASPGKIERMFVPFGEGIVVQSPYVSGDTVSANYESVLAKSWHIPAQGKRQFQIWSLLLPTSA

SEQ ID NO: 33171 - DNA, 510 bp, Unknown
  Obtained from environmental sample
  misc_feature (1)..(510): n is a, c, g, or t
ttgataaattttccgcttgccgcatcaagagcagagatagaactgcgcttaaagcaacagaagcatcttcttttaacagcccccacaggcacaggaaaatcctctttcttgccgtggctgcttgcaggcgagcaaggcagagtaacgatattgcaacctcgtcagctcgcagcgagagaactagcaaaattcctctcaaaattctacaaagaacccgtaggcgaaacagtaggctacaaattccgctttgaatccaaaacctccccaaacaccagaatcctattccaaacctacggcagcttcctctccgaattcctataccccgtcccccataccccataccctaattggctaatctttgacgaattccacgagcgaagagcggagatggatttgcttttggggtttgctctcacaaaagggcaaagggtggctgtgctttctgcggagttggaaagagaggcttggaaaaatattgggcgtggagtgctaaaggtctcggccatctga

SEQ ID NO: 33172 - protein, 169 aa, Unknown
  Obtained from environmental sample
  misc_feature (1)..(169): Xaa is any amino acid
MINFPLAASRAEIELRLKQQKHLLLTAPTGTGKSSFLPWLLAGEQGRVTILQPRQLAARELAKFLSKFYKEPVGETVGYKFRFESKTSPNTRILFQTYGSFLSEFLYPVPHTPYPNWLIFDEFHERRAEMDLLLGFALTKGQRVAVLSAELEREAWKNIGRGVLKVSAI

SEQ ID NO: 33173 - DNA, 390 bp, Unknown
  Obtained from environmental sample
  misc_feature (1)..(390): n is a, c, g, or t
atggtatttttagggattcctaaaaaagcaaaatcaaaaaaaaccgctaaggtttttgcccaatggtttttccgcacagaaacccagcaaatgcttatggaatactgtagagtaaacaggataaatgaaaatgtttttggcatttgcgacgggttttccgctctaagctctgttactgaacaaatattccctctgttttgccctgaacttttggggcgtatgcctccgtctgaaaatttcatgtcgccgaatgtgcttcctgcaaattgggctgccataaagaaacaggttgtactgccctacctttatgaccgcgctcacagtaaaagagcagatgatatatatccccttgaaaaacggttatccgactggatgcggataaataagtaa

SEQ ID NO: 33174 - protein, 129 aa, Unknown
  Obtained from environmental sample
  misc_feature (1)..(129): Xaa is any amino acid
MVFLGIPKKAKSKKTAKVFAQWFFRTETQQMLMEYCRVNRINENVFGICDGFSALSSVTEQIFPLFCPELLGRMPPSENFMSPNVLPANWAAIKKQVVLPYLYDRAHSKRADDIYPLEKRLSDWMRINK

SEQ ID NO: 33175 - DNA, 384 bp, Unknown
  Obtained from environmental sample
  misc_feature (1)..(384): n is a, c, g, or t
atgaatgtcgggattgtttcaaacaataccttcccaagcattggatatgcaataaccgcatcccaaagcggcagaatgtctctgcccgtatctcccggtcttgttatttattcacattttaagcacgtttcaggaactcccgctccggaaggaacaagcggcgttaatattaccaaacttaaaatacttaatacattgattgatcagcttgaaagaatgaaaagccagccgtctgtagatttaggcattatagacgaacaggatgaaaaccgcgttaatgccctgatagaccagtaccaaaaacagattaaagccgcccagagcgctggtatttatacccctgcctctcccgttacaggcgcgttattcaacattgccgcataa

SEQ ID NO: 33176 - protein, 127 aa, Unknown
  Obtained from environmental sample
  misc_feature (1)..(127): Xaa is any amino acid
MNVGIVSNNTFPSIGYAITASQSGRMSLPVSPGLVIYSHFKHVSGTPAPEGTSGVNITKLKILNTLIDQLERMKSQPSVDLGIIDEQDENRVNALIDQYQKQIKAAQSAGIYTPASPVTGALFNIAA

SEQ ID NO: 33177 - DNA, 483 bp, Unknown
  Obtained from environmental sample
  misc_feature (1)..(483): n is a, c, g, or t
atggtcggcaggaacgactcgatatcaacagcggccattgaccttagttcccccagcatcgccagggaatacgcggcggaaatcgctgacttcgccaaaaactatccgctgatcctctttatgaacgaggcggaaaccgaagctttcagcgacgggctaaaaataaaatcggtaatgcaggaaacgctttttgaaaaaaacacaaatttccccatcatcattgtaaaaatgggtcaagacggagcccttttctattcagggggcaaaattttcagggcggagactcaggctgtaacgcctgtcgacgccaccggtgccggcgacgcgttctgcgccggctttctttcggcttgggtaaaaaacaaagccctcagcgaatgtgccgcttttggaaacatgaccgcgagaactgtacttggtgcggaaggcagtcaggcggacaaaaaggctctaaaggtcatctcgaaactactaagtaaatag

SEQ ID NO: 33178 - protein, 160 aa, Unknown
  Obtained from environmental sample
  misc_feature (1)..(160): Xaa is any amino acid
MVGRNDSISTAAIDLSSPSIAREYAAEIADFAKNYPLILFMNEAETEAFSDGLKIKSVMQETLFEKNTNFPIIIVKMGQDGALFYSGGKIFRAETQAVTPVDATGAGDAFCAGFLSAWVKNKALSECAAFGNMTARTVLGAEGSQADKKALKVISKLLSK

SEQ ID NO: 33179 - DNA, 762 bp, Unknown
  Obtained from environmental sample
  misc_feature (1)..(762): n is a, c, g, or t
ttgataatgttgagaatggcagacaggaaaattgatttactctgtgtcgggaacgcccttgtagacgtatttgcccaggtagacgagcaatttcttgtccgccacggactcaccaggccggtgcagcacatcgaaattgaaaaaataaaaactatactctcggagcttcgcgattacaccataatatcagggggcgcccaaaaaccccgcgcgagacatcgagcgtgttcctccagtgaaggtgacacggcgtgccccccagaaaacctctcacctgtaaaaatggtatcatggggcgcccaaaaaccccgcgcgagacatcgagcgtgttcctccagtgaaggtgacacggcgtgccccccagaaaacctttcacctgtaaaaatggtatcagggggcggcggcgccaatgtcgccaagatcgccggcttgctgggagtaaaggtttcctttaccggcgcagttggaaacgacgagttcgggcggctttttaagaaaagccttgccgccgccggagtgaaactgcgtcttgcgataaagccttctcccaccggggtttgcctgatgctgcggaacaaagcgggtgaaatccttatagcggcatctccctccgcggccaccctgctttcagaaagcgacatcggcggggaagagccgcaagtagttttaatagacggctttatgctggacaaatcccgcgctggtttctcatatcctgagtatggtcggcaggaacgactcgatatcaacagcggccattga

SEQ ID NO: 33180 - protein, 253 aa, Unknown
  Obtained from environmental sample
  misc_feature (1)..(253): Xaa is any amino acid
MIMLRMADRKIDLLCVGNALVDVFAQVDEQFLVRHGLTRPVQHIEIEKIKTILSELRDYTIISGGAQKPRARHRACSSSEGDTACPPENLSPVKMVSWGAQKPRARHRACSSSEGDTACPPENLSPVKMVSGGGGANVAKIAGLLGVKVSFTGAVGNDEFGRLFKKSLAAAGVKLRLAIKPSPTGVCLMLRNKAGEILIAASPSAATLLSESDIGGEEPQVVLIDGFMLDKSRAGFSYPEYGRQERLDINSGH

SEQ ID NO: 33181 - DNA, 939 bp, Unknown
  Obtained from environmental sample
  misc_feature (1)..(939): n is a, c, g, or t
atgcggactctgccgacagaggatatacggaggcgcaaaggcggcttcggaatgtactaccacttcgattatcatggcgggccggtttcttatgaatggatgccctcaatttcttttgagagaacctgggaacagatgtgcatggcttatgattacgggatcaaagaagcctggattgtcaatgtcggcgatttaaaattcaacgaggtgcctctggcgtattttatggagcttgcctatgattttgaaaagtgggggacaaattcacctaacagcatagatcaatatacaaaaacatggctggaaaaaacttttcccggcgcggacgcgaagcttcgtgaaaaaatcgccgaagtccttcacggttatataaggatgaacgcgatgaggcggcccgaagcgcttaacgccggtatttaccatccctgccattaccttgaggcggacaggatgctggctcttgccgcaagcattgaaaaaacaaatgaagaagtttattcggcgcttcacaaaaacgcaaaagacgcgtattacagcatgatatattttcccgcgagggcgagcgtaaatcttttacggatgcatctgtatgcggcaaaaaatcatcattatgcgaaacagggcaggaagatcgcaaataaatttgccgcccttgtgaccgagtgcatagaaaaagaccgcgccatgcatataggatttgccacattcaaaaacggcaaatggaagggcatggagcttgaacagcacataggctttgttaaatggaacgatgataattacagatacccgttgagggttcaggtggaaccggcgcacaagccccgcatgtccgttacccagaaagacagagaggaagtatattccaaaacctacggcagcccgatgacgaataacattgacgatttcctttacgcccggcgacgacgaggtaatccttga

SEQ ID NO: 33182 - protein, 312 aa, Unknown
  Obtained from environmental sample
  misc_feature (1)..(312): Xaa is any amino acid
MRTLPTEDIRRRKGGFGMYYHFDYHGGPVSYEWMPSISFERTWEQMCMAYDYGIKEAWIVNVGDLKFNEVPLAYFMELAYDFEKWGTNSPNSIDQYTKTWLEKTFPGADAKLREKIAEVLHGYIRMNAMRRPEALNAGIYHPCHYLEADRMLALAASIEKTNEEVYSALHKNAKDAYYSMIYFPARASVNLLRMHLYAAKNHHYAKQGRKIANKFAALVTECIEKDRAMHIGFATFKNGKWKGMELEQHIGFVKWNDDNYRYPLRVQVEPAHKPRMSVTQKDREEVYSKTYGSPMTNNIDDFLYARRRRGNP

SEQ ID NO: 33183 - DNA, 594 bp, Unknown
  Obtained from environmental sample
  misc_feature (1)..(594): n is a, c, g, or t
atgatagacataatttcggcatctgatgggagtgctgttgaggtggtattttcaagagtagatgaaagcggcaaaacagacacattgagcgcatcgataactccgatttggaatgaggatgcagaacgttatttaattgggattcaaatggggcttgctcaatttgatgaattgcaggtggttcacaagcctctgggcgaagcccttgcaatggcggcaaaaaaaagcatcagcatgggaaccagcgtgtttcgctacattcaccgcattataataggagaggttaagttgagggctatgagcgggcctgttggcattgtgcaggttataggcttggtgtggcttgagaatttgcaaaaagcggtatttttgctcgcccttataagcataaatctgggcgttatgaatttgctgccccttgccataacagatggcggtcttcttttgtttttgctcattgaaaaaataagaggcaagccgctttctcaaaagaaccaagctcgcattcagcaagcagcaacctcattttttatagccctgttcctttatataacatttgtggatttgagcagaggctcaatgttaatgaagtaa

SEQ ID NO: 33184 - protein, 197 aa, Unknown
  Obtained from environmental sample
  DOMAIN (74)...(188): Peptidase family M50
  misc_feature (1)..(197): Xaa is any amino acid
MIDIISASDGSAVEVVFSRVDESGKTDTLSASITPIWNEDAERYLIGIQMGLAQFDELQVVHKPLGEALAMAAKKSISMGTSVFRYIHRIIIGEVKLRAMSGPVGIVQVIGLVWLENLQKAVFLLALISINLGVMNLLPLAITDGGLLLFLLIEKIRGKPLSQKNQARIQQAATSFFIALFLYITFVDLSRGSMLMK

SEQ ID NO: 33185 - DNA, 927 bp, Unknown
  Obtained from environmental sample
  misc_feature (1)..(927): n is a, c, g, or t
atggatcgttcaaaacatttgctttgcctgcgcgactgggatgctagccgcgttttagaaactatagatatagctattcgcttgaagaatgaggttaaaaatggcacatattcggaacgtttaaagggtaaaactataggaatgttttttgaaaaaaattcgcttagaaccattgtgacatttcaagttggaatttttcagctcggcggaatgcctgttttccttaacccggagagcattggcaaaagagaagacgttaaagacgtggctaggtgcttgtcgcggtgggtggacgggcttgtggtgcgttgctttgagcaaagcctagtggagcagcttgccgaatatgggggtattcccattataaacgccctaacagacgactctcacccttgccaagcattggcttttgggcaaatgtgcgtggaacagtttggcgatgatttaaaaggaaaaacagttgcctttataggagacgggaataatgttgcaaattccgttatgaatttgtgcgccaaattgggcatgaattttacccttgcctgccccaaaggctatgaactaaaaaaagaagtgataaacgtctgttcgcccctgtttgaaaaaatgggtacaaaatacagaattttcaacgatccaaaagaagccgttaaagatgcggatattctttacagtgatgtgtgggttagcatggggcaagaggagcagaaagcttcaaaaagggaacattttttgccttttcagattaacgatgaactgctcgcgcttgcacctaagcattgcaaggtaacgcattgcctgcctgcgcacaggggcgaagaaataacagacagcattatggacaacttgcaggtgaatttgagctacgaagaagccgaaaaccgcctgcacgcacaaaaagccgtgctatgcaagttacttcattaa

SEQ ID NO: 33186 - protein, 308 aa, Unknown
  Obtained from environmental sample
  DOMAIN (5)...(140): Aspartate/ornithine carbamoyltransferase, carbamoyl-P binding domain
  misc_feature (1)..(308): Xaa is any amino acid
MDRSKHLLCLRDWDASRVLETIDIAIRLKNEVKNGTYSERLKGKTIGMFFEKNSLRTIVTFQVGIFQLGGMPVFLNPESIGKREDVKDVARCLSRWVDGLVVRCFEQSLVEQLAEYGGIPIINALTDDSHPCQALAFGQMCVEQFGDDLKGKTVAFIGDGNNVANSVMNLCAKLGMNFTLACPKGYELKKEVINVCSPLFEKMGTKYRIFNDPKEAVKDADILYSDVWVSMGQEEQKASKREHFLPFQINDELLALAPKHCKVTHCLPAHRGEEITDSIMDNLQVNLSYEEAENRLHAQKAVLCKLLH

SEQ ID NO: 33187 - DNA, 363 bp, Unknown
  Obtained from environmental sample
  misc_feature (1)..(363): n is a, c, g, or t
atggacgtccgaaaaaagtcaaacagtaaattccgatttgcggattttcttgttattctgctttgtctttccggagcggtttactgtattaatctgttcaggcttgatttatttcaaactctcaacggacagaacaaaacgtctataggaaccgtttcaattaaaaaaaatattgttcagcgccgtatgtcggacagggttctctgggacagactgattaaggaatcgcccgtatattccgaggatattatccgcgttggcggaaattcagaagccgaccttcatgtaggcggcaataacattactttaaatgaaaatacgtttctgcgcttccgctacaacctggaaaaaaaacagnaatag

SEQ ID NO: 33188 - protein, 120 aa, Unknown
  Obtained from environmental sample
  misc_feature (1)..(120): Xaa is any amino acid
MDVRKKSNSKFRFADFLVILLCLSGAVYCINLFRLDLFQTLNGQNKTSIGTVSIKKNIVQRRMSDRVLWDRLIKESPVYSEDIIRVGGNSEADLHVGGNNITLNENTFLRFRYNLEKKQX

SEQ ID NO: 33189 - DNA, 477 bp, Unknown
  Obtained from environmental sample
  misc_feature (1)..(477): n is a, c, g, or t
atgatgagggatatgctgaaaaaattaaataaaaaccggaaagatgaaaacatggcggctccgcctatacaaatcggctgcggtatcaataccggaatcgttaccgctgggcagatcggctctgatcttcgaatggaatataccgtcataggcgatcctgtaaatctcgcctcgcgtgttgaatcgcttaacaaaccgctgggcacggacatactgattaccgaagatacatgggaattggtcggaaaatattttattaccgaagaaatgccttcggtaacggtaaagggaaaggaaaagccgctgcgtctctttgccgtggtaaattttaattttgccgttttaaaaattactcccgcggcgtcagaacccaggactcttgccgaagtacgaaagtatttgggaattgaggcgaaggatgtttcacaggcggatgtaaacgctgaagagcttaagtataagattggcggcaaataa

SEQ ID NO: 33190 - protein, 158 aa, Unknown
  Obtained from environmental sample
  misc_feature (1)..(158): Xaa is any amino acid
MMRDMLKKLNKNRKDENMAAPPIQIGCGINTGIVTAGQIGSDLRMEYTVIGDPVNLASRVESLNKPLGTDILITEDTWELVGKYFITEEMPSVTVKGKEKPLRLFAVVNFNFAVLKITPAASEPRTLAEVRKYLGIEAKDVSQADVNAEELKYKIGGK

SEQ ID NO: 33191 - DNA, 1125 bp, Unknown
  Obtained from environmental sample
  misc_feature (1)..(1125): n is a, c, g, or t
ttgactataaaactaaaacattgcttaattaacataatgctgaaaaaaaccggctgtaaaataatacttttaacctcttttatcttttttgtaatatcctgcgccgtcggacctgttgtatacaaagaaatcgatcatgcggtcgaaagcaacaattttaaaacggcggtagatgttatcgttaccaggcaggaatcgtccaagcctgtatattccgagaaaaacgccattatgctctttctggacaaggggcttcttgaatactacgcgggagattacagcaagtcatcacagtccttgcaggaagctgaacgcttaatagaagaggcgtacacaaaaagcattacggcaggttttttatcatatatttttaatgacaatacaaaagattatccgggggaagattttgaagatatttacattaatgtttttaacgcgctaaattattacaacaggggtagtatggaaggcgcattagtagaaattcgaaaattaagcagtacaggcggaaaactggaaatgctttcgcgtaaatatgaatataaagacccaagaacaggagcgactcttgatgacatggcaaaaaaagaaactggtgtcagtgaattccccgcaaaaaaacaagtaaacttttccaactccgcccttgcccgttatctgggagcgcttttttaccagggagccggaaataccgatgctgcgcgtatagagtttgaacagcttaacagggcatttaccaacagaaatgtataccagcacccaattccttctgcagtagatgctgcacgcaatattccaccgggaaaggcaagacttaatattatcagttttacaggcttgtccccgataaaacaggaaacacgtactgttttttatctgccgttcaatcatcctgttctgcgaattgccgattttaagcttcctgtgttgcatagaagaccaagcattataaccagaattgaaattgtagtaaacgggaacaaatttaaccttgaactgcttgaagatatgaacactgtcattgaagaaacctttaacgcacattcttcaaatatcgtgctaaaaacatatatacgtgcaataataaaatacgctgtagccgatatagccgcaaggaaaccgtaa

SEQ ID NO: 33192 - protein, 374 aa, Unknown
  Obtained from environmental sample
  misc_feature (1)..(374): Xaa is any amino acid
MTIKLKHCLINIMLKKTGCKIILLTSFIFFVISCAVGPVVYKEIDHAVESNNFKTAVDVIVTRQESSKPVYSEKNAIMLFLDKGLLEYYAGDYSKSSQSLQEAERLIEEAYTKSITAGFLSYIFNDNTKDYPGEDFEDIYINVFNALNYYNRGSMEGALVEIRKLSSTGGKLEMLSRKYEYKDPRTGATLDDMAKKETGVSEFPAKKQVNFSNSALARYLGALFYQGAGNTDAARIEFEQLNRAFTNRNVYQHPIPSAVDAARNIPPGKARLNIISFTGLSPIKQETRTVFYLPFNHPVLRIADFKLPVLHRRPSIITRIEIVVNGNKFNLELLEDMNTVIEETFNAHSSNIVLKTYIRAIIKYAVADIAARKP

SEQ ID NO: 33193 - DNA, 411 bp, Unknown
  Obtained from environmental sample
  misc_feature (1)..(411): n is a, c, g, or t
ttgtccataaatggaacaatctcgtccatcatttcgattaccgttacttccgctcccagcgcggaaaagagcccggcaaattctacgcctataaccccgcccccgataaccgtaagacgcctgggcatgctttcaatagccagaagtcccgtggaatccacaagcaggggattgtcctttgcgcccggtattggcggcagaacgggaacggagcctgtcgatacgagaatcgtctttccctcatgctcggcatttccgttaggcgaaatggctctgacctttgcagatctttcgcctgacggcgtgttgagtatttctcccctgccgttaatcacttccacgccgaatcttttcatctggctttcgatgccgctccggagtttcgttatcacctcggctttccaattttga

SEQ ID NO: 33194 - protein, 136 aa, Unknown
  Obtained from environmental sample
  SIGNAL (1)...(20)
  misc_feature (1)..(136): Xaa is any amino acid
MSINGTISSIISITVTSAPSAEKSPANSTPITPPPITVRRLGMLSIARSPVESTSRGLSFAPGIGGRTGTEPVDTRIVFPSCSAFPLGEMALTFADLSPDGVLSISPLPLITSTPNLFIWLSMPLRSFVITSAFQF

SEQ ID NO: 33195 - DNA, 510 bp, Unknown
  Obtained from environmental sample
  misc_feature (1)..(510): n is a, c, g, or t
atgcatttcaaagtgttctgcgatgaaacaaggcccctcctccagggcgccaggctttcggcctttgagatggttaccattggggcggacaccacgcttatctgcgacaatatggcaagcatggttatgaagaacggctgggttaactgttgttttgtaggctgcgacagggttagtgccaacggggacgcggccaacaagataggcacctcggggctcgcgataatcgccaagcattacggtatacccttttacgtctgcgcccccacgtcaacaatcgacatgacgataaaggacggcactggcattgtaatcgaggaacgcgacgcgcaagaaattaccgatatgtggtacaaggagcgcatggccccgcccaatgtaaaggtatacaaccccgcgtttgatgttacagataacaaactgataaccgcgttcattaccgaattcggcattatcaggccgccgtattttgaaaactttagggacttgggactggggaccaaggactag

SEQ ID NO: 33196 - protein, 169 aa, Unknown
  Obtained from environmental sample
  DOMAIN (1)...(156): Initiation factor 2 subunit family
  misc_feature (1)..(169): Xaa is any amino acid
MHFKVFCDETRPLLQGARLSAFEMVTIGADTTLICDNMASMVMKNGWVNCCFVGCDRVSANGDAANKIGTSGLAIIAKHYGIPFYVCAPTSTIDMTIKDGTGIVIEERDAQEITDMWYKERMAPPNVKVYNPAFDVTDNKLITAFITEFGIIRPPYFENFRDLGLGTKD

SEQ ID NO: 33197 - DNA, 441 bp, Unknown
  Obtained from environmental sample
  misc_feature (1)..(441): n is a, c, g, or t
atgaatttaggtttattaggtccgggtcttgtaatgggcatcgcggctgtcggttcagctattggtattggttttgccggttcggcaacaataggtgcatggaaaaagtgttacattgccaacaaagcggctccaatgatgctgctggcatttgccggtgcgccgttaacacagactttttatggttttatccttatggggcagatgaaattagctgtcttaaacgcacaaactgctgaaaacggctggctttatatcggctacggccttgcctccggtcttgcgatggcgttttcagccatagtacagggcaaagtaggcgccgccgccgccgacgcgcaaggtgaaacaggcaaaggcttcgcgcagtacatcgccgtagtaggtatcgccgagacaatcgcccttttcgcgatggtcttaacgatgatcagtctgtaa

SEQ ID NO: 33198 - protein, 146 aa, Unknown
  Obtained from environmental sample
  SIGNAL (1)...(26)
  misc_feature (1)..(146): Xaa is any amino acid
MNLGLLGPGLVMGIAAVGSAIGIGFAGSATIGAWKKCYIANKAAPMMLLAFAGAPLTQTFYGFILMGQMKLAVLNAQTAENGWLYIGYGLASGLAMAFSAIVQGKVGAAAADAQGETGKGFAQYIAVVGIAETIALFAMVLTMISL

SEQ ID NO: 33199 - DNA, 735 bp, Unknown
  Obtained from environmental sample
  misc_feature (1)..(735): n is a, c, g, or t
atgataggcgtaataaattatggcgcgggaaatctcggctcggtgatgaatgccttaaagcggctttcagctccggcgcgttttgtttccggcgtggacgagcttgccctgggaacaacgccctttgaaaggctcatcttccccggcgacggccatttcgcgtcggcaatggcttctcttgctaagtcgggttatgaccaggcgatcagggaatggatacaggctgacaggccttttctgggaatatgtattggtttgcaactgctctttgagtcgtctgaagagaccaaaaattggcacggcgaagccgtgtgtatgaataatatagcacggtcacgccccgttgaatttcttgatgaagataaaagcgggtttgctttagcaaacccggcgggcgtccagccggttaacggcgttgaagtgaagggcctttcggtgatcccgggaaccgttaggcgttttcccgggcgcaaacttccccaaatcggctggaaccagacaaaggcgcggcccgattcggcgttgttccggggcataagcgaaaaaagttttttttattatatccattcatactacgccgatccgtcggatgaatcggtatgctccgccgaagccgagtattatttgcgttactgctgcgctgtggaacgcggcgccctggcggcggtgcaattccatcctgaaaaatcaggcgcggcgggactagcgctgttgagtaactggatcaaggggtga

SEQ ID NO: 33200 - protein, 244 aa, Unknown
  Obtained from environmental sample
  DOMAIN (3)...(244): Glutamine amidotransferase class-I
  misc_feature (1)..(244): Xaa is any amino acid
MIGVINYGAGNLGSVMNALKRLSAPARFVSGVDELALGTTPFERLIFPGDGHFASAMASLAKSGYDQAIREWIQADRPFLGICIGLQLLFESSEETKNWHGEAVCMNNIARSRPVEFLDEDKSGFALANPAGVQPVNGVEVKGLSVIPGTVRRFPGRKLPQIGWNQTKARPDSALFRGISEKSFFYYIHSYYADPSDESVCSAEAEYYLRYCCAVERGALAAVQFHPEKSGAAGLALLSNWIKG

SEQ ID NO: 33201 - DNA, 831 bp, Unknown
  Obtained from environmental sample
  misc_feature (1)..(831): n is a, c, g, or t
gtgattgaaatgctggcaaagcgaataattccatgtttggatgttgatgacggaagggtagtgaagggcgttaaatttgaaggcatcagggacgtgggcgatccggcggaaatggcccgccgttataacgacgacggcgccgacgagcttacttttcttgacataggcgcgtcttacaagagccgcgcgacgctgcttgaagttgtccataaaatagcaaatgaggtttttattcccctctgcgtgggcggcggcatacgcagccttgacgatatgcgcgacgctatgaacgccggcgcggacaaggtatcggtttgcacttcggccctgaatcgtcctgaattgttaagcgaaatggcaaacgcctacggcagtcagtgcgtggtattatcaattgacgcgaagcgggtaggggggggatcaagctggcacgctttttcccacgggggcagaacggataccggaattgacgctattgagtgggcgattcgcgcggtcggccttggcgcgggcgaaatccttctcaattccattgacgcggacggaaccggcggcggttacgatcttgaactgacaaggcgcattctcaattccgtgccggttccggtaatcgcctcgggcggcgcgggaacacttggacagatagcggatgttctgctcagtacggcaaatccggaggccgatgcggacgccttatccggctgcgaacacggggccgaaactcccggcgccgatgccgcgctggtcgcgtcgcttttgcactttggcataacgacgatcagggaaataaaaaagaccgcggaggctaaaggcgtctgcgtcagatggtaa

SEQ ID NO: 33202 - protein, 276 aa, Unknown
  Obtained from environmental sample
  DOMAIN (8)...(259): Histidine biosynthesis protein
  misc_feature (1)..(276): Xaa is any amino acid
MIEMLAKRIIPCLDVDDGRVVKGVKFEGIRDVGDPAEMARRYNDDGADELTFLDIGASYKSRATLLEVVHKIANEVFIPLCVGGGIRSLDDMRDAMNAGADKVSVCTSALNRPELLSEMANAYGSQCVVLSIDAKRVGGGSSWHAFSHGGRTDTGIDAIEWAIRAVGLGAGEILLNSIDADGTGGGYDLELTRRILNSVPVPVIASGGAGTLGQIADVLLSTANPEADADALSGCEHGAETPGADAALVASLLHFGITTIREIKKTAEAKGVCVRW

SEQ ID NO: 33203 - DNA, 609 bp, Unknown
  Obtained from environmental sample
  misc_feature (1)..(609): n is a, c, g, or t
atgatcagatcggccgaggcggccttctgcaccgtctggattttgaaccaagggttggtgttctttgcgaagaaccaacagacgctggaaaatttactgatacagcagaaacagggaaaattgattaaggagtacagcgcgatttgccaaaaatgcgaacatcagccaggcggatttgagatttttaccggccctcatgtcggcgctcccccgctggtgattgagagctatttccgcccttacggccccggcaggaagcaggtccgcccggtgacaaaagaaaagttaaaagggaaagaaatcgccaaagacggcgacgcttattacaaaacagaaattatcggcattgaaaaaatagacaataacggacaggaagagttgtatcatttcaccgtaagactaaagcgcggtttcaggcatcagatacgctgccaccttgcgtggattggcttcccggtgttaaacgacccgttatacggcaagggagagggcttccttgccctgagggcgacggggcttttttttgacgatcccaaaagcggaaaaccaattcaattaacaatgaacaatgaagacctctcgccagcgcctgcggcgcgatttatctaa

SEQ ID NO: 33204 - protein, 202 aa, Unknown
  Obtained from environmental sample
  DOMAIN (4)...(148): RNA pseudouridylate synthase
  misc_feature (1)..(202): Xaa is any amino acid
MIRSAEAAFCTVWILNQGLVFFAKNQQTLENLLIQQKQGKLIKEYSAICQKCEHQPGGFEIFTGPHVGAPPLVIESYFRPYGPGRKQVRPVTKEKLKGKEIAKDGDAYYKTEIIGIEKIDNNGQEELYHFTVRLKRGFRHQIRCHLAWIGFPVLNDPLYGKGEGFLALRATGLFFDDPKSGKPIQLTMNNEDLSPAPAARFI

SEQ ID NO: 33205 - DNA, 804 bp, Unknown
  Obtained from environmental sample
  misc_feature (1)..(804): n is a, c, g, or t
atgttggctaaacgcataattccatgtttggatgtggacgatggcagggtagtgaagggcgttaaatttgaaggcatcagggacgtgggcgatccggcggaactggcccgccgctataacgacgagggcgctgacgagcttacgttccttgacataggcgcgtcttacaagagccgcgcgacgctgcttgaggttgtccataaaatagcaaatgaggtttttattcccctttgcgtgggcggcggcatacgccggcttgaagacatgcgcgacgctatgaatgccggcgcggacaaggtgtcggtttgcacttcggcgttgaaccgtcccgaactgttaagcgaaatggcaaacgcctacggcagccagtgcgtcgtattatcaattgacgcgaagagggtaggggagggcctgcgctggcatgccttctcccacggcggcagaacggacacaggaattgacgctattgagtgggcggttcgcgcggtcagtcttggcgctggcgaaatccttctcaattccattgacgcggacggcacaggcggcggttacgatcttgaactgaccaggcgcatcctaaattccgtgcctgttccggtaatagcctcaggcggcgcgggaacccttgaacagatagccgatgttctgctcagtaccgccagcccggaggccggttccggctatggggatgaaactcccggcgctgatgccgcgcttattgcgtcgcttctgcatttcggcatgaccacgatcagggagataaaaaagactgcggaggcaaaaggcgtctgcgtgagatggtga

SEQ ID NO: 33206 - protein, 267 aa, Unknown
  Obtained from environmental sample
  DOMAIN (5)...(250): Histidine biosynthesis protein
  misc_feature (1)..(267): Xaa is any amino acid
MLAKRIIPCLDVDDGRVVKGVKFEGIRDVGDPAELARRYNDEGADELTFLDIGASYKSRATLLEVVHKIANEVFIPLCVGGGIRRLEDMRDAMNAGADKVSVCTSALNRPELLSEMANAYGSQCVVLSIDAKRVGEGLRWHAFSHGGRTDTGIDAIEWAVRAVSLGAGEILLNSIDADGTGGGYDLELTRRILNSVPVPVIASGGAGTLEQIADVLLSTASPEAGSGYGDETPGADAALIASLLHFGMTTIREIKKTAEAKGVCVRW

SEQ ID NO: 33207 - DNA, 729 bp, Unknown
  Obtained from environmental sample
  misc_feature (1)..(729): n is a, c, g, or t
gtgttcttgtataataaccccggcggtaaatcggaccctgaaataccctcttttctgcaaaataccaactggtggttcaacgacccgaaccctataaacccaaaaaaccaccgcctgtccttcgggaaaaaaaccgttaccgtaaaacctgacgggggtgccgaaaaaacatacacattgatagacagtatgtacgtcaaggaaatagaccagtataacttgttcttcaacaagcagcagacggaagattttattaacatcagggataataaagttcaattcattaactttggcggtattcaggcgggcaatagctggcaggaaggaaccggcgacagtaccgacccctcaaacgtttggatagccgtaacgaacagcacattcgacagaagtaaccctaactatgccatcgcatggggaaacaacaagtttgtcaccgggggcagaggtaaaatgatgtattcgtctgacggcattacatggacagccgtagcggacagcacattcgacaatgcaatccgcgccatcgcatggggaaacaacaagtttatcgcagggggcgaggacggtaaaatggcgtattcgtctgacggcgttacatggaagactgtaacggacagcacattcggtgtctatgacaatgccatctacaccatcgcatggggaaacaacaagtttgtcgccggagagaacggcaaaacggcttattggtcaggggaattggagtaa

SEQ ID NO: 33208 - protein, 242 aa, Unknown
  Obtained from environmental sample
  misc_feature (1)..(242): Xaa is any amino acid
MFLYNNPGGKSDPEIPSFLQNTNWWFNDPNPINPKNHRLSFGKKTVTVKPDGGAEKTYTLIDSMYVKEIDQYNLFFNKQQTEDFINIRDNKVQFINFGGIQAGNSWQEGTGDSTDPSNVWIAVTNSTFDRSNPNYAIAWGNNKFVTGGRGKMMYSSDGITWTAVADSTFDNAIRAIAWGNNKFIAGGEDGKMAYSSDGVTWKTVTDSTFGVYDNAIYTIAWGNNKFVAGENGKTAYWSGELE

SEQ ID NO: 33209 - DNA, 330 bp, Unknown
  Obtained from environmental sample
  misc_feature (1)..(330): n is a, c, g, or t
ttgaacgcaagagaatcatttccgcgcgcaaagcggataacgaagaacaggagagatacaatgattacttcaaaaaaattaagctctaaacggatagcggaaataatgaaatttcccgttacttatggcaaagacagccctaaattaacagcggatcagattgcccgcatgaaacccgcccatccggaatattggaaagtagaacccgtaaaggtttccctttccataaaaattgacgctgatattgtggcatggctcaagcagggcggaaagggctatcaaacccggctaaattcaatcctgcgccatgcaatgatgcatgctcaatga

SEQ ID NO: 33210 - protein, 109 aa, Unknown
  Obtained from environmental sample
  misc_feature (1)..(109): Xaa is any amino acid
MNARESFPRAKRITKNRRDTMITSKKLSSKRIAEIMKFPVTYGKDSPKLTADQIARMKPAHPEYWKVEPVKVSLSIKIDADIVAWLKQGGKGYQTRLNSILRHAMMHAQ

SEQ ID NO: 33211 - DNA, 483 bp, Unknown
  Obtained from environmental sample
  misc_feature (1)..(483): n is a, c, g, or t
ttgatgaccaaagtaataactgaagataaacggaagtacattgggaaagatattcaggatgtgatagacctgcctgatcttattgatgttcagctcaattcctacgagcgttttttacaaagagataaagttaagaaaggagaaaaaattgcagagcaggggctcatggaagtttttacatctacattccccataaaaagccccaacgaagatatgagacttgaatttgaatattatacttttgacgaagataatgtcaaaatgacagaactggagtgtaagcaaaaaggccttacttacgcagtgccgcttaaagccagggttaatctggtttttcagcagaccggagagattcgtcaaaaagatatttatatgggcgatattccgcttatgacagaacgcggtacatttataattaacgggggcggaaagggtagttgtttcacagatacaccgttcaccccggcgtattttctgccatga

SEQ ID NO: 33212 - protein, 160 aa, Unknown
  Obtained from environmental sample
  DOMAIN (26)...(159): RNA polymerase beta subunit
  misc_feature (1)..(160): Xaa is any amino acid
MMTKVITEDKRKYIGKDIQDVIDLPDLIDVQLNSYERFLQRDKVKKGEKIAEQGLMEVFTSTFPIKSPNEDMRLEFEYYTFDEDNVKMTELECKQKGLTYAVPLKARVNLVFQQTGEIRQKDIYMGDIPLMTERGTFIINGGGKGSCFTDTPFTPAYFLP

SEQ ID NO: 33213 - DNA, 363 bp, Unknown
  Obtained from environmental sample
  misc_feature (1)..(363): n is a, c, g, or t
ttggccgagcgctgcggctccggcggcggaaagaaaactgagtttaacgttattctaaaagcgtttgatgaatccaagaaaattgcggtaatcaaagaagtccgcggcgttcagggcttggtcttaaagaagcgaaagaccttgtggaaggagcgcccaaaccgcttaaggaaggcgtttccaaagatgaagccgccaagattaaggatgttgttaccgcggcaggcggcactgttgaaatacagtaagcgtaaatctgacagtacaggtattgtgctgtcaggctgtttacgaagaatgatatttgttttcttttatttgtctgatcgtatgtatgatcatacggtcaggcaaagtatttaa

SEQ ID NO: 33214 - protein, 120 aa, Unknown
  Obtained from environmental sample
  DOMAIN (14)...(80): Ribosomal protein L7/L12 C-terminal domain
  misc_feature (1)..(120): Xaa is any amino acid
MAERCGSGGGKKTEFNVILKAFDESKKIAVIKEVRGVQGLVLKKRKTLWKERPNRLRKAFPKMKPPRLRMLLPRQAALLKYSKRKSDSTGIVLSGCLRRMIFVFFYLSDRMYDHTVRQSI

SEQ ID NO: 33215 - DNA, 942 bp, Unknown
  Obtained from environmental sample
  misc_feature (1)..(942): n is a, c, g, or t
gtgnatcaccgttatacttactcactgnacgacaagggtgaagcgtctttcgggaaaagggctatggtcccctttggaagaagagactgccttggctacattattgaagaacgcgacaatccgcctgaaggggtagatgaaaaaactgtaagaaaaatacgccgtgtagttgattcagagccgttattcgatacaaacgatgtaaaacttgcgggatggatggcaggatattatctttgcagtacgggacaggctcttgcggcaatgattccctcaggaagaagggtggtccgccctagcctgcccgacagcggagaggaaaacgaatctacactttcaatttccgatgaacaggccgcggcgttaagcgccattacatcggcggatattaaaacggaaaatgaaactgccaattctactctgccaaaaatgttctacctatacggcataacaggctcaggaaaaacagaagtattcctccgcgttatgcaatttatgctgaacgccggaaaatccgtcatctatcttgtaccggaaatctcactgacaaaccaaacagcgaaaatgattggaaaccgtttcggctcacagtcagcgactttacattcaggtatgaccccttcacagcgccttgccgaatggatgagaattcgccgcggggacgcgcctattgttgtaggtccgcgcagcgccgtatttgctcctgtacaaaacctcgggcttatcataattgatgaagaacacgacggctcttataaatcgggtaacacgccgcgttaccacgcaaggcaggtcgcgcttcgccgctgttcgcaggagggagcgcgtcttgtaatgggttccgctactccttcggctgaagcgggaaacttatgtcggaggggagcatcaggcggcttgacttgtcgcgccggctttcaggcggaggaatgccggagataa

SEQ ID NO: 33216 - protein, 313 aa, Unknown
  Obtained from environmental sample
  DOMAIN (111)...(286): Type III restriction enzyme, res subunit
  misc_feature (1)..(313): Xaa is any amino acid
MXHRYTYSLXDKGEASFGKRAMVPFGRRDCLGYIIEERDNPPEGVDEKTVRKIRRVVDSEPLFDTNDVKLAGWMAGYYLCSTGQALAAMIPSGRRVVRPSLPDSGEENESTLSISDEQAAALSAITSADIKTENETANSTLPKMFYLYGITGSGKTEVFLRVMQFMLNAGKSVIYLVPEISLTNQTAKMIGNRFGSQSATLHSGMTPSQRLAEWMRIRRGDAPIVVGPRSAVFAPVQNLGLIIIDEEHDGSYKSGNTPRYHARQVALRRCSQEGARLVMGSATPSAEAGNLCRRGASGGLTCRAGFQAEECRR

SEQ ID NO: 33217 - DNA, 987 bp, Unknown
  Obtained from environmental sample
  misc_feature (1)..(987): n is a, c, g, or t
ttgtcaatggtcaattaccgccgcttctataaaatttcattgtacctgtttctcgctacattgatccctctggtatatacccttcttttcggccggatggcttacggtacccgctggctgagaataggttcctttggactacaggcgtctgaattcgcgaaaatcactaccataatttttctggcccgctaccttaccgataccaggctgagcggaaattcctttgtgcggtttctcgtatcatgtgtgattgtgtttgtgcctatggggatcgtgtttatacaacccgacctgggtaccgcgctcgtgtttatcccgattcttctttccatgacatatatagccggtatatcaatgcgctatatagtttttttggcgtcctgcattttcctgaccggttttctgacggttctgccgctttggcagacgcatattttacgcaggtctctgtctaccctgcagctgctgaccaatccccgccttattgtgattgccgttcttgccctgagccttgttatcggcattgcgctttttgggtttcttaaatacaagaagcggtattttttctggatagtgtacgctgttaccattatcgttctttcgttgggcgcttcatacgccgcgcgcatactgctgaagaattaccagatcatgaggcttattgtgtttctcgatccgaatatagatccgaggggagcgggctggcatattatacaatctatcacggccattggttcgggaggacttacggggcagggctatctgaaaggtacccagagccattaccgtttcttcccgaacagagcaccgactttatcttttcaattttttcgaggagatgggctttatcggcgggattgtggtatttatcctgttcctgataatctgcttgaggattttacggataataaaaataacttcagacccctttgccgcgtacatctgcgccggtctggcggggatgtacagcttccacttcattattaa

SEQ ID NO: 33218 - protein, 328 aa, Unknown
  Obtained from environmental sample
  DOMAIN (1)...(216): Cell cycle protein
  misc_feature (1)..(328): Xaa is any amino acid
MSMVNYRRFYKISLYLFLATLIPLVYTLLFGRMAYGTRWLRIGSFGLQASEFAKITTIIFLARYLTDTRLSGNSFVRFLVSCVIVFVPMGIVFIQPDLGTALVFIPILLSMTYIAGISMRYIVFLASCIFLTGFLTVLPLWQTHILRRSLSTLQLLTNPRLIVIAVLALSLVIGIALFGFLKYKKRYFFWIVYAVTIIVLSLGASYAARILLKNYQIMRLIVFLDPNIDPRGAGWHIIQSITAIGSGGLTGQGYLKGTQSHYRFFPNRAPTLSFQFFRGDGLYRRDCGIYPVPDNLLEDFTDNKNNFRPLCRVHLRRSGGDVQLPLHY

SEQ ID NO: 33219 - DNA, 450 bp, Unknown
  Obtained from environmental sample
  misc_feature (1)..(450): n is a, c, g, or t
atgagttttaacaagatcggatttgttgatcccgttaatgatattggcgcgcttctgttgggagtggataagccaggacgctattgcggcggcgaacatggccgccttgccaaaaaagaagcgcctctgcaggctcttatcgcttttcccgatttgtacgaattaggcatgtctaaccaggccctgcggataatttacaacggccttaatcgtattcctggcatctcctgcgacagagcctttgcgccggcgccggattttgaacgcctgctccgggaaaaagggctgcccctgtacggccttgataccggcatcagtctgaagcggcttgatcttctgcttttcacccttggctatgagcttgggattacaggcatactcaccatgcttgatgtttctggcatcccactgcgctgcgatcagcgcggcgaggacgatccgtggttataa

SEQ ID NO: 33220 - protein, 149 aa, Unknown
  Obtained from environmental sample
  misc_feature (1)..(149): Xaa is any amino acid
MSFNKIGFVDPVNDIGALLLGVDKPGRYCGGEHGRLAKKEAPLQALIAFPDLYELGMSNQALRIIYNGLNRIPGISCDRAFAPAPDFERLLREKGLPLYGLDTGISLKRLDLLLFTLGYELGITGILTMLDVSGIPLRCDQRGEDDPWL

SEQ ID NO: 33221 - DNA, 414 bp, Unknown
  Obtained from environmental sample
  misc_feature (1)..(414): n is a, c, g, or t
atggccgaatacgacgtatcggatgtggtgaagtttcaaaagtcggatgcttttacattcctccggcaactgcgttcaggcggtgatgacggatcttctatcgatttattgattttggaccctcccaagtttgcaaaccacccgagcgaagttgacagggccgcgcgcggctacaaggagatcaacttggccggactgcgcgcgctgtctccgggcggtctgctcttcaccttctcctgctccggcgcggtagacccgtacctattccgacagatagtgttcggcgccgccgccgacgcccgccgcggtgttcagatactgcacgtgctgacggcggggccggatcatccggtcaacatcgcccatcgagaaggagagtatctcaaggggcttgttttgcgggttcagaattaa

SEQ ID NO: 33222 - protein, 137 aa, Unknown
  Obtained from environmental sample
  misc_feature (1)..(137): Xaa is any amino acid
MAEYDVSDVVKFQKSDAFTFLRQLRSGGDDGSSIDLLILDPPKFANHPSEVDRAARGYKEINLAGLRALSPGGLLFTFSCSGAVDPYLFRQIVFGAAADARRGVQILHVLTAGPDHPVNIAHREGEYLKGLVLRVQN

SEQ ID NO: 33223 - DNA, 588 bp, Unknown
  Obtained from environmental sample
  misc_feature (1)..(588): n is a, c, g, or t
atggacggatccggcaataaaggaacgcctatcgacagatacaaagatatctccgtgaacacgttcgaccgcggcgagtttttgagcgaatacgtaaaccacatcccgtctctgcccccggaattggttatggacaaagagctaaaacccatcgccaacgccataaagagcggcgactgcatagcctttttgcagcacggggtatcgggaaccggcaaaacgataaattgcaagctgatctgccaagccataggcctgccgataatggagacgataaactgctccgagaacttggacgagttcgttctgggcaagttcataccgggcaaaggcggcatagagtttacggagagttatgtcaccaaggcgatacggcacggcggggcggtcgtctttgaggagatcaacttcgccaaaccgcagtacttggctttcctgaattcgctgcttgacgacaacggttttgtccgcctcgacaacaacgaggtggtcaggaggcacaaaactttccgctttttcgccacgctgaattcggttactacggcacaaaggagcttaatcaggcgttgtacaatcggtttcagataa

SEQ ID NO: 33224 - protein, 195 aa, Unknown
  Obtained from environmental sample
  DOMAIN (62)...(195): ATPase family associated with various cellular activities (AAA)
  misc_feature (1)..(195): Xaa is any amino acid
MDGSGNKGTPIDRYKDISVNTFDRGEFLSEYVNHIPSLPPELVMDKELKPIANAIKSGDCIAFLQHGVSGTGKTINCKLICQAIGLPIMETINCSENLDEFVLGKFIPGKGGIEFTESYVTKAIRHGGAVVFEEINFAKPQYLAFLNSLLDDNGFVRLDNNEVVRRHKTFRFFATLNSVTTAQRSLIRRCTIGFR

SEQ ID NO: 33225 - DNA, 1563 bp, Unknown
  Obtained from environmental sample
  misc_feature (1)..(1563): n is a, c, g, or t
ttgaggattacatacgcatttcaaaccttacccagagttaccgcaacgtccatgaggcaatcaccgattttgaaaagcatatcgncttttgacaagggaaattacgtataccaccgcacatggggcgtcggcaagattgtcagtatagaaggcgatgatataaagataaatttctccaaaaaagccaatcatacaatgtcgctgaaaatggcggtcagcgccctgcagattctgtccaaagatcatatttgggtaatcagggcgacatggaacaaggaaaaacttcaggaaaaaatcaaggcggatatcccctgggcgctgcggactattattaaaagcgccgggaattcctgcgatttgaaaaaaataaagtcggaactctgccccggggtgctctccgaaaaagaatggccgtcgtggagcggcaaggcaagggatattctgaaatccgacccgaacttcggggtaagcccggacaatattgatattttcaccgtccgcgagcggccaataagcatatcggaaaaactctacaatgaattcaaggccgaacggaatttctttgcccgaacggacattatacgcaattttatcagccacaagaacgctgaaattgattcggactacttcgcggagatgctgtcgtatttcacctctttcttaaagaccgcgaatcaggggggcgaacaacagatagccgcgtatctgctggtcaaggatatcgccgcgaaattcccccatctgggcgtcagtattaatttcaattttgccgatgtttttaaaaacattaccaatattccggagctttacagcaacctgaaagacagccgtttcagggaagaattcctgaagaatatacagatccatataccggactgggctgacatttttattcagatattccccaaaaccatggacgcggctatcattgacatacttgaggaagaacatggcgaaaaactcaccgcgctgaccattgactgttttgaaaatttcaaggaataccgcgaggcggtagtatggcttttcagaatgtactccaaagccaaggctgagataaaagccaagtcaaaggccagggccaaacccgaagacgatgcctcgtctgccgcggcagcggcagcctcggctgacgacgcggctctttccaaagccaaggctgcggcaagggtaaaatggtacgaagcggcgggaatcagcgaggaacgccagcttattaccctgatccacatccttgatctgacctaccgggacattgaaaaccagcgggaaaccacggaggcgcgcaagatcaacaaacagatttataccatacttatcaaggaagacgttcttggctcattcctggacgccgcggatacggatattatttccagaatctacagattcgtcaatgacgtgaaaaaccttgacccccaggacaaaataaacctgcggagcaggatacaggacaaacaccaggactttaagtttattgacagcatggaaaaacggattctcccagngggcttaccgttacaagggcaaaattcgaggagaagcaaaaacagctgtaactcatga

SEQ ID NO: 33226 - protein, 520 aa, Unknown
  Obtained from environmental sample
  misc_feature (1)..(520): Xaa is any amino acid
MRITYAFQTLPRVTATSMRQSPILKSISXFDKGNYVYHRTWGVGKIVSIEGDDIKINFSKKANHTMSLKMAVSALQILSKDHIWVIRATWNKEKLQEKIKADIPWALRTIIKSAGNSCDLKKIKSELCPGVLSEKEWPSWSGKARDILKSDPNFGVSPDNIDIFTVRERPISISEKLYNEFKAERNFFARTDIIRNFISHKNAEIDSDYFAEMLSYFTSFLKTANQGGEQQIAAYLLVKDIAAKFPHLGVSINFNFADVFKNITNIPELYSNLKDSRFREEFLKNIQIHIPDWADIFIQIFPKTMDAAIIDILEEEHGEKLTALTIDCFENFKEYREAVVWLFRMYSKAKAEIKAKSKARAKPEDDASSAAAAAASADDAALSKAKAAARVKWYEAAGISEERQLITLIHILDLTYRDIENQRETTEARKINKQIYTILIKEDVLGSFLDAADTDIISRIYRFVNDVKNLDPQDKINLRSRIQDKHQDFKFIDSMEKRILPXGLPLQGQNSRRSKNSCNS

SEQ ID NO: 33227 - DNA, 525 bp, Unknown
  Obtained from environmental sample
  misc_feature (1)..(525): n is a, c, g, or t
atggcaaacaaaggatatatcatccaagtaatcggtcccgttgtagacgttcgttttgaagcgggacaggttcctctgattttaaatgcgttgaaagtgaaagccgatcgcatcgttactcttgaagtcttacagcatatcggcgacaaccgcgtgcgctgtgtcgctatgtccgccgccgagggattgtcccgcgggcttgaggttgaggacacaggcaagccgatcagcgtgccggtcggcaaggaagtgctgggacgaatgttcagcgtaacaggagaacccattgacgacaagggatcgttcagcgcgtcgcaatatgagtcgatacaccgtaatgcgcccgactttaacgaactgcgtccggcgaccgcgctgcttgaaacgggaataaaagtaattgatttaatcgcgccctacgcgaagggcggaaagattggactgtttggcggcgcgggagtagggaagacagtcgttatcatggaacttatccgcaacatagcgacggaacactcggccatctga

SEQ ID NO: 33228 - protein, 174 aa, Unknown
  Obtained from environmental sample
  DOMAIN (7)...(73): ATP synthase alpha/beta family, beta-barrel domain
  misc_feature (1)..(174): Xaa is any amino acid
MANKGYIIQVIGPVVDVRFEAGQVPLILNALKVKADRIVTLEVLQHIGDNRVRCVAMSAAEGLSRGLEVEDTGKPISVPVGKEVLGRMFSVTGEPIDDKGSFSASQYESIHRNAPDFNELRPATALLETGIKVIDLIAPYAKGGKIGLFGGAGVGKTVVIMELIRNIATEHSAI

SEQ ID NO: 33229 - DNA, 894 bp, Unknown
  Obtained from environmental sample
  misc_feature (1)..(894): n is a, c, g, or t
atggcgagcctccgtgatgtgcgcctgcgtatgcgggctattgaacaaacattaaaagttaccaaggcgatgaaccttatctccacggcaaaactgcgcaaggggcggaaaatgctcgcggataccgtgccgtatttcagcaggattcagaaatccatgtacgatattctttcaagcgaaaaatatatcggaagcgcgtttttcagaaagcccaatccggcgaaacccagccacagcgcgataattgtcataaccagctataaggggcttgcgggcggctataacgcgaatgtttttcgcaatgtaaacgagttatgcgcaaaagtggaaaatccgatgctgatacttatcggcggcaatgtcggctatcgctatttcgttcattctccgtacccaattcttgaaaatttctctttccatccggaaatacccaccgtggaacacgccgcggaagtttgtgaatatgcggtctcgcagtatctaagcggaatctttgattctatacatatcgcgtatacccacatgttcagcatggtaaaacttctgccggtagatcatcagataattccgctgntaaaagaaaaaatacaagatgatatttttgaaatcggcggagtaaagagggtggatttaaagtttgaatttctgccgaccacagaggcggtttntgatacgctggttccccagtatataaagggcgtaatttacggggcgatggtggaagcgtacgcaagcgaacagagcgcccgcatgaaggcaatggacgaggcttccaagagcgccgaagatatgctcgcctctctgcggataagttacaaccgcgcgcgtcaggcgggcattacgcaagaaatggcggaaataacaggcggttcttcagcgctggctgataggtag

SEQ ID NO: 33230 - protein, 297 aa, Unknown
  Obtained from environmental sample
  DOMAIN (2)...(294): ATP synthase
  misc_feature (1)..(297): Xaa is any amino acid
MASLRDVRLRMRAIEQTLKVTKAMNLISTAKLRKGRKMLADTVPYFSRIQKSMYDILSSEKYIGSAFFRKPNPAKPSHSAIIVITSYKGLAGGYNANVFRNVNELCAKVENPMLILIGGNVGYRYFVHSPYPILENFSFHPEIPTVEHAAEVCEYAVSQYLSGIFDSIHIAYTHMFSMVKLLPVDHQIIPLXKEKIQDDIFEIGGVKRVDLKFEFLPTTEAVXDTLVPQYIKGVIYGAMVEAYASEQSARMKAMDEASKSAEDMLASLRISYNRARQAGITQEMAEITGGSSALADR

SEQ ID NO: 33231 - DNA, 351 bp, Unknown
  Obtained from environmental sample
  misc_feature (1)..(351): n is a, c, g, or t
atgatggccgagacgcgagatggggccttcgcccagttcggaagcgacctggacaaggcaacccaggacaagcttgcccagggagagcggcttatggaagtgctgaaacagcctcagctttcgccgtatccgctggaactgcagatcgccattctttttctcgcggtgaacggttatctccttgatgtcaagacggaaaatgtttccacgtttgtaaaagatttcttgtcgcaccttaaagaccaaaaggcggatctgatgagggggattgcggaaacgggagccgtttccaaggaacaggaagacgaattgcggctaaccgtggaagcattcaaaggtattaaaaagtaa

SEQ ID NO: 33232 - protein, 116 aa, Unknown
  Obtained from environmental sample
  DOMAIN (3)...(95): ATP synthase alpha/beta chain, C terminal domain
  misc_feature (1)..(116): Xaa is any amino acid
MMAETRDGAFAQFGSDLDKATQDKLAQGERLMEVLKQPQLSPYPLELQIAILFLAVNGYLLDVKTENVSTFVKDFLSHLKDQKADLMRGIAETGAVSKEQEDELRLTVEAFKGIKK

SEQ ID NO: 33233 - DNA, 1146 bp, Unknown
  Obtained from environmental sample
  misc_feature (1)..(1146): n is a, c, g, or t
gtgcaagtggtcaccccatacgacaatatcacgacaatcatgcacgagggggcgagcggcagcggcaagagcgagatgctcgaactcgtccaccgcgagtgggacgggcggttgctcttaggccgcaacacgaagaccggctcgcggcggatcatctccatgaaccagacctgctccctttatccggtcaccgacgatatggccatgtgtccgcacgaagtccaagacaagagcggctacgtgcacgcttgcgacgccgaacaagcttggttcgtccgcctaaaccacatcacccactacggcaccgacccgcaactggagaacataaccgtccacgccgaggaaccgcttatattcctgaatatgcagggcgtccccgacgccaccgtgctgatctgggagcacgtagaggattcgcccggcaagcgttgccccaacccgcgcgtggtgttgccgcgccgcctcatgcccaactgcgtgaacggggcggtggaggtgcacgtccgcaacttcggcttccgcaccccgccctgcacgcgggagaagccctcctacggcatagcgggcttcctgcacgtgctgccgcccgcgcttggatggatatggcgtctcatctcccctcgcggttacgacaacccaagcgtcaccgacgacgacgctatgacgagcgagggcgtagggtcgtattggcctttcgccaccggtctacgggtagaccacgctaaccttattctaagtcagatccaaaatacgccgcatgtgcgctacacgctgacccccaaccagcacgtcggcgcatacgcggtcagcttcatgccgcagtggatagccagagagtaccttgcccggcgcggcacggccaaattccgcccggaacagctggtcccggcaagatgcccgctgttaggatacgccttcgcgacgatgcaggtcgaggggacgcacctgcagcacgacttccttagggtagacgaacagccggatgtcggccaagacgggtacgacgccggggcgaaaatactaaagacgttctttgacgaggagttgaagaagtttttggtgccggagctgaacaaggtggggagaaggattattgagtgctgtttggataacgggacggttaaggattatgaggcgttgctgtaa

SEQ ID NO: 33234 - protein, 381 aa, Unknown
  Obtained from environmental sample
  misc_feature (1)..(381): Xaa is any amino acid
MQVVTPYDNITTIMHEGASGSGKSEMLELVHREWDGRLLLGRNTKTGSRRIISMNQTCSLYPVTDDMAMCPHEVQDKSGYVHACDAEQAWFVRLNHITHYGTDPQLENITVHAEEPLIFLNMQGVPDATVLIWEHVEDSPGKRCPNPRVVLPRRLMPNCVNGAVEVHVRNFGFRTPPCTREKPSYGIAGFLHVLPPALGWIWRLISPRGYDNPSVTDDDAMTSEGVGSYWPFATGLRVDHANLILSQIQNTPHVRYTLTPNQHVGAYAVSFMPQWIAREYLARRGTAKFRPEQLVPARCPLLGYAFATMQVEGTHLQHDFLRVDEQPDVGQDGYDAGAKILKTFFDEELKKFLVPELNKVGRRIIECCLDNGTVKDYEALL

SEQ ID NO: 33235 - DNA, 750 bp, Unknown
  Obtained from environmental sample
  misc_feature (1)..(750): n is a, c, g, or t
gtggctcacgctccacgccgccacggtgcaagtggtcaccccatacgacaatatcacgacaatcatgcacgagggggcgagcggcagcggcaagagcgagatgctcgaactcgtccaccgcgagtgggacgggcggttgctcttaggccgcaacacgaagaccggctcgcggcggatcatctccatgaaccagacctgctccctttatccggtcaccgacgatatggccatgtgtccgcacgaagtccaagacaagagcggctacgtgcacgcttgcgacgccgaacaagcttggttcgtccgcctaaaccacatcacccactacggcaccgacccgcaactggagaacataaccgtccacgccgaggaaccgcttatattcctgaatatgcagggcgtccccgacgccaccgtgctgatctgggagcacgtagaggattcgcccggcaagcgttgccccaacccgcgcgtggtgttgccgcgccgcctcatgcccaactgcgtgaacggggcggtggaggtgcacgtccgcaacttcggcttccgcaccccgccctgcacgcgggagaagccctcctacggcatagcgggcttcctgcacgtgctgccgcccgcgcttggatggatatggcgtctcatctcccctcgcggttacgacaacccaagcgtcaccgacgacgacgctatgacgagcgagggcgtagggtcgtattggcctttcgccaccggtctacgggtagaccacgctaa

SEQ ID NO: 33236 - protein, 249 aa, Unknown
  Obtained from environmental sample
  misc_feature (1)..(249): Xaa is any amino acid
MAHAPRRHGASGHPIRQYHDNHARGGERQRQERDARTRPPRVGRAVALRPQHEDRLAADHLHEPDLLPLSGHRRYGHVSARSPRQERLRARLRRRTSLVRPPKPHHPLRHRPATGEHNRPRRGTAYIPEYAGRPRRHRADLGARRGFARQALPQPARGVAAPPHAQLRERGGGGARPQLRLPHPALHAGEALLRHSGLPARAAARAWMDMASHLPSRLRQPKRHRRRRYDERGRRVVLAFRHRSTGRPR

SEQ ID NO: 33237 - DNA, 486 bp, Unknown
  Obtained from environmental sample
  misc_feature (1)..(486): n is a, c, g, or t
ttgccgaccatacgccgcatggaactttcaggcgagctggtcgcgggacgtttcttcgcgggaatcaattccctgcaattcgccctcccctcaatcgcgcgtgatcttgaaaacgccgaggctgttgacagtatctactggatgaatgccgttgatccggcaagtcccgcagggctcgacatcgaaggtttggatactcgcctccccgaccggctgttgtccagccgtatttatttccgtggagcgcagcttatcgccgtatcaaaccggaacaacaaagaactgcatatcttcattgcccccgataatccaggtattcccgccttgatcgacctcattaaaacaccccgtgcaagaaaagtttttccggaaaataaaatagttgttgacactattaacaataaaacagcgggtcagagcgaatacgcgcggggatttcaggactgcggctttatctctgaccgcggcaggctgtgtttttggtga

SEQ ID NO: 33238 - protein, 161 aa, Unknown
  Obtained from environmental sample
  misc_feature (1)..(161): Xaa is any amino acid
MPTIRRMELSGELVAGRFFAGINSLQFALPSIARDLENAEAVDSIYWMNAVDPASPAGLDIEGLDTRLPDRLLSSRIYFRGAQLIAVSNRNNKELHIFIAPDNPGIPALIDLIKTPRARKVFPENKIVVDTINNKTAGQSEYARGFQDCGFISDRGRLCFW

SEQ ID NO: 33239 - DNA, 687 bp, Unknown
  Obtained from environmental sample
  misc_feature (1)..(687): n is a, c, g, or t
ttgcttgaaaccgataaaagcattattgatattgcgattgaatacgggtttgagtatgaacaatcgtatatcaggactttcaaacgtgaatttggaataacacccggtcatttacgcaaaacaaggcaagttttacaaattaaaccgccgcttcacctttttgacgaaaggaggctggataatggcattttatttgggcctgattttgtaattgttccgcaatttcatgttattggaaaacgccaccgtttatcatttagcgatttgcgtacggaaccgttactaacaaagcaattctgggaaaatgaacgcaagcagataaaggaaaccataaacccccatgcatgcataagcttatcctgtaacctttatttggaagaagggcattttgattacgtaccttcggtgcaagtcgcagacttaaaaaacataccgcccggtctttgcggtgaaactttcgagacctccatgtgcgtcagattccgctatatagggcagcatcactattatgaaattaccggagatatcgtgtccatgatgtacaacgctgtcagtaatttcgctcaggatgaacacgcaaaataccttttgatacataataaaagcaactttgtgaagatagacgaaaggttttatgatggaacataccccaaaggaatggtatactccggtttagaaacacagtaa

SEQ ID NO: 33240 - protein, 228 aa, Unknown
  Obtained from environmental sample
  misc_feature (1)..(228): Xaa is any amino acid
MLETDKSIIDIAIEYGFEYEQSYIRTFKREFGITPGHLRKTRQVLQIKPPLHLFDERRLDNGILFGPDFVIVPQFHVIGKRHRLSFSDLRTEPLLTKQFWENERKQIKETINPHACISLSCNLYLEEGHFDYVPSVQVADLKNIPPGLCGETFETSMCVRFRYIGQHHYYEITGDIVSMMYNAVSNFAQDEHAKYLLIHNKSNFVKIDERFYDGTYPKGMVYSGLETQ

SEQ ID NO: 33241 - DNA, 354 bp, Unknown
  Obtained from environmental sample
  misc_feature (1)..(354): n is a, c, g, or t
ttgatgaagagattcctccccggaccgtacacattcatccttaacgccaccaacctggtgcctaagcgcatagcgccgaagcggcggacggtgggcatacgtatgcccgattccatagtagccttggagttagtcaggctcttgggcgagcccttggccaacacctccgtcaacatctccggcgagccgatgaacgacccggacgagatcaaagagaagctgcgccatgaagcggatgtcatgctggacgcggggcctttaaatgatccggagccgtctacggttgttgatcttacgggtgacgagccggtgttggtcaggttggggaagggtaggtgggatgatgagggttaa

SEQ ID NO: 33242 - protein, 117 aa, Unknown
  Obtained from environmental sample
  DOMAIN (1)...(109): yrdC domain
  misc_feature (1)..(117): Xaa is any amino acid
MMKRFLPGPYTFILNATNLVPKRIAPKRRTVGIRMPDSIVALELVRLLGEPLANTSVNISGEPMNDPDEIKEKLRHEADVMLDAGPLNDPEPSTVVDLTGDEPVLVRLGKGRWDDEG

SEQ ID NO: 33243 - DNA, 561 bp, Unknown
  Obtained from environmental sample
  misc_feature (1)..(561): n is a, c, g, or t
atggcgagacgcgtatttttccggcggcaattccgacgcggttgtcccgaccgtatccgggcgacgcccaaaggcaccggctggataaagtcctgctcaaattacacaatagcggccctggcgaaacatgaggctattgaagccggtttcatggaatgcgtgttccttgacgccgtcgggcgcaggaacgttgaagaaggctcatcctgcaacatatttttttatttaaattcaggcgagcttgtaacgccaaagttaggcgacaccattctgcccggcataacccgcgccagcatcatcgagcttgccggcgaccggggaattaaaacaagcgaacggagtatttcgattgaggaagcgcttgcggaaacaaaggaatgttttgtcagcggaaccgcagccggagcggtgcctcttacctccctgacctttcagggcaaaaaaacgatcttcaataacggcaaggaaggcgagcttacaacggaaatgaggaacaccctcaagggcatacagtacggcacgatacctgatacaaaaggatggatgacgcaggtcatctga

SEQ ID NO: 33244 - protein, 186 aa, Unknown
  Obtained from environmental sample
  DOMAIN (3)...(168): Aminotransferase class IV
  misc_feature (1)..(186): Xaa is any amino acid
MARRVFFRRQFRRGCPDRIRATPKGTGWIKSCSNYTIAALAKHEAIEAGFMECVFLDAVGRRNVEEGSSCNIFFYLNSGELVTPKLGDTILPGITRASIIELAGDRGIKTSERSISIEEALAETKECFVSGTAAGAVPLTSLTFQGKKTIFNNGKEGELTTEMRNTLKGIQYGTIPDTKGWMTQVI

SEQ ID NO: 33245 - DNA, 1011 bp, Unknown
  Obtained from environmental sample
  misc_feature (1)..(1011): n is a, c, g, or t
ttgcgctggaatccgcngtttgtccgcaaatacgttgaatccggccttctcctggacattaccgacatttacaatgccaacaaggccaaacttctttcctacccggtggaagtcggctcctataacggcaaagtgtacggtatgtcatggcaggctgcccccggcgccctgttctatcgcagaagcctcgcgaagaaataccttggaacggatgatcccaaagtcgtacagacctattttagcaacttcaacaaattccaagagaccgcgaaaaagcttaaagatgactccaaaggcacctgcgtggtcgtttcctctctgggcgatctccgcaactctttcctgtccgccagaaaaaatccctgggtcgtgaaaggtaaagtggaagtcgatccagccatggatcagtacatggacatctgtaagactctgaaagacaacagatgggaaggcagggtaggccaatggtcagaaggctggttcgccggcatgaggggcgagctcaaggatgaagcgggaaaaccggtagaagtattctcctacttcctccccacctggggcctccactatgtgctcaagaccaatgctcaaagcacctcgggcgactgggccatgtgccagggtccctcttcctaccgctggggcggcacctgggttgccgctgttaaaaccaccaaaaatgtggccgtggctaaagaatttattcgctatgtaaccaccgatgacactttccttgaaggctgggcaaaagataccggcgacctggtgagcaacatcaacgttatcaacaagattaaagacacctacagagagcccttcctcggcggacagaatcactacgctgaatttgccgagatggccaaaaacgttaacggcaaacttcttcagggaagcgatgaagccattgaagcgatgtttgatgaagctgtagccgctttcgtaacggagaaaaaccaaggccaaggccatagcggatttaaggcgcaggcgaactctcagtttggaaactag

SEQ ID NO: 33246 - protein, 336 aa, Unknown
  Obtained from environmental sample
  misc_feature (1)..(336): Xaa is any amino acid
MRWNPXFVRKYVESGLLLDITDIYNANKAKLLSYPVEVGSYNGKVYGMSWQAAPGALFYRRSLAKKYLGTDDPKVVQTYFSNFNKFQETAKKLKDDSKGTCVVVSSLGDLRNSFLSARKNPWVVKGKVEVDPAMDQYMDICKTLKDNRWEGRVGQWSEGWFAGMRGELKDEAGKPVEVFSYFLPTWGLHYVLKTNAQSTSGDWAMCQGPSSYRWGGTWVAAVKTTKNVAVAKEFIRYVTTDDTFLEGWAKDTGDLVSNINVINKIKDTYREPFLGGQNHYAEFAEMAKNVNGKLLQGSDEAIEAMFDEAVAAFVTEKNQGQGHSGFKAQANSQFGN

SEQ ID NO: 33247 - DNA, 393 bp, Unknown
  Obtained from environmental sample
  misc_feature (1)..(393): n is a, c, g, or t
gtggtgaacaacccgcatataaaggttcgttttaacactgtaattaaggaaataaaaggcgagcaaaaagtaaaatcggtcgttttgagcgaaacaacaagcggtaaagtttacgaggaagagacggacgctgtttttatttttgtggggacggttccccagacctcgcttgtcgcgggcgacgagtttaaggccaaacttgacgagagcggttatattattacaaaccaaaagatgtttacaagcatagccggccttttcgccgccggcgacctccgttcaggggcgttccgccaagttgtaacggcggcggcggacggagcgatagcggctcacagcgcggtggagtacattaacgcggtaaaagacaagctgttaaaagacaagaaataa

SEQ ID NO: 33248 - protein, 130 aa, Unknown
  Obtained from environmental sample
  misc_feature (1)..(130): Xaa is any amino acid
MVNNPHIKVRFNTVIKEIKGEQKVKSVVLSETTSGKVYEEETDAVFIFVGTVPQTSLVAGDEFKAKLDESGYIITNQKMFTSIAGLFAAGDLRSGAFRQVVTAAADGAIAAHSAVEYINAVKDKLLKDKK

SEQ ID NO: 33249 - DNA, 714 bp, Unknown
  Obtained from environmental sample
  misc_feature (1)..(714): n is a, c, g, or t
atgggcgagggcgaaattgacaattatctccagttattgaatacgtttacggagaattttccgacgcaggaagaagaattaaacgaagcgctgaaaaacaaagataacgacgcgtttgtcaggctgcttacggacatccgtgatatattgggaaaaatgtacgcggaagaactggcgcaggactgcgacaagcagatcagctcggttggaaccacgtcgcctgaaaaagttgaagcctatatgcgttacttcctgtccagcctttccatgttatcaattgatattcagatggccgggcagaaaacagacgcgccagccgccccgccggagagtgccccggaggaaaagcttagaaccggcataagaatactggcggttgatgacacggcgtttttcctgaccatactaaaaaagattttgtcggataccagatatatattaacatgcgtatcctccggcagggacgcgctgaaatatcttgaaaaacaccagccggatattttccttttggacattgaaatgccgggaatggacggatacgagctcgcgacaagaataaaggaaagcggacagaaagcgccgattatcttcctgacaggcaacgccaaaaaagaacatctggcaaaggcggtaaagtcgggagcggtggattttataattaagcctattaataaagacgttcttcttaccaagatccacaaataccttangtag

SEQ ID NO: 33250 - protein, 237 aa, Unknown
  Obtained from environmental sample
  DOMAIN (121)...(233): Response regulator receiver domain
  misc_feature (1)..(237): Xaa is any amino acid
MGEGEIDNYLQLLNTFTENFPTQEEELNEALKNKDNDAFVRLLTDIRDILGKMYAEELAQDCDKQISSVGTTSPEKVEAYMRYFLSSLSMLSIDIQMAGQKTDAPAAPPESAPEEKLRTGIRILAVDDTAFFLTILKKILSDTRYILTCVSSGRDALKYLEKHQPDIFLLDIEMPGMDGYELATRIKESGQKAPIIFLTGNAKKEHLAKAVKSGAVDFIIKPINKDVLLTKIHKYLX

SEQ ID NO: 33251 - DNA, 864 bp, Unknown
  Obtained from environmental sample
  misc_feature (1)..(864): n is a, c, g, or t
atgggcgaatttgaaaccctgcccgcgcaggacaggagggatctgtatgacaatatgctgaaggctaccctgaataacaatcccaatttcgtccgcatattttccatctggaaaccaaacgcaatggacggcatggacagcctttatataggccgtccgggttcaacgcccacggggcagtacgcaatgacctggggcagggatatcggcccgattgaagtaaagcccaacctcgtccttgatgagattaacgcatggatgaacggccccaacgcgctcaagacccgggttgaaaaccccatgccttttaagaataacggaaaagacacctttattatcagagttggagttccgataaccagaagcaccagcagcgaagtagtcgggcacttatgtgttctgatagacatcgccccaatacaggcggcggtagaacaaactattaaaagtcacgaagaaatatcagcaatggttctttattcgggcaatggaatgataatgggacatttggttcctgaacgggtaggaaagatgctctctgatgtggatacgatatacggcgattatatacaagaagcggatagagccgtgcgggaagggaaggaatttcagtgcagcaactattcacccgtcctgaaagcggatatgaaaataaccatgattccctaccagataggcgattccggcatgtactggacagtaatgatagcgacatcagaaacgtacattatgaaagaagttaacgcgattaccagatttaccattatccttgcggcgatcgttattatagcggccgcggtaatcgtgtgcttngtcttcgattttacaaccaggccaattgtcaatgtgacatttcagacttaa

SEQ ID NO: 33252 - protein, 287 aa, Unknown
  Obtained from environmental sample
  misc_feature (1)..(287): Xaa is any amino acid
MGEFETLPAQDRRDLYDNMLKATLNNNPNFVRIFSIWKPNAMDGMDSLYIGRPGSTPTGQYAMTWGRDIGPIEVKPNLVLDEINAWMNGPNALKTRVENPMPFKNNGKDTFIIRVGVPITRSTSSEVVGHLCVLIDIAPIQAAVEQTIKSHEEISAMVLYSGNGMIMGHLVPERVGKMLSDVDTIYGDYIQEADRAVREGKEFQCSNYSPVLKADMKITMIPYQIGDSGMYWTVMIATSETYIMKEVNAITRFTIILAAIVIIAAAVIVCXVFDFTTRPIVNVTFQT

SEQ ID NO: 33253 - DNA, 540 bp, Unknown
  Obtained from environmental sample
  misc_feature (1)..(540): n is a, c, g, or t
atgttcaattattgcccttcatgctcttcaaaaaaaatcaaatttgaagacgacaaagttttccgttgtcgggattgtggttttgtatactatcacaatgtcgccgccgcaaacggctgtgtaatcagcgtgccgtctgaggaaggagaactgcttgtttttacagtccgcggcaaagacccggggaaagggttattggatttgcccggcggttttgtcgatccgggcgaaggcgtccttgacggactttaccgcgagttgcgggaagaaatcggctggacgccccctgttcctcttaccgctaaaagcggtcagacaaaactggcggacgtttttaaactgttcgcctctttttccaatgtttacaaatacaaaggtatcgattacaacacctgcgacatgtattttacaatcagcgcgccggaccttacgcgggaagatctgagtttgcaagaaggcgaaattgccgatgttctttttttaaaccggaacaaattaattttgatcaatttgcctttgagtcaaccagacgcgcggtaa

SEQ ID NO: 33254 - protein, 179 aa, Unknown
  Obtained from environmental sample
  DOMAIN (33)...(179): NUDIX domain
  misc_feature (1)..(179): Xaa is any amino acid
MFNYCPSCSSKKIKFEDDKVFRCRDCGFVYYHNVAAANGCVISVPSEEGELLVFTVRGKDPGKGLLDLPGGFVDPGEGVLDGLYRELREEIGWTPPVPLTAKSGQTKLADVFKLFASFSNVYKYKGIDYNTCDMYFTISAPDLTREDLSLQEGEIADVLFLNRNKLILINLPLSQPDAR

SEQ ID NO: 33255 - DNA, 777 bp, Unknown
  Obtained from environmental sample
  misc_feature (1)..(777): n is a, c, g, or t
ttgatctggcgttattttgtaattcccctgccgacaaaacttgcggacagccagcttgacgagagggaatttacagccaagtgcgtgttcaacgtcaacacaaagataaacggcgcttatgtcttttcaagcgggaaaaacatgggcgtgttcaaggcggtcggcttccctgaagatgtcgggcggttttacaagcttgaggaatatgagggctggtgctttacggcgcacggacgttacccgacaaatactccgggctggtggggcggcgctcaccccttctcgcttcttgattattccgttgtgcataacggcgaaatatcctcttacgataccaatcgccgcgcaatcgaaatgtacggctacaaatgcactctccaaacagacaccgaagttatcacctatattatagattatttgcacaggaaacaaaaactcaactttactgaaatcgcttcggttatcgccgcttcgttttggcagaccattgaaaaacagccgccggacgagagggagacgcatgaatttttacgcgtaatgttcagcgcgcagcttattacgggtccgttctcaatacttgtcggctttaacggaggattgatggcgttaaacgacaggctaaaactgcggagcatggtggttggtgaaaaagacgatcttgtttatatggcgagcgaagaagcggctatccgcatcattgaaccgaaccttgacaatatttgggcgccaaaaggcggtcagcccgttatcgtttgtttgaatggagggcaagcataa

SEQ ID NO: 33256 - protein, 258 aa, Unknown
  Obtained from environmental sample
  DOMAIN (28)...(227): Glutamine amidotransferases class-II
  misc_feature (1)..(258): Xaa is any amino acid
MIWRYFVIPLPTKLADSQLDEREFTAKCVFNVNTKINGAYVFSSGKNMGVFKAVGFPEDVGRFYKLEEYEGWCFTAHGRYPTNTPGWWGGAHPFSLLDYSVVHNGEISSYDTNRRAIEMYGYKCTLQTDTEVITYIIDYLHRKQKLNFTEIASVIAASFWQTIEKQPPDERETHEFLRVMFSAQLITGPFSILVGFNGGLMALNDRLKLRSMVVGEKDDLVYMASEEAAIRIIEPNLDNIWAPKGGQPVIVCLNGGQA

SEQ ID NO: 33257 - DNA, 843 bp, Unknown
  Obtained from environmental sample
  misc_feature (1)..(843): n is a, c, g, or t
atgaaaaagctaatcagcgggaaagtaagggaagtgtacgaggtctccgatgacaggctggttatcgtcacgacggacaggatttcggcgtttgacgtaattctgccaaagcccgtactcaataaaggaaaggtcctgaacgccgtttccctgttctggtttaactttaccaaagacattattcccaaccatattatctcaagcgaccttaaagacatgccggaatttttccataaggacgaattcgagggacgcgctgttttggttaaaagggttaaaatacttccgtttgaatttatcataaggggttatatgttcgggaatatgtggtcggcctattccaggggcgaagaattctgcggtcaaaaaataaaaagcggttacaagctggctgaaaagctggacgcccctctttttaccccctcgacaaaagcccacgtcgggcatgacgagtatatcaccgttaaacatgtcgcggacacgattggctcggatccggcaaaaaaaattgaaaaaatctgttttgatctttataacgtctgttacaattatgcttacaaaaaaaacattatcatcgccgacacgaaatttgaattcggccttgacgcccaaaacaatatctttctcgcggacgaggtattcacgccggattcaagcaggttctgggatctttccgattatcaggtgggagtttcgccaaaaagttatgataaacaatttgtaagggattggctcctcaataacaaaaaagacggtgagatgcaatttgacaaagtgccggacgacattttgcaaaagacgtcggagatttacgcggaatgtttgaaaaagataacagggtaa

SEQ ID NO: 33258 - protein, 280 aa, Unknown
  Obtained from environmental sample
  DOMAIN (1)...(263): SAICAR synthetase
  misc_feature (1)..(280): Xaa is any amino acid
MKKLISGKVREVYEVSDDRLVIVTTDRISAFDVILPKPVLNKGKVLNAVSLFWFNFTKDIIPNHIISSDLKDMPEFFHKDEFEGRAVLVKRVKILPFEFIIRGYMFGNMWSAYSRGEEFCGQKIKSGYKLAEKLDAPLFTPSTKAHVGHDEYITVKHVADTIGSDPAKKIEKICFDLYNVCYNYAYKKNIIIADTKFEFGLDAQNNIFLADEVFTPDSSRFWDLSDYQVGVSPKSYDKQFVRDWLLNNKKDGEMQFDKVPDDILQKTSEIYAECLKKITG

SEQ ID NO: 33259 - DNA, 312 bp, Unknown
  Obtained from environmental sample
  misc_feature (1)..(312): n is a, c, g, or t
ttggccgaggtactcgcgtcggcggcgctgattgcgcttggctgccacctgtgcagaagctgccacggcggcaaatgcaactggggcatcgctacgcaggttcccgaactggtcaagaggctgaaccccgacctcggacataagcggcttatcaatcttttaacggcgtggcagcacgaaataaaagaaatgatgggcggcatggggatcaattcgattgacggcctgaagggaaacaggctcatgcttcgcggcgtggggttaaatgaaaaagagcttgaaatcctcggcattaaacacgccggagagtaa

SEQ ID NO: 33260 - protein, 103 aa, Unknown
  Obtained from environmental sample
  misc_feature (1)..(103): Xaa is any amino acid
MAEVLASAALIALGCHLCRSCHGGKCNWGIATQVPELVKRLNPDLGHKRLINLLTAWQHEIKEMMGGMGINSIDGLKGNRLMLRGVGLNEKELEILGIKHAGE

SEQ ID NO: 33261 - DNA, 1086 bp, Unknown
  Obtained from environmental sample
  misc_feature (1)..(1086): n is a, c, g, or t
gtgacgggcatgattgtgcgggaacagatggtagggaagtggcaggttcccgttgcggactgcgctgtaacaaccagcacattggattccataaccggcgaggctttttccattggcgagcgcaccccgcttgcgcttttgaactctggagcagccgcgagaatggcggttgcagaagccataacaaacattgccgcagcaaaaatcagcgacatctcaaaaatacgcctctcagcaaactggatggcaaaccccgcaacaaaaggcgaaggcgcagccttatacgaagctgtgaaagcggttggcatggacttttgccccaagctgggaattgcaattcccgttggcaaagattctatgagcatgagcgcgagctgggaaagtgagggcaaaaagaaaaccgtgacctctcctgtttccttgatagtgagtgcatttgctccttgcgaagatgtgtgcaagagcttaacgccagaacttcaaaatgttgaaaacacaattttagtcttagcggatttgggcgaaggcaaaaacagaatgggcggttccatagcgggcgaggtatataaccaatttggcggagaacctccagatgcggctcccgaactgttgaagcaatttttcaaagcaatccaaaccctgaacgctcaaaacaaaatattggcataccacgaccgctcggatggcggcttattcgcaaccgttgcggagatggcttttgccgggcacgttggcgtaaaactggaaattgaggagcaaattccattgcttttcaacgaagaattaggtgcggttttgcaaatcaaggaaaacgattttgaagatgctcgcaaattattccccttcaaaaaaataggcaagctatccgatgatttccacttaaccacatccagctacaggcaatccctatccgaactccgcaaaatctggagccgaacctcttacgaaatagcaaagctccgcgacaaccccgaatgtgccaggcaagagtatgaatggaagtgcgaggaaaaggatgtgggtattaacgttagtggagagttgagagtggagagtggagaatactcagagctcggccgattctga

SEQ ID NO: 33262 - protein, 361 aa, Unknown
  Obtained from environmental sample
  DOMAIN (162)...(299): AIR synthase related protein, C-terminal domain
  misc_feature (1)..(361): Xaa is any amino acid
MTGMIVREQMVGKWQVPVADCAVTTSTLDSITGEAFSIGERTPLALLNSGAAARMAVAEAITNIAAAKISDISKIRLSANWMANPATKGEGAALYEAVKAVGMDFCPKLGIAIPVGKDSMSMSASWESEGKKKTVTSPVSLIVSAFAPCEDVCKSLTPELQNVENTILVLADLGEGKNRMGGSIAGEVYNQFGGEPPDAAPELLKQFFKAIQTLNAQNKILAYHDRSDGGLFATVAEMAFAGHVGVKLEIEEQIPLLFNEELGAVLQIKENDFEDARKLFPFKKIGKLSDDFHLTTSSYRQSLSELRKIWSRTSYEIAKLRDNPECARQEYEWKCEEKDVGINVSGELRVESGEYSELGRF

SEQ ID NO: 33263 - DNA, 1362 bp, Unknown
  Obtained from environmental sample
  misc_feature (1)..(1362): n is a, c, g, or t
gtgataagcctaattgccgtaaaaacaaggctttacggcaaaaagactgagcataatattttaaagaataaaggttcgattcatcgaaattctaaaaaccggcagttcgccggccaatcaaattttggaggattgaacatggaacgactatcaattaaagaacttgttccccgtctggaacaggaactcattcgcatgggctacgcggaagggacgcttaagtactaccgcgctaactggaaaatgataacggctcattttgacaggctcggcgagccttacttttccgaagcgaccgcaatggagtatgtggacaacaagtgtaactttttcgagaaggaacgaaccggcacattaacacaaagcaacgcctgcttgttccgcattgtccgcatgatgggggactttgcacagcatggaaccgtattacggcgttatgcgcgcagcctgtcgcgtgttaacgagcggatgaaccgggagatgctgggcacattcaaagaacactgcaagaacatcggatatgcagtttctacatgtggcagttacgcccgtaccgcggagaacttccttagttacatcgaagcgcatgggatcccgttacaggcattgaatgccgacgatttgaccgcctttgtcaaaacactgctgggttacagttgtaaaatggttgagttcgtactttgcggtacaagagcttttttaagatttctatacaaggagggcgcagtctcatccgacttttcggaatcacttcctactatccagtcacgaaaacaaacccgtatcccgtctgtctgggataaagacgatttgctgaaactgctgaacgcaattgaccgcggtaatccttccgggaaacgtgattacgcaataatcctgcttgtcgcgcggcttggcttgcgttgtatagacgtaaagcgccttacgttttcaaacttcaactggaatgaaaactacgttgagttcaagcagtcaaaaacagggcgtcaggtccggctgccgattcttaaagacgtcggctgggcgatcattgactatatcaagaacggacggccgaccagtgattcgccgtatctgttcttacgccatctggctccgattgggccgttttcagattccgatcacttgcgtcagatggttgtgaaacacatgcgtgcagccaaactacccgtatccggtaaaaagaaagtggggatgcattcattccggcatacactggcaaccgccttgctggaaaaccacacctcaatctatgacatcgccgggatcctcgggcagcaaagcactgaatcaacgccgacttacttgaagagcagccttctgctgctgcgcgattgcgctctgagcccggaggtggagtaa

SEQ ID NO: 33264 - protein, 453 aa, Unknown
  Obtained from environmental sample
  DOMAIN (274)...(445): Phage integrase family
  misc_feature (1)..(453): Xaa is any amino acid
MISLIAVKTRLYGKKTEHNILKNKGSIHRNSKNRQFAGQSNFGGLNMERLSIKELVPRLEQELIRMGYAEGTLKYYRANWKMITAHFDRLGEPYFSEATAMEYVDNKCNFFEKERTGTLTQSNACLFRIVRMMGDFAQHGTVLRRYARSLSRVNERMNREMLGTFKEHCKNIGYAVSTCGSYARTAENFLSYIEAHGIPLQALNADDLTAFVKTLLGYSCKMVEFVLCGTRAFLRFLYKEGAVSSDFSESLPTIQSRKQTRIPSVWDKDDLLKLLNAIDRGNPSGKRDYAIILLVARLGLRCIDVKRLTFSNFNWNENYVEFKQSKTGRQVRLPILKDVGWAIIDYIKNGRPTSDSPYLFLRHLAPIGPFSDSDHLRQMVVKHMRAAKLPVSGKKKVGMHSFRHTLATALLENHTSIYDIAGILGQQSTESTPTYLKSSLLLLRDCALSPEVE

SEQ ID NO: 33265 - DNA, 1272 bp, Unknown
  Obtained from environmental sample
  misc_feature (1)..(1272): n is a, c, g, or t
atgagttattccatcggagtgcagtcagaagacggcgcttatccggtaatcattaccattaatgttgaggattcctggaatttcattgttttacccaagcccggatacagtaccaataccggctttgagttaattgcaaaagcaagggattataattttctgggaacgatgaaccccctgaggattgacctgggctattactatgatgaaaatagccgtcactcatttatgctgggagtatattccagcacaccattcagggctctgggttatacatggaatataaaatttgataatacctttaattaccgaccccaggttgaagaaccttattactatcagaatattaccggtctttcagtagaggtacctttccgtactacaacctttacttttggttttgaagaatccgtcaatttgaatgaagaaaacagtgacgggaacaaggaaaaatacgggaattttcagaacggtttgtatatgtcaaccagtttgttcacatcatgggaaatacctaccggtcttataatatcccggtttggggaattaacctatactcccggtatttcggcaacatttaaccacgaacttcccgaatggtacctacaggaaattcgcagaggaccattcatgaatttcagccactcattgggttttgagaaaattgactggcatgccaattatcgtgaaggactttccgtttcagtcagcaattcatatagttatgatttttttcgccttgacgccgaaaaaaacccgctgtctgtctcttttacatttaacggaaccggacactttattataagcagattctttggaatttcttcacggcttatgtaccaatactggttctatcacaacccggaatattacgagaaagccggcgatgttctgcgcggtattgcggataaggcgctgtgcgccgactatatgctgtcacttaacgttgatcttccgttgcgcgtactggtattcgccccttcccggtggtttaacacgcgcaaactcagtttctttgattttgaattacaaatgtctccggtagtcgatatggctctttatcatgatccggtggcggaaatatcttttgaccccaaaaacatctctgtttcaggcggtcttgaattcattgtgtttccggcattcatgcgcaatttgtatgtgcggctgggttatgcctgcaatttcagggaattttttgccgcacatccggtcaaattccccgaaggtgaaaatcgtgaaatatatttaatcatggggcacttttattga

SEQ ID NO: 33266 - protein, 423 aa, Unknown
  Obtained from environmental sample
  misc_feature (1)..(423): Xaa is any amino acid
MSYSIGVQSEDGAYPVIITINVEDSWNFIVLPKPGYSTNTGFELIAKARDYNFLGTMNPLRIDLGYYYDENSRHSFMLGVYSSTPFRALGYTWNIKFDNTFNYRPQVEEPYYYQNITGLSVEVPFRTTTFTFGFEESVNLNEENSDGNKEKYGNFQNGLYMSTSLFTSWEIPTGLIISRFGELTYTPGISATFNHELPEWYLQEIRRGPFMNFSHSLGFEKIDWHANYREGLSVSVSNSYSYDFFRLDAEKNPLSVSFTFNGTGHFIISRFFGISSRLMYQYWFYHNPEYYEKAGDVLRGIADKALCADYMLSLNVDLPLRVLVFAPSRWFNTRKLSFFDFELQMSPVVDMALYHDPVAEISFDPKNISVSGGLEFIVFPAFMRNLYVRLGYACNFREFFAAHPVKFPEGENREIYLIMGHFY

SEQ ID NO: 33267 - DNA, 321 bp, Unknown
  Obtained from environmental sample
  misc_feature (1)..(321): n is a, c, g, or t
ttgaaacagattgtcaacataacattttttttatctattcttaatcgattatttaaactgctgacccgcaggcaaaaaatatatctgggtatcctgcttgttttgaccgttggtttttcgctggttgaaactctgggaatttcagttatcatgcccttcatttcattggcgtcagatcctggtttgattacctccggctggtataaaaaagcgtttgatttttttggatttgccggacccgagtcgtttattattacactgggtatcggcattatatgtttttatttctttcgcgnnccgtgttctcgtgccgaatnctga

SEQ ID NO: 33268 - protein, 106 aa, Unknown
  Obtained from environmental sample
  misc_feature (1)..(106): Xaa is any amino acid
MKQIVNITFFLSILNRLFKLLTRRQKIYLGILLVLTVGFSLVETLGISVIMPFISLASDPGLITSGWYKKAFDFFGFAGPESFIITLGIGIICFYFFRXPCSRAEX

SEQ ID NO: 33269 - DNA, 882 bp, Unknown
  Obtained from environmental sample
  misc_feature (1)..(882): n is a, c, g, or t
gtgaaaaattatcctgtgttattcgtgcttttctttttttccctcggctttccgcttttttcaatagactggccttcggtatccggcaccataagaaaaaatttcggctggaacgaccagggcctgcctcatcttggcattacttttgacactgacgaacaagtgaaagcagccgatgtcggggaaatctttttctcccgccgggaaggagataccgcttcacgcctcccctcgcctttaggcacctggacggcgctggatcatggggacggcatcgttagtatttacgcccgaatggatgacaaaaaccaaaaagcgcctgcgggcgaggccacaggccggacagaaaaaggcagtgtcctgggcgaagccggaatttccggctggacaaaccgaaagggggtttattttcagcttttcgatcgtaaggaaagacgctggctaaaccccgctctgattatcaccccccccgaagaccaaaggccgcctgaagtaatgtcggtaaggctcaaaaacgccgaaggacagctcatcaatccttatcagacctataacataagccaggggccctatacgatcattgtgaatgcggttgacaccatgcgctcgtcaagcgaaaatcccctggccccttacaggataatgtgctccctgaacggcagtgaggccggggtactgtcttttgaaacattttccgccagggacggccggctgatggtctacagaaacggcctggttcctgtaaagcagatatactcccccgtccccgcctacgaagtggcggacgtgtggttcagccggggtcagacaactcttgaaataatcgcgcaggatatagcaggcaatgtccgcaatgttgtttacaggcttatggtggaatga

SEQ ID NO: 33270 - protein, 293 aa, Unknown
  Obtained from environmental sample
  SIGNAL (1)...(21)
  DOMAIN (42)...(150): Peptidase family M23
  misc_feature (1)..(293): Xaa is any amino acid
MKNYPVLFVLFFFSLGFPLFSIDWPSVSGTIRKNFGWNDQGLPHLGITFDTDEQVKAADVGEIFFSRREGDTASRLPSPLGTWTALDHGDGIVSIYARMDDKNQKAPAGEATGRTEKGSVLGEAGISGWTNRKGVYFQLFDRKERRWLNPALIITPPEDQRPPEVMSVRLKNAEGQLINPYQTYNISQGPYTIIVNAVDTMRSSSENPLAPYRIMCSLNGSEAGVLSFETFSARDGRLMVYRNGLVPVKQIYSPVPAYEVADVWFSRGQTTLEIIAQDIAGNVRNVVYRLMVE

SEQ ID NO: 33271 - DNA, 936 bp, Unknown
  Obtained from environmental sample
  misc_feature (1)..(936): n is a, c, g, or t
atgtcccgcgacgttaaagcaaaactgaacagttcaggcgatattgaattttttgaataccgcgggaaaaaagcgtcctttttggaattggctttttcgctgccaagggatggacgcatgtcaggctgggccctttgcatggaattgggacagccaaaccagacgtcagcggctaacgcttcggccacgaagccgctgcttttggcaatggcttatggcccagcgggaaaacaggggcttgaggcaatgcatttttcagcccttgactccattatcccggaagaaggggacaggcttgcccctggtccaataacagagtttgcctatccaagggaaacgcgaataaaggctccagtctttgcccttgattgcgaagcctggatttttgaggaagatgccgatgcggcccaagcccttatcgacagggagtttttggttttgcgtcgttaccagaattcacccagatggaaagaagcgtggatccggttttaccgggcagtttaccgcgattcatttgaaaggcttacggacattgcctttcaggtggaacgcaagcttaacgtccccccgcgggaaaaccgtgactttgccaaccaggcgctaaagtgggttcagtcgtttaactacgaacgggatttatttggcagcgatttcataaaccttgtcagttctgccatcgaaggcagaggcgactgcgacaacagggcaatgctttgggcgatcattttgaagcaggcctgcattccctcggcgataatggtttcgcgtaattacagccacgccatgggccttgccgaccttcccggctcaggcgcccgttttgagctgaagggacaaaggctgcttgtcgctgaaacaaccgctgatgttcccatcggcctgataggcgaaacggtcagtgaaattgatcaatggctgggtatactgtttgaatga

SEQ ID NO: 33272 - protein, 311 aa, Unknown
  Obtained from environmental sample
  misc_feature (1)..(311): Xaa is any amino acid
MSRDVKAKLNSSGDIEFFEYRGKKASFLELAFSLPRDGRMSGWALCMELGQPNQTSAANASATKPLLLAMAYGPAGKQGLEAMHFSALDSIIPEEGDRLAPGPITEFAYPRETRIKAPVFALDCEAWIFEEDADAAQALIDREFLVLRRYQNSPRWKEAWIRFYRAVYRDSFERLTDIAFQVERKLNVPPRENRDFANQALKWVQSFNYERDLFGSDFINLVSSAIEGRGDCDNRAMLWAIILKQACIPSAIMVSRNYSHAMGLADLPGSGARFELKGQRLLVAETTADVPIGLIGETVSEIDQWLGILFE

SEQ ID NO: 33273 - DNA, 537 bp, Unknown
  Obtained from environmental sample
  misc_feature (1)..(537): n is a, c, g, or t
ttgattctttgcatgatttgggaaaggattgaaatgagcggcaagaagaacctgttagctggcacagccgtttcccgaaacggccgtattgacccccaggctattgtttcccccgagcgtattgtcttcctgaattattcttccaaaagagaagcccttctttccctggctgaaaatatttccacagcgcaggaaattaccaatccccaggaactctcccgcgaaattttaagaagggaagaactcatgagtacggccattggttgcggtatcgccattccccatgtaaggctttcgtcaatttctgatctggtaatttcagtcggaataagccggacagacataatggattttcaaactcttgacggtgtacctgtgcggcttcttcttatgatagccgcagcatataaccagcacgcctattacctgcaaaccctctcgttttttagcgccaggttaaaaaacaaagatataaggaacgcccttttggcatcgaatgacaggcaggaagtttatggaattctcacaggcggatga

SEQ ID NO: 33274 - protein, 178 aa, Unknown
  Obtained from environmental sample
  DOMAIN (35)...(178): Phosphoenolpyruvate-dependent sugar phosphotransferase system, EIIA 2
  misc_feature (1)..(178): Xaa is any amino acid
MILCMIWERIEMSGKKNLLAGTAVSRNGRIDPQAIVSPERIVFLNYSSKREALLSLAENISTAQEITNPQELSREILRREELMSTAIGCGIAIPHVRLSSISDLVISVGISRTDIMDFQTLDGVPVRLLLMIAAAYNQHAYYLQTLSFFSARLKNKDIRNALLASNDRQEVYGILTGG

SEQ ID NO: 33275 - DNA, 918 bp, Unknown
  Obtained from environmental sample
  misc_feature (1)..(918): n is a, c, g, or t
gtggggggggatgcgtcggagccgaacggaacagacggaagtttcacttataccgttactttgagtaagggtacggagacggatgcggtgctaaccggcacggtatctatcaaagccaccgtgtgggttccgaagtacgccataacgttcgccgacgggacgggatatacgctggcggcgacggtagacggcgccgcgattgcgagcgggaaccaggtggagagcgggaaggtggttaacttcaccgttacaatatcggcatcgggcaaagtggttaagaactggttggtgaacggtacgggcatgtcgcctgcggttacgacgactacgttcgcgtataccgtggcgagtgcggctgccgctatatctgtcgagcttgaagacggcatagtgactcctccgtcgagcgaaggcgactacgaaataggcggcaagaaagtcgctgtgatcactttcccgaagagcgtgaacctgacgtacaagaacggcgggaagtacgccgcgtctgagaatcccgtcataggcatacgcgacgcgtcgttgggcggaagcgcgggagactggaagatggttgaactccagtacacgtcgccgaccaataagacgtggacgagcaggcctacaagccctgttacgagtttgtccgggttcaccagcatcgaagtggggaaacagggaaatggaagtaccgaccagataatcacggagtcggatctgatcggcacgtggaaagcgaaagtcacgttccagtacaagaaatcgggcgccacggctgaatcgaagcctcctttgaacgcgacggccactaaggttaacgacgccgtctttactattaaccgtctgaattttgccgccgcaagcagcgtcactcttgacgtgaagattttgggtcccggcggcgttcagcaaggctactaa

SEQ ID NO: 33276 - protein, 305 aa, Unknown
  Obtained from environmental sample
  misc_feature (1)..(305): Xaa is any amino acid
MGGDASEPNGTDGSFTYTVTLSKGTETDAVLTGTVSIKATVWVPKYAITFADGTGYTLAATVDGAAIASGNQVESGKVVNFTVTISASGKVVKNWLVNGTGMSPAVTTTTFAYTVASAAAAISVELEDGIVTPPSSEGDYEIGGKKVAVITFPKSVNLTYKNGGKYAASENPVIGIRDASLGGSAGDWKMVELQYTSPTNKTWTSRPTSPVTSLSGFTSIEVGKQGNGSTDQIITESDLIGTWKAKVTFQYKKSGATAESKPPLNATATKVNDAVFTINRLNFAAASSVTLDVKILGPGGVQQGY

SEQ ID NO: 33277 - DNA, 300 bp, Unknown
  Obtained from environmental sample
  misc_feature (1)..(300): n is a, c, g, or t
gtgggcgtattcgttactgtaagagtaaggattctgcgcatgaatcacaaccatccacaacacacaaacggggagggtaacggtatgcaatgcgggacagtcctcttttttaacgacattagcggcaccggcaagattatggcggacgacgggggccaccatgtcaaggtttctcacaaggcgctgaaaggcgaggggtacaaggctttggacgagggtcagcgggtcagttttaagagcgttcggcggaagtccgggctggaagctctgtttgtggaaataatcgatacgtttttctga

SEQ ID NO: 33278 - protein, 99 aa, Unknown
  Obtained from environmental sample
  DOMAIN (29)...(95): Cold-shock' DNA-binding domain
  misc_feature (1)..(99): Xaa is any amino acid
MGVFVTVRVRILRMNHNHPQHTNGEGNGMQCGTVLFFNDISGTGKIMADDGGHHVKVSHKALKGEGYKALDEGQRVSFKSVRRKSGLEALFVEIIDTFF

SEQ ID NO: 33279 - DNA, 750 bp, Unknown
  Obtained from environmental sample
  misc_feature (1)..(750): n is a, c, g, or t
atgaaggaattcgctcgcgcccaagcggagtcttgcggggatattgatgtcgatacattaaaaaaacgtatcttagaggaggccgtccgtatcttggaagaggacaaacggatgtgccgggcgataggggagcatgggtttgagcttatcaaggataaagagtgcatcctgacccactgcaacgccgggggtttggcgacaagcgaactcggaacggcgctagcccccatatacgtaggtcaggagcgcggggtaacgtttcgggtattcgccgacgagacgcgcccgctgctgcagggcgctcggataaccgcgttggagttgagcgaggccggaattcccgtgactgtgatatgcgacaacatggccgcctccgtcatggcgagcggtcagataaaggcctgcatagtgggcgccgaccgcatagcggccaacggcgacacggccaacaagatcggcacctacggcgcggctatatcagccgcctaccacaagatacccttctacgtagccgccccctcgtctacattcgacttaaaaatcaagagcggcgcggacatacctatagagaagcggggcagggaagaggtggcgctcttggggggcgtcaagaagagtatcccagacaaagcggaagtgttcaatccgtcctttgacgtcactcctgcggagctgatcgcggcaatcatcacggaaaaaggggtgatttatccgccgtttaccggaaatattgcgaaaataattcaataa

SEQ ID NO: 33280 - protein, 249 aa, Unknown
  Obtained from environmental sample
  DOMAIN (1)...(240): Initiation factor 2 subunit family
  misc_feature (1)..(249): Xaa is any amino acid
MKEFARAQAESCGDIDVDTLKKRILEEAVRILEEDKRMCRAIGEHGFELIKDKECILTHCNAGGLATSELGTALAPIYVGQERGVTFRVFADETRPLLQGARITALELSEAGIPVTVICDNMAASVMASGQIKACIVGADRIAANGDTANKIGTYGAAISAAYHKIPFYVAAPSSTFDLKIKSGADIPIEKRGREEVALLGGVKKSIPDKAEVFNPSFDVTPAELIAAIITEKGVIYPPFTGNIAKIIQ

SEQ ID NO: 33281 - DNA, 1281 bp, Unknown
  Obtained from environmental sample
  misc_feature (1)..(1281): n is a, c, g, or t
atgccggttgagcgcaaaaacggcaaggacggcaacgcgctcaagatttccgtggatttggcgggaaggcaggcgatagcccaaatttgggaagtaaaagtaggccgttcctctctgtatctgcttgatacaaacctggaagaaaatgctccggatatccgcaatgtaaccgcgtcgctgtacggcggcgacaaggaaacccgtatgcagcaggagattctcctgggcataggcgggattcgcgctctgcgcgccctggggatcaaccccgccgctactcacatgaacgaaggccatgcggctttcctcgggcttgagcgtgtccgcgaaatcatgacggaaaggaatttcacttttgaagaggcaagagaagcgatctggccgaccaatatttttaccacccacacgccggttccggccggtaatgagcgttttgacatcagtctggtagaaaaatatttccgctcctggccgcaggttctcggcatatcatggaaggattttctcggccttggacggattaatgtcgatgatgacaaagaaactttctgccttaccgtgcttgccctgaagatggcggcttacgccaatggtgtcgccaaactgcacggggtggtttcccgcgatatgtggcaggggctttggccgggagttccgataaacgaagtccccataggccatgtcaccaacggcgtgcatccgcgcacctgggtttccagcggcatgatcgagcttttagaccgctattttggccctcattttgagaacaaacctacagacctggatatttgggatcgcatgagcagaatcagcgatgaggagctatggcggacccatgaacgccgccgggaacggctggtggcctttgcccgtgaccgcatacgtgaacaatacaagcgcaccggcgcggtggaacgccgcgttcagcaggcggaagacgccctttcgccttatgccctgaccctgtgctttgcccgccgttttgccacttacaagagaggcaacttgctgttacgcgatccggaaaggcttttgaaactggtaagggacaacgaccgccccatacagcttatattcgccggcaaggcccatcctcacgatatgcccggcaaggatcttatccgtgagatcgtccattttgccgagaggtacgatgttacaagccgcattgtgtttgtggagaattacgacatgaccgttgccaagtaccttacatcgggcggcgacgtgtggctcaatacgccgcggcggccaatggaggcgtcgggcacagcggcatga

SEQ ID NO: 33282 - protein, 426 aa, Unknown
  Obtained from environmental sample
  misc_feature (1)..(426): Xaa is any amino acid
MPVERKNGKDGNALKISVDLAGRQAIAQIWEVKVGRSSLYLLDTNLEENAPDIRNVTASLYGGDKETRMQQEILLGIGGIRALRALGINPAATHMNEGHAAFLGLERVREIMTERNFTFEEAREAIWPTNIFTTHTPVPAGNERFDISLVEKYFRSWPQVLGISWKDFLGLGRINVDDDKETFCLTVLALKMAAYANGVAKLHGVVSRDMWQGLWPGVPINEVPIGHVTNGVHPRTWVSSGMIELLDRYFGPHFENKPTDLDIWDRMSRISDEELWRTHERRRERLVAFARDRIREQYKRTGAVERRVQQAEDALSPYALTLCFARRFATYKRGNLLLRDPERLLKLVRDNDRPIQLIFAGKAHPHDMPGKDLIREIVHFAERYDVTSRIVFVENYDMTVAKYLTSGGDVWLNTPRRPMEASGTAA

SEQ ID NO: 33283 - DNA, 1635 bp, Unknown
  Obtained from environmental sample
  misc_feature (1)..(1635): n is a, c, g, or t
atgaaaaaagtatttatcaagtacaatccctataaacttgaaacagagatttctgtagacaggaaaaaattagctcaaaacagcaagctcggtgacaaatcagccaaggattcccgattgcaggaatgggtagaggaacttccttacatccttgttgatgaatataatgacaaggaatttgagatagaattccatggcacgcttcttgattatgaagatttaacaagcgttattacagacgcaaacaataagggtgatataacggcggaatgtaaacacatacccgcaaaagaaacttctgacaaagaagcccatattgatggagtttttaatgatattaaaaaaggaccttttgacgagcttcgcaatgatgaaattattaacgcttttaatcacgcgaaaagcaatgattttgaggtgtgcgttgtcgccacaatgagcgccggcaaatccacgcttataaatgccatgcttggctcaaaacttatgccttcaaagcaggaagcctgtacagctattattacacgtataaaggatacttccactaacaaaataccttttagggcggaggtctaccacaaggaaaacagtttaaaagaaacgcatgaaaatttaaccttgccgatcatggaacgattaaactcagatgaaaatgtatctgaaataaaggttttcggaaacatcccatttgtacagtcggatgatgtttcacttgcattaattgacactcccggcccatacaatgcccgaaacgagcgccacaagaaagtgcaaagcaaatttctcggcaagtcatcgaaatcgcttgtcctgtatataatgacaggcgaatttggtactgacgacgataacctcttgctaaaccgtgtagccgaaagtatggacgtaggtggaaagcagtcgaaagaccgttttatttttgttgtcaataagcttgatgaccgcaaaaaggaggacggagacacaaatcaaactttggaaaaagtacgtgcctatcttaaagataaaaaggtgttcaatcccaatctgttccccgcagcggccttgcccgcgctaaaccttcgcatgatcatgagcaaggcagccgttgacgatgataccctggacgaaacggaagtaaaagtaaaaaaactaaaccgcaatcctgaacttcattttgagaattacgctacgcttcccgccggtattcgcggcaaaataaaagggcagcttgatacggtgcggtctgcatacaagggcccggataacgaaaaccaggacgaagcgttaattcatacaggcgttgtttctatcgaggcggcaattcagcagtatgttcaaaagtacgcaaagacagctaaaatcaaaaacatcgtcgatacgtttattcacaagcttgatgaggtgggctgttttgagaagactaagcgcaatcttgccgaacatcaggaagagaaagagaagattgtcaaacaaatcgattctatacgcaaaaaaatgaacagcgcagaggaagccaagaaatttnaaaacgctgttgacgatgcggttgttaaaataaatgacaagtctaaagaagtagttgaaggcatacttcanaaatttcagagccgtataacaaagcgcattgatgacttacgtcggaagcgaaattga

SEQ ID NO: 33284 - protein, 544 aa, Unknown
  Obtained from environmental sample
  DOMAIN (138)...(313): GTPase of unknown function
  misc_feature (1)..(544): Xaa is any amino acid
MKKVFIKYNPYKLETEISVDRKKLAQNSKLGDKSAKDSRLQEWVEELPYILVDEYNDKEFEIEFHGTLLDYEDLTSVITDANNKGDITAECKHIPAKETSDKEAHIDGVFNDIKKGPFDELRNDEIINAFNHAKSNDFEVCVVATMSAGKSTLINAMLGSKLMPSKQEACTAIITRIKDTSTNKIPFRAEVYHKENSLKETHENLTLPIMERLNSDENVSEIKVFGNIPFVQSDDVSLALIDTPGPYNARNERHKKVQSKFLGKSSKSLVLYIMTGEFGTDDDNLLLNRVAESMDVGGKQSKDRFIFVVNKLDDRKKEDGDTNQTLEKVRAYLKDKKVFNPNLFPAAALPALNLRMIMSKAAVDDDTLDETEVKVKKLNRNPELHFENYATLPAGIRGKIKGQLDTVRSAYKGPDNENQDEALIHTGVVSIEAAIQQYVQKYAKTAKIKNIVDTFIHKLDEVGCFEKTKRNLAEHQEEKEKIVKQIDSIRKKMNSAEEAKKFXNAVDDAVVKINDKSKEVVEGILXKFQSRITKRIDDLRRKRN

SEQ ID NO: 33285 - DNA, 708 bp, Unknown
  Obtained from environmental sample
  misc_feature (1)..(708): n is a, c, g, or t
atgaagacggttattatttatggagttgaacataaaggcagtaattataatacggttcaattattcaaaaaacaacttaatattagcgaagatgatttggcggaatattttctaccaaaggatatgccgcatttttgttgcggttgtaataattgtttcttaaaaggtgaaaattcctgtccgcatcaaaattatataactccgataaaagaggcaatattaaacgcggaattaattgtttttgtcagtccggtgtacgtattaaatgttacgggacaaatgaaggcgcttcttgaccatctcgcgtttcaatttatgtcacataggcctaataaattgttattttataaaaccgctttaattgtatcaataggcgccggtggaggaatggattcaacaattaaagctatttcaacgattttaaattggtggggcataagccgaattttttcatttggttttgccattcgggccgtaaactgggatgaaataaccaaaaaaaacaagttaataatggaacgtaaaataaagagtatatccaataaaattaaatcgaaaattaataaacctaaatttagtttaaatacaaaatttttgttttacatttgtagaatgatacaaaaaaattatggatatagtccttgtgatacagaacattgggaaaataatggttggttaggcagaaatcgtccatggaaacaaaaatga

SEQ ID NO: 33286 - protein, 235 aa, Unknown
  Obtained from environmental sample
  DOMAIN (1)...(170): NADPH-dependent FMN reductase
  misc_feature (1)..(235): Xaa is any amino acid
MKTVIIYGVEHKGSNYNTVQLFKKQLNISEDDLAEYFLPKDMPHFCCGCNNCFLKGENSCPHQNYITPIKEAILNAELIVFVSPVYVLNVTGQMKALLDHLAFQFMSHRPNKLLFYKTALIVSIGAGGGMDSTIKAISTILNWWGISRIFSFGFAIRAVNWDEITKKNKLIMERKIKSISNKIKSKINKPKFSLNTKFLFYICRMIQKNYGYSPCDTEHWENNGWLGRNRPWKQK

SEQ ID NO: 33287 - DNA, 810 bp, Unknown
  Obtained from environmental sample
  misc_feature (1)..(810): n is a, c, g, or t
ttggaaattgagccagaacttcgcaaagacaaaaagcgtaaaacagacctcctaaacgcagccgacatcgcttttttatgcttgccagatgatgcagcaaaagaatcggtgacgcttgtccaaaatccaaacaccgttgttatagacacaagcaccgcacaccgcacaaatgatgcttgggcttatgggcttccagaactttcaccgagccataaagaagcagtgcaaaaatcaaagcgaatagcaaatccaggctgccacgccacaggatttttactttctgtttatccacttgtgaaaggtggcataataaaagcggatgagaatttgagttgctacagcgtaacaggttatagcggcggcggcaaaaaaatgattgcggaatacaaagagaaatttgacccatccgtaaagccttatgcccttggtctttgccacaagcacttgccagaaatgcaaaaaacagctggactaaaaaatccgcctttgtttaatccaattcttggaccttattatcaaggcatggcagtgacggtgagtctatttccaaatatgctaaacggcataaattcttttgacgaattgagagatttttttaccaattattataaaggttacgaatacattagcgttgttcccgcaggcgaaagcccctctattttagacccaacaatatgcaacaacacaaacaatgcaaaaatttttgtgttcggtcgcgaggaacacgggcaaataaccgttgttttggataatttgggcaagggagctagcggggcggctattcaaaatatggatgtagttgttgtttga

SEQ ID NO: 33288 - protein, 269 aa, Unknown
  Obtained from environmental sample
  misc_feature (1)..(269): Xaa is any amino acid
MEIEPELRKDKKRKTDLLNAADIAFLCLPDDAAKESVTLVQNPNTVVIDTSTAHRTNDAWAYGLPELSPSHKEAVQKSKRIANPGCHATGFLLSVYPLVKGGIIKADENLSCYSVTGYSGGGKKMIAEYKEKFDPSVKPYALGLCHKHLPEMQKTAGLKNPPLFNPILGPYYQGMAVTVSLFPNMLNGINSFDELRDFFTNYYKGYEYISVVPAGESPSILDPTICNNTNNAKIFVFGREEHGQITVVLDNLGKGASGAAIQNMDVVVV

SEQ ID NO: 33289 - DNA, 669 bp, Unknown
  Obtained from environmental sample
  misc_feature (1)..(669): n is a, c, g, or t
atggaaatagagacctcaaaaaaactatttaaaagagcaactcaaattatgcccggcggggtaaatagccccgtgcgtgcattcaaagccgttggcggaaatcctctgtttatagatagagccgagggttcaaaaatttacgatgcggatggcaacgaatatatagattatgtctgttcgtggggaccgattatcttggggcataacaatgcggcaatctgcgaagcggcaacgagagccgctcaaaagggaatgagttttggcgcgccaactgaagcggaggtgaaactagcagagaaaattatctcttatgcgcccggcgttgaaatggtacggatggtgaactccggcacggaagcggtgatgagtgccctgcggctcgctcgtgcttacactggacggcaaaagtcaatcaagtttgaaggttgttatcacggacacgcagacagtatgctcgttaaggctggctccggcgcactcactttatgcgaaccggatagcgccggtgtgtcggaaaacatcgcacaagatacattagtcgcttcgtataacgatttggtaagtgttgaggaattattgaagaaaaaaaatatagcctgcgtaattgtggagcctgtcgctgcgaatatgggcgtggttttgccaaaggaaggatttttaaaagagtaa

SEQ ID NO: 33290 - protein, 222 aa, Unknown
  Obtained from environmental sample
  DOMAIN (37)...(222): Aminotransferase class-III
  misc_feature (1)..(222): Xaa is any amino acid
MEIETSKKLFKRATQIMPGGVNSPVRAFKAVGGNPLFIDRAEGSKIYDADGNEYIDYVCSWGPIILGHNNAAICEAATRAAQKGMSFGAPTEAEVKLAEKIISYAPGVEMVRMVNSGTEAVMSALRLARAYTGRQKSIKFEGCYHGHADSMLVKAGSGALTLCEPDSAGVSENIAQDTLVASYNDLVSVEELLKKKNIACVIVEPVAANMGVVLPKEGFLKE

SEQ ID NO: 33291 - DNA, 483 bp, Unknown
  Obtained from environmental sample
  misc_feature (1)..(483): n is a, c, g, or t
atgcccctaggagcttatggcggcaggaaagaaattatggagcttgtggcaccaaacggtcccgtctatcaagccggaaccctttcgggcaatcccattgcgatggcggcaggtcttgcccaattagaagctcttgaacaacaaaatgtttacgctcatattgatagattgtgtgaaaaattagccaaggggcttctggaaatagcacaaaattgtgggataaagtcttgcgtgaataggataggttccctttgctgcatattttttggaattgagaacgcctgcgattacaagtcggtaaaaaaagcagatacggaactttatgcaaagtattttagaggaatgctctgcgaaaccatttacttggcaccttcgcaatttgaggcgatgtttgtctcttacgcccacacggagaacgatattgatagaactttggactgtgcagagagagttttttctaccttaccattatgtccacgatga

SEQ ID NO: 33292 - protein, 160 aa, Unknown
  Obtained from environmental sample
  misc_feature (1)..(160): Xaa is any amino acid
MPLGAYGGRKEIMELVAPNGPVYQAGTLSGNPIAMAAGLAQLEALEQQNVYAHIDRLCEKLAKGLLEIAQNCGIKSCVNRIGSLCCIFFGIENACDYKSVKKADTELYAKYFRGMLCETIYLAPSQFEAMFVSYAHTENDIDRTLDCAERVFSTLPLCPR

SEQ ID NO: 33293 - DNA, 543 bp, Unknown
  Obtained from environmental sample
  misc_feature (1)..(543): n is a, c, g, or t
atggagttggggaaaagaaagacagtcctgctttcatcccatatactgcaggaaattgaagctatctgcccgcaagttatgatcatcaacgaagggaaaatagtagcccggggaacaaccgaggaaatcgctggaaccatgaagggcggcgatacctgggagcttatgctcacgcggaacacggcatttgacatcacggcaagcacctcctttgctgaaaggctgcaagcgcttgggtacgagattaaatcggtcacggtcgatctaatggacaaccagctgataaaaatcggcttctttatacctacaaataacgctgccggtcagggttctcttatcccgaccggagagacgatctttgactgggctgtctcaaacgggtttaaaataatcggcatgaaccgcaagaaaatcagcctggaagatattttcgtaagcctcacttcggatgaacaacattcatcttctgtaacaaaatcatctgaatcaaactcatcggaagagacaagttcatctaatgaaacaagcaaggaggcccaatga

SEQ ID NO: 33294 - protein, 180 aa, Unknown
  Obtained from environmental sample
  misc_feature (1)..(180): Xaa is any amino acid
MELGKRKTVLLSSHILQEIEAICPQVMIINEGKIVARGTTEEIAGTMKGGDTWELMLTRNTAFDITASTSFAERLQALGYEIKSVTVDLMDNQLIKIGFFIPTNNAAGQGSLIPTGETIFDWAVSNGFKIIGMNRKKISLEDIFVSLTSDEQHSSSVTKSSESNSSEETSSSNETSKEAQ

SEQ ID NO: 33295 - DNA, 771 bp, Unknown
  Obtained from environmental sample
  misc_feature (1)..(771): n is a, c, g, or t
atgatgaatcagaaaaacctgtccgctcaggtccgcctgctccagggaaaatcgcggattatcgcgctcacgcgcaaggaactgtactcttaccttaacgcgccggccttttacggggcggccgttttctttctgggcttcagttccgtctggctgttttatatacagcgttactttaccctgaacgtcgccaccctgcggccttattttgtggctttccccattgtttttatccttgttatccccgtgctgacaatgaaaagttgggccgaggagcgaaaaaccggaagcatagagcttttgcttaccatgcccttctccgaatgggaactggtactcggcaaattcttttcggctttcgcgttgctggttatgatgctggttttgaccatccccctgcccttctgcctcgcgcctctgggtgaatttgacgcgggcgttatcgtctgcgaatatctggggctggttttaatgggagcttccgccgtcgctttgggcctgctcttgtcatcgctgtccaaaaaccaggcgggaagtttcctgggaagcgccgtcgccatgatggcggttatgctgataaacaacctgactttcttcatgaacctccccttctggctgaccgaattcataaattttatttccctttcatttcattttgagagcttttccaaaggacttctcgattccagggatataatttattttctgacaagcgcggttctttttttattcatcaccacgcgggtaatattgttcaggaggtggaactaa

SEQ ID NO: 33296 - protein, 256 aa, Unknown
  Obtained from environmental sample
  misc_feature (1)..(256): Xaa is any amino acid
MMNQKNLSAQVRLLQGKSRIIALTRKELYSYLNAPAFYGAAVFFLGFSSVWLFYIQRYFTLNVATLRPYFVAFPIVFILVIPVLTMKSWAEERKTGSIELLLTMPFSEWELVLGKFFSAFALLVMMLVLTIPLPFCLAPLGEFDAGVIVCEYLGLVLMGASAVALGLLLSSLSKNQAGSFLGSAVAMMAVMLINNLTFFMNLPFWLTEFINFISLSFHFESFSKGLLDSRDIIYFLTSAVLFLFITTRVILFRRWN

SEQ ID NO: 33297 - DNA, 768 bp, Unknown
  Obtained from environmental sample
  misc_feature (1)..(768): n is a, c, g, or t
ttgggtaaaaccgaggcgttgctgccgaaaagccagcaaataagaggcgacagatatttgcagggcgacagaataaaagcggttatccatgaagtaaaagaaagttcaaaaggcgcgcaagtcatactttcgcgaacctcgccggaatttttacgccgtttgtttgaagtggaagtgccggaagttttccaaaaaatcgttaggatagtgaagatagaaagaaatcccggatacagggcgaaagtcgcgcttgaaacgtccgacccgagagtcgaccccgtcggcgcgtgtttgggaatgcgcggcggaagaattcagacaatagtacgcgaactttccaacgaaagaattgacgtttttgtctggactgacgatattgtcatgcttgcaaaaaaagcacttgcggcggcaaaggtttcaaacgtatatccggtaggcgacaaaaaaatagtaatggtcgttcccgacgaagagttggcaaaggcgatagggaaagacggttcaaacattaaacttacttcaagatttttagacaaagaagttcttatttacggagaagacgaatttgacgatttttccgaagaagaaagagcgaaaatatttaccgcaaaaatcgaagagataaagaaaccgaacggaaataccgccgacgacgacaaagaaattgaagaaaacaacgtacatgaaattgaaaacgagcaagaagatgaaaattctttgagcgtacaattagtcgagagcggtgcagatttagatgatttgcggtaa

SEQ ID NO: 33298 - protein, 255 aa, Unknown
  Obtained from environmental sample
  misc_feature (1)..(255): Xaa is any amino acid
MGKTEALLPKSQQIRGDRYLQGDRIKAVIHEVKESSKGAQVILSRTSPEFLRRLFEVEVPEVFQKIVRIVKIERNPGYRAKVALETSDPRVDPVGACLGMRGGRIQTIVRELSNERIDVFVWTDDIVMLAKKALAAAKVSNVYPVGDKKIVMVVPDEELAKAIGKDGSNIKLTSRFLDKEVLIYGEDEFDDFSEEERAKIFTAKIEEIKKPNGNTADDDKEIEENNVHEIENEQEDENSLSVQLVESGADLDDLR

SEQ ID NO: 33299 - DNA, 1377 bp, Unknown
  Obtained from environmental sample
  misc_feature (1)..(1377): n is a, c, g, or t
atgaagaacgaagatagattcacgcccgaagctgccgcctctgtttttaattcctgcatccgtttttgcaacgttataatagccggaaaagacgctgcaatcggccttaaatacgacgaagaaaatatgtttgccccaatggttgtttttcttgaaaaggacggctctgcggatgccctggtctgggccgccgggaatttgggcgttccggtgataaagaacatctcgcttgcgaaaaacattgcgtcccactgcaaagcgggggatgtcgtccccgaaacttcttacagggacgtttctttggcccttgtcaagctggattctaacaaattccaggggcggccgagggtatccggaaagggccgacacggccttccgataaaaattccccggcctctttcttttgaactgggagactcgcttttttccctaacaggggaagaacccggcagggatatgctccttgcccagccattaaatgccattcgaaagaagcttatccgtcttttgggaatttccctcccgcctttccgaatttcaaaaagcgataaactcaaaaatgatgaatacagaatcctctttaaggggtttgaagccggcagaggcaggctggaacttggatggtacccgaagagcccgcttgcggattcgaaggatacgcttgcgtatgcaggcgcgattcctgaaataatgaacaggccggagactatccgctctgcggcaaaatttgccgcttcatctttggtgcgccatgccgaggaaataattcaacagcgcgctccggaattgcttggccgggatgaggtagaagccatcctggacgcggcggaagagcagtaccctgttgttaccggggaagtaaaaagcctcctttcactgggcattatccgcgaaattctgcaaagcctcgtgagcgaacaggtgtccatccggcacatcgccgtcattctggaaaccctggccgactggggcagcttcgggcccgtcccaagcgacctgatcattgagcgcatacgccagtcccttagaagacaaatatgcatggagtatgccgacgacaggctgaatttacgggtacttactttggaacctaagctggaaaaaaagattactgaccactcgcaggacagccctcttttggaggactacacggaagcgattttaggagcggtgtgtgggatgaaggaaaaaggtttcccgcctgtgatcctctgttcgcccagagccaggtttcccgtgaaggaagcgaccagaaggcaattgccggaattggcggtgctttcttatcttgaaataccctcggatataagcgtggagccggtaggcgaaatacgcctcgaagaaagaggggaattgggaatagaaaacaggaggtag

SEQ ID NO: 33300 - protein, 458 aa, Unknown
  Obtained from environmental sample
  DOMAIN (7)...(438): FHIPEP family
  misc_feature (1)..(458): Xaa is any amino acid
MKNEDRFTPEAAASVFNSCIRFCNVIIAGKDAAIGLKYDEENMFAPMVVFLEKDGSADALVWAAGNLGVPVIKNISLAKNIASHCKAGDVVPETSYRDVSLALVKLDSNKFQGRPRVSGKGRHGLPIKIPRPLSFELGDSLFSLTGEEPGRDMLLAQPLNAIRKKLIRLLGISLPPFRISKSDKLKNDEYRILFKGFEAGRGRLELGWYPKSPLADSKDTLAYAGAIPEIMNRPETIRSAAKFAASSLVRHAEEIIQQRAPELLGRDEVEAILDAAEEQYPVVTGEVKSLLSLGIIREILQSLVSEQVSIRHIAVILETLADWGSFGPVPSDLIIERIRQSLRRQICMEYADDRLNLRVLTLEPKLEKKITDHSQDSPLLEDYTEAILGAVCGMKEKGFPPVILCSPRARFPVKEATRRQLPELAVLSYLEIPSDISVEPVGEIRLEERGELGIENRR

SEQ ID NO: 33301 - DNA, 510 bp, Unknown
  Obtained from environmental sample
  misc_feature (1)..(510): n is a, c, g, or t
atgggtgccagtagtaacggttgcgtgtcggtatccgccataggccaagactcgcaccgctttgaacccgacggttcgtcgaaaccgttgattctcggcggcgtgacgattccaaactgcgtgggtcttgaaggcaatagcgacgcggacgtcatcttgcacgccgtgacaaacgccgtctcgggagtttccggacaaaatattcttgggaaggttagtgacgacctatgccgagccggacagacagacagccgcgtatatctggaaaaagccgtagaaacgctatccgtaggtaaatggaaactgacgcacgtatcaatatcaatagaggccaaaagaccgcatttagcggattacatccccgcgattaaaaagtccgtagcgtcaatgctttcgctgcaagagaaagacgtcggtttgaccgcgaccaccggcgagggcctcaccgccttcgggcgaggggaggggattcaggcgctgattattgtgtcggcgtgtaggcttgaataa

SEQ ID NO: 33302 - protein, 169 aa, Unknown
  Obtained from environmental sample
  DOMAIN (14)...(168): YgbB family
  misc_feature (1)..(169): Xaa is any amino acid
MGASSNGCVSVSAIGQDSHRFEPDGSSKPLILGGVTIPNCVGLEGNSDADVILHAVTNAVSGVSGQNILGKVSDDLCRAGQTDSRVYLEKAVETLSVGKWKLTHVSISIEAKRPHLADYIPAIKKSVASMLSLQEKDVGLTATTGEGLTAFGRGEGIQALIIVSACRLE

SEQ ID NO: 33303 - DNA, 1032 bp, Unknown
  Obtained from environmental sample
  misc_feature (1)..(1032): n is a, c, g, or t
atggagttgacggaagcggaattgacgggaacgaattttttggaggctgagttagagagcgtggaattgaccccggcgcagcttgcttttttagaggcgtcgataccgaatttcgacattgccgagtggagcgccagattggccggccaggccgcctccgcgcgccgctttttcagggtgtcgaacgcaaagcagtcctacatcctcgtggagtgggacagcgcggacgaggactggccgcgctttctgggtatagaggcgtatctatcgccgtcagtcccgttcctgccgaagatacacgcgagcgatccgatccacggcctcatccttgaggaggatttgggcgacatcaccctgaagcggttttgcgttgaccacgccggcaacagcgctttaatagaggaggcctaccgcaaaataatcaacacccttattgtgtggcacgatcaagacgtcgcgaactgcccgtttatcgtacctcggtcaatggacgtcgagacgttcttttgggagacggcttacttcgcgcggcactgcgttgtggaattcttcgccgaagaacgtctgcttacagcggattgggagaaagagcggcgcaaaatagccgcgcacgcggccggcattcaaccgacggtctgcatacaccgcgattttcaatcggagaacattcttattgcaaatgacgggcatatcaagttcgtggactaccaaggcgcgcgcttagggccgccgcactacgacgccgcgtcgctgatttttgacccatacgtcaatctggggaaagacatgatggagcgtttagtggaatattacctgaccaaaacgggtaccgcctccgcaaaaaacgatttttacatctgcgccgcccagcggttaatgcaggcgctcggggcctacgccaacctatcccttcataaggacaaaccgcgctaccgcgaattcataccgaaagcgcttgagaggctgtattacataatggagttcctccccgattatccggcgataaagggggtcgttcatgggtgccagtag

SEQ ID NO: 33304 - protein, 343 aa, Unknown
  Obtained from environmental sample
  DOMAIN (44)...(285): Phosphotransferase enzyme family
  misc_feature (1)..(343): Xaa is any amino acid
MELTEAELTGTNFLEAELESVELTPAQLAFLEASIPNFDIAEWSARLAGQAASARRFFRVSNAKQSYILVEWDSADEDWPRFLGIEAYLSPSVPFLPKIHASDPIHGLILEEDLGDITLKRFCVDHAGNSALIEEAYRKIINTLIVWHDQDVANCPFIVPRSMDVETFFWETAYFARHCVVEFFAEERLLTADWEKERRKIAAHAAGIQPTVCIHRDFQSENILIANDGHIKFVDYQGARLGPPHYDAASLIFDPYVNLGKDMMERLVEYYLTKTGTASAKNDFYICAAQRLMQALGAYANLSLHKDKPRYREFIPKALERLYYIMEFLPDYPAIKGVVHGCQ

SEQ ID NO: 33305 - DNA, 540 bp, Unknown
  Obtained from environmental sample
  misc_feature (1)..(540): n is a, c, g, or t
ttgaaaaagcggagtacctttgcgcctttgaaaaagaagacacttattattttcccgtcgggcccttcggatattccacggtcaggcataaggcttcgcggtgaaactaaaacccttcctgacgggacagaaaaaaaagccgtttatgtgacgtacaagacaaaggaagtaagggacggtatagaaataaacgatgagaaggagtttgaggtatgctcttcccaaaacaataccgtcacggtttttgacgaattccttaaaatgatggggttaaggccgggttataccaaacaaaagagaggctgggcgtttttcaaagaagagataaacgcggaacttctggaagtagaaaaacttggctggttcttggaaatggagattgttgtgaatgatatcgagacttccggcggcaacgacaccactacaatagacgaaaaaagaaagcagcttatgggctttttttcagagctgggcataaaaaaagacgcgatagaaagccggtactattcggaaatgctgaaagagcgtgccggctcctag

SEQ ID NO: 33306 - protein, 179 aa, Unknown
  Obtained from environmental sample
  misc_feature (1)..(179): Xaa is any amino acid
MKKRSTFAPLKKKTLIIFPSGPSDIPRSGIRLRGETKTLPDGTEKKAVYVTYKTKEVRDGIEINDEKEFEVCSSQNNTVTVFDEFLKMMGLRPGYTKQKRGWAFFKEEINAELLEVEKLGWFLEMEIVVNDIETSGGNDTTTIDEKRKQLMGFFSELGIKKDAIESRYYSEMLKERAGS

SEQ ID NO: 33307 - DNA, 795 bp, Unknown
  Obtained from environmental sample
  misc_feature (1)..(795): n is a, c, g, or t
atgaaaataaacaaaaaaaatccacctcagtgcgagtgtgggccgttcccctttggggatgggcggcgtatctttgacatccggtatgacccggtattcaagaccgtattcaccagggacacggcggaagcaagagccgagttgtcagacctcatttcggcgcttatagggcgctctgtcacggtggaaaacctcacccccaacgagccggccgcttacgacagcaggcaacggtggctgcgtttcgacatagcctgcaaaacagaaaaagaagaaccggtaaacgttgaaatgtcgttcaaccccaaagccagcgaacctgtacgccttgagtactacgccacaaagttatttgtagggcaggacattctcgggcaagacaaaaggtatgatgatttgaaggaaacctatcaaatcgccattctggcaaaggaaaaattttttcccgatgaaaacttcgcgcacagtttcttatattatgatccggacaaccacgtctcgcttggcggaagaattcgaataatcaccgtagaacttgtaaagacggaaccggtagtgggtaaacttattgaagagatgactaacgcggaattatgggcagtgttttttcagtatttgacagatgaggagaaaaggggtataataatagagataatcaacagggagaaaggattcgcaatggctgtagaaacattggtaaacatcacccaggacgagatagaatacgcgcgaatgtgtaatctgataaagagccagcttgattatcaaaggcggaatggtagaagccaattgtga

SEQ ID NO: 33308 - protein, 264 aa, Unknown
  Obtained from environmental sample
  misc_feature (1)..(264): Xaa is any amino acid
MKINKKNPPQCECGPFPFGDGRRIFDIRYDPVFKTVFTRDTAEARAELSDLISALIGRSVTVENLTPNEPAAYDSRQRWLRFDIACKTEKEEPVNVEMSFNPKASEPVRLEYYATKLFVGQDILGQDKRYDDLKETYQIAILAKEKFFPDENFAHSFLYYDPDNHVSLGGRIRIITVELVKTEPVVGKLIEEMTNAELWAVFFQYLTDEEKRGIIIEIINREKGFAMAVETLVNITQDEIEYARMCNLIKSQLDYQRRNGRSQL

SEQ ID NO: 33309 - DNA, 804 bp, Unknown
  Obtained from environmental sample
  misc_feature (1)..(804): n is a, c, g, or t
atgacggccattgtgcttgataaaaatattaacgtgggtgatacggtagtcgattccgcgaacaacaattcaggcagtatttttaccattgccgaaaatctgcgcgagatgcagatagaggcgatgataggtgaacttgacatagcctcgatattcaaggggcaggaagttcgttttacgcttgagagtcttccaagcagaaaattttcaggcgttgtggaaacgctgaggatggttcccgtcgtgtcgaacggcgtggtttcgtatacggttattatcaacgtggaaaatcggggcggctccctcctgccgggaatgacatgcgccgtggactttatcgtggaacgaagcgagaacgcactccttgttcccaatgccgccctgcgttatcagcccacaagccttaacgctgaacaaatttccgatttggtatttaacgcaagtcttgaaaatatgacggaagaacaaaaacaagccgcccttgaggcaagggaaaaacaaaaacttgagtcttcacaaaagcaaaacaaccagggactttcacagattatgatgggtccccaacctcctgcgccgggacaacggggaggcagacagccttcaggtcagggaggtcagggaggtcagggaggacagcggcgtaatgcgcaggttgtagtttggcgtaacctttggtttgtcggcggggatggcaaacttgatgtggtgcaggtacgcacgggtataagcgacggttcgtcaactgaaataatcgtacccgatgattttgaaggcaggcagataattttaagggagaaaatttag

SEQ ID NO: 33310 - protein, 267 aa, Unknown
  Obtained from environmental sample
  misc_feature (1)..(267): Xaa is any amino acid
MTAIVLDKNINVGDTVVDSANNNSGSIFTIAENLREMQIEAMIGELDIASIFKGQEVRFTLESLPSRKFSGVVETLRMVPVVSNGVVSYTVIINVENRGGSLLPGMTCAVDFIVERSENALLVPNAALRYQPTSLNAEQISDLVFNASLENMTEEQKQAALEAREKQKLESSQKQNNQGLSQIMMGPQPPAPGQRGGRQPSGQGGQGGQGGQRRNAQVVVWRNLWFVGGDGKLDVVQVRTGISDGSSTEIIVPDDFEGRQIILREKI

SEQ ID NO: 33311 - DNA, 594 bp, Unknown
  Obtained from environmental sample
  misc_feature (1)..(594): n is a, c, g, or t
gtgtacaatagacgcacaatggaacaaaaagcggtaattccggcggataccggatgggttgagaaaagcgttagggagcttcacggctcgccggtacagcgtatagacgacgagtggatgctgattaccgcgggtaatgccgccgtggggcttggcaactggaacaccatgaccgcctcatggggcgctctgggcgaactctggaacaaggatgttgcttttatctttattcggccaggccgctatacccgcgcctttgtcgatgacaacccgctgtttacgctttctttttttggtgaaatgtaccacaatgcgcttaccttttgcggcgaaaaatcaggcagggattacaacaaagccgcagaaaccggattgactcccatagtctttggcggcggaatagctggtggcaagattgccggagcaatcgcttttcaggaagcgtccgaaattatagtgtgccgtaaaatccacgcgcaagatattgatccggcgtgttttatcgatccttcaatcacaggcaactatccgcaaaaagactaccaccgtatgtatgttggagaagcgctgacgttgcttgctgcaaaagagtaa

SEQ ID NO: 33312 - protein, 197 aa, Unknown
  Obtained from environmental sample
  misc_feature (1)..(197): Xaa is any amino acid
MYNRRTMEQKAVIPADTGWVEKSVRELHGSPVQRIDDEWMLITAGNAAVGLGNWNTMTASWGALGELWNKDVAFIFIRPGRYTRAFVDDNPLFTLSFFGEMYHNALTFCGEKSGRDYNKAAETGLTPIVFGGGIAGGKIAGAIAFQEASEIIVCRKIHAQDIDPACFIDPSITGNYPQKDYHRMYVGEALTLLAAKE

SEQ ID NO: 33313 - DNA, 1389 bp, Unknown
  Obtained from environmental sample
  misc_feature (1)..(1389): n is a, c, g, or t
atgcaaatttcctcatcctgccctgtcgggcgggacatagccttgcaagttgaatttaccaatagtacgaatgacaaatggcgttcagttttcaccctccatatatatccgcccagtcccgcgaacgtgaaggcggaagcgttatctgaaacaagcgtccgcgtttcatgggatcaggtcgcgaacgcgacaagctacaaggtgtacgactcagacggcgctttacttgccacggtgagcgacaggacgcaatatgaacattcaggactcagcgcgggaacggtgtacggctaccgcgtcggcgccattgtcaatgacgaggaaagcgccaaatcccgggcggtttcggcaaagacctgggaaaagcttgtattcaataaacagtacgatatcacggcaaacaatcccatttcatactactactaccggttttatgtgacaaacggcgcgaactataccttcgtttacggtatggcaattcaggccatgtatgaatcagacgatacgtcatggtttaatacaggctaccaaagcgccacaacacaaaccgcgaaacagacaggttgggcgtacatcaaagttatttcatacccgggatcatttacagtaaaacacccagaatcagggttaagcgcgttctccgttaacggttatgccggaaccatcagcgaggcggataaaacaattacggttaacgttccctgtagtacaaatctgaccgctcttacgccttcgcttacgcccgcttccggctggacatgcacgacaagcggggcgaagaattttaccggccctgtggaatacgtttttaccaaaggcgatgtcacccaggtttacaccgtaacggttgccgcggccattattgatgcagccgttatccggggccttaccgtaccggcaactaacggaactccggtaacaagtattaccgaaaacgcgcagtacaacggaaccgtaacctggtcgcctgaccactctaaattcgccgcttcgaccgtgtacacggcaactgttacactgtctccaaaaacaggctgtaccctgcaaggagtggaggctgacttctttacggtcgcgggggcaacatcggttagcaattccgcgaattcaggcgttatcagggcggtattcccgcagaccgacgcccaaacgccgcttggcaggtttgaatactactgggttgaccggcacggcagccttgttaccacatcaggcggtaaggttagtgtagtacccggagaaacactgactattaccgcgcaaagtgcaggttatactgtcaaagaatggcttttgaacggcgttgataccggccagagcgggaatgagtttatcttttcaagcacgagtatggggaaatccttcgtgccgctcggccattctgattaa

SEQ ID NO: 33314 - protein, 462 aa, Unknown
  Obtained from environmental sample
  DOMAIN (37)...(109): Fibronectin type III domain
  misc_feature (1)..(462): Xaa is any amino acid
MQISSSCPVGRDIALQVEFTNSTNDKWRSVFTLHIYPPSPANVKAEALSETSVRVSWDQVANATSYKVYDSDGALLATVSDRTQYEHSGLSAGTVYGYRVGAIVNDEESAKSRAVSAKTWEKLVFNKQYDITANNPISYYYYRFYVTNGANYTFVYGMAIQAMYESDDTSWFNTGYQSATTQTAKQTGWAYIKVISYPGSFTVKHPESGLSAFSVNGYAGTISEADKTITVNVPCSTNLTALTPSLTPASGWTCTTSGAKNFTGPVEYVFTKGDVTQVYTVTVAAAIIDAAVIRGLTVPATNGTPVTSITENAQYNGTVTWSPDHSKFAASTVYTATVTLSPKTGCTLQGVEADFFTVAGATSVSNSANSGVIRAVFPQTDAQTPLGRFEYYWVDRHGSLVTTSGGKVSVVPGETLTITAQSAGYTVKEWLLNGVDTGQSGNEFIFSSTSMGKSFVPLGHSD

SEQ ID NO: 33315 - DNA, 387 bp, Unknown
  Obtained from environmental sample
  misc_feature (1)..(387): n is a, c, g, or t
ttgccccggaggtattatgaaacttatgtttcatatatagggagcagaacatggttgaagcagcccataaattcaactttaaaaaagaaagacactgtccagatcatcgccgggaaagataagggcaagcgtggacgcatactcaagattttccgggacacagaccgcgttgtggtggaaggcgcaaatatcgtaaaaaaggcgaagaagcgccggaaccaacaggacaggggcggcataatcgaagttgaggcggcaattcactcgtccaatgtagccataatttgtagaaagtgcgggccgacccggattggttacaaaattgaggacgaaggttccaaaatgaataaaaccagaatttgcagaaaatgcggggaggcgctgtaa

SEQ ID NO: 33316 - protein, 128 aa, Unknown
  Obtained from environmental sample
  DOMAIN (27)...(60): KOW motif
  misc_feature (1)..(128): Xaa is any amino acid
MPRRYYETYVSYIGSRTWLKQPINSTLKKKDTVQIIAGKDKGKRGRILKIFRDTDRVVVEGANIVKKAKKRRNQQDRGGIIEVEAAIHSSNVAIICRKCGPTRIGYKIEDEGSKMNKTRICRKCGEAL

SEQ ID NO: 33317 - DNA, 372 bp, Unknown
  Obtained from environmental sample
  misc_feature (1)..(372): n is a, c, g, or t
atggttcaggtggaatctttcctgaatgtggcggacaattcaggagccaagttggttcagtgtatcaaagtgcttggcggtacaaagcgtaaatacgcgggtattggggatattattgtggttgccgtaaaggaagctctgcccacttcggttattaaaaaaggaaccgtagaaagggcggtggtagtcaggactcacaaagaataccgccgccccgacggaacctatatacggtttgatgacaatgcttgtgttataatagatgcggcgctaaaccccaaggggaagcgcatattcgggccggttgcccgggaattgcgggaaaagggtgattttatgaaaatcatttcgcttgccccggaggtattatga

SEQ ID NO: 33318 - protein, 123 aa, Unknown
  Obtained from environmental sample
  DOMAIN (1)...(123): Ribosomal protein L14p/L23e
  misc_feature (1)..(123): Xaa is any amino acid
MVQVESFLNVADNSGAKLVQCIKVLGGTKRKYAGIGDIIVVAVKEALPTSVIKKGTVERAVVVRTHKEYRRPDGTYIRFDDNACVIIDAALNPKGKRIFGPVARELREKGDFMKIISLAPEVL

SEQ ID NO: 33319 - DNA, 666 bp, Unknown
  Obtained from environmental sample
  misc_feature (1)..(666): n is a, c, g, or t
ttgtggcgtattgaaccgtctccgcttgatacgctctggcagacttccgacagcttcggcaacagcgcgctcgcggggcaaatcagcgtgccgcacagttatttccattttgagattgagggcgccgcagatgtgtccggcgaaccgtacacggcatcaggagagccgccgcgtatattgctctacccgacagagttgacccgcgcgcactccggtcttacggatttttacaatgacaccggccgttccgccccttcaagcgcgattgaccgtattcagcatttctcccgcgccgtccacaaccgccttcgctatgaacgcggcgcgacagaaaattcaacatctgcggcgcaggcatttgacgcgggcgcgggagtctgccaggattacgcgcaaatattgctcgccgttcttcgcttggataaagtcccctgccgatatgtcgccggtcttgcgtccgattacggcgaaacccacgcctgggtcgaagcgtggacaggggacagatactgcgccgtagatcccactcgcgataaacttgtagacgaaggctatatcgcgctttcaaggggacgcgactttgccggaagttcaatagaacgcggcgtattcaagggcgcatgcagaggaacgcaaaagataagtcttaacatggaaatttcctga

SEQ ID NO: 33320 - protein, 221 aa, Unknown
  Obtained from environmental sample
  DOMAIN (122)...(176): Transglutaminase-like superfamily
  misc_feature (1)..(221): Xaa is any amino acid
MWRIEPSPLDTLWQTSDSFGNSALAGQISVPHSYFHFEIEGAADVSGEPYTASGEPPRILLYPTELTRAHSGLTDFYNDTGRSAPSSAIDRIQHFSRAVHNRLRYERGATENSTSAAQAFDAGAGVCQDYAQILLAVLRLDKVPCRYVAGLASDYGETHAWVEAWTGDRYCAVDPTRDKLVDEGYIALSRGRDFAGSSIERGVFKGACRGTQKISLNMEIS

SEQ ID NO: 33321 - DNA, 675 bp, Unknown
  Obtained from environmental sample
  misc_feature (1)..(675): n is a, c, g, or t
ttgatcagattggccgagcggcaagaccttattcagcgggtagtgcaaaatgcccgtattccggtcatagaaaccggcgaaggcaactgccacatttatgtggaaccgagcgccgatatggacaaggcggtagaaataatagctaacgccaagctgcaaaagcccggcgcctgcaacgccgtggaaaccctgctggtacaccgggacgctcttgccgccttaatgcccccgctggctgtccgtcttgccggcaaagcggaactccgttgcgacgctgaatcgaaggcggctgttggagcggcggcaggcggcgggataacgctcaaagacgcaactgaggaagactgggccaccgaattccttgattttatcctcgcggtaaaaaccgttgattcctgcggcgaggctatcgcccacattaaccgctacggaaccaaacattcagaagcgatcctgaccaatgatttacagtcggcggaacaatttcgcgcgggggttgacgccgcctgcgtctacgtcaacgcttccacccgttttaccgacggcggcgaattcggctttggcgcggagctggggataagcacccaaaaattccatgcccgcggccccatggggctggaggcccttactacgatcaaatatctgatcagcggatcgggacaggtgcgggggtaa

SEQ ID NO: 33322 - protein, 224 aa, Unknown
  Obtained from environmental sample
  misc_feature (1)..(224): Xaa is any amino acid
MIRLAERQDLIQRVVQNARIPVIETGEGNCHIYVEPSADMDKAVEIIANAKLQKPGACNAVETLLVHRDALAALMPPLAVRLAGKAELRCDAESKAAVGAAAGGGITLKDATEEDWATEFLDFILAVKTVDSCGEAIAHINRYGTKHSEAILTNDLQSAEQFRAGVDAACVYVNASTRFTDGGEFGFGAELGISTQKFHARGPMGLEALTTIKYLISGSGQVRG

SEQ ID NO: 33323 - DNA, 660 bp, Unknown
  Obtained from environmental sample
  misc_feature (1)..(660): n is a, c, g, or t
atgactcaatatgaacaagtaattgatgctctaagaaaattagggcgatgggcaactttcaatgaaatttgtgaaaaactggattttaagcaatggggaaccgataccccaaaaaattctgtttatatgtatctcacatattattatataactaaaaaattgaaaaaaaatcctattaaaagtaaaaaagatggtaataaatcctattatatgcttgatgaaattattggagaaaatgataatggaaaagactatactgatgatgagaattatgaatttgcttatgaaaaagatttacaaaattttttggctaaaaatcttcaattgattgaacctggattaaaattatttgaagaaaatggtattactggaattgaatatccagcaggaaaccgtctcattgatattttggcagtggacaaaaataatgattttgttgtaattgaattgaaagcctccaaaggctatgatcgtgtagtaggtcaaatattgcgttatatcggttgggttgaacaaaaaatggcttctgatggacaaaaagtcagaggaattattatctgcaaggaaatatccgaagatttaacactggcttgttccaaaataaaagaaattgaattatttgaatatgaactatcggtaaagttgaataggattaagtga

SEQ ID NO: 33324 - protein, 219 aa, Unknown
  Obtained from environmental sample
  misc_feature (1)..(219): Xaa is any amino acid
MTQYEQVIDALRKLGRWATFNEICEKLDFKQWGTDTPKNSVYMYLTYYYITKKLKKNPIKSKKDGNKSYYMLDEIIGENDNGKDYTDDENYEFAYEKDLQNFLAKNLQLIEPGLKLFEENGITGIEYPAGNRLIDILAVDKNNDFVVIELKASKGYDRVVGQILRYIGWVEQKMASDGQKVRGIIICKEISEDLTLACSKIKEIELFEYELSVKLNRIK

SEQ ID NO: 33325 - DNA, 792 bp, Unknown
  Obtained from environmental sample
  misc_feature (1)..(792): n is a, c, g, or t
ttggataaacgggcgttttttattcagggtgattctttgcttttaccggttaatactccggattctcaaattgagtcgggacttttatttgaattatcaaaatattttaagaatcccgatatttttgacgcgcctgaattggacaactcttccgagatgatttccgtagtgtccgtcccccctacagccgttccgcccgaaaattggaaaactatttccgtccgcaatattctctccatgttcagcgtgtcgggcggcaaccccaatcgtattatccgcgcctgtcatattgcgcaatggagatggaattcgcgcttctgcggaacttgcggcgcgaaaaatgaggatgtcccaatgcagacgcagagaatctgccccaagtgcggacggacagagttcccaagaatctgccccgctgttatcgtccttattaccgatgataaaaacagaattctgcttgcgcataacaaaagatttaaagcgagggtttacagccatatttccggttttaacgaggcgggagaaacactggaagaaactgtagtcagagaaatacgcgaagaagtagatatcgaagtaaaagacattgtttatattaaatcccagccttggccgtttccaagctcattgatgcttggttttaaagcgcgttattcatcggggacgataaagcccgacggagacgaaatagaagacgcaaaatggtttacaaaagacgatctgcccgatttgcccggagaaggttctctttcgcgtcatcttatcaataactggcttaatggaaatatataa

SEQ ID NO: 33326 - protein, 263 aa, Unknown
  Obtained from environmental sample
  DOMAIN (136)...(257): NUDIX domain
  misc_feature (1)..(263): Xaa is any amino acid
MDKRAFFIQGDSLLLPVNTPDSQIESGLLFELSKYFKNPDIFDAPELDNSSEMISVVSVPPTAVPPENWKTISVRNILSMFSVSGGNPNRIIRACHIAQWRWNSRFCGTCGAKNEDVPMQTQRICPKCGRTEFPRICPAVIVLITDDKNRILLAHNKRFKARVYSHISGFNEAGETLEETVVREIREEVDIEVKDIVYIKSQPWPFPSSLMLGFKARYSSGTIKPDGDEIEDAKWFTKDDLPDLPGEGSLSRHLINNWLNGNI

SEQ ID NO: 33327 - DNA, 807 bp, Unknown
  Obtained from environmental sample
  misc_feature (1)..(807): n is a, c, g, or t
atgattcacctgacatggaacacgggcaatttttccaagctggaaggggtgtttattccaaactttgcaagccatcgttttgtggataaagggaggtggaggcccgctcagtatgacaccatgacagacaatttcatgaatagaaccccattagttattttaaatcgggcggttgatcgattctcctcctttattcctaaagaaacaatatcatccatgtttcaatcgttcgacaccggttcttcggatttttcaatgccgccctttcctgatacttcaaccctttataacttccaatcagggctgcgctataccaccacaattggccccgttgatctaggcgcccagtatttctatggcagccttttcaatccggcagtagttattcccaccagaaacattgacgcttttttggatgatgtaataggccagtttacttcgagtccccccggtacgccgcttaatccaaataccgctttacttattcctctaataaaatacaaccgctatcaccagattggcattgactatgcccaggtgcttttcggccttaacctgcgcgcggaattcgccgtattcctgactaaagacatgaaaggcaatgacggttccgtacagaaccccttcatcagctggtcggttggctttgacagggatctgccctggggaatctacgccaatgtgcaatgcaacgagactatacgcctttttaacggcaaggtaggtgataaccccgttctggattgtgaagcgggcgccaaaattacatccacgcgcattacggcgcagctttcaaaaaatacctga

SEQ ID NO: 33328 - protein, 268 aa, Unknown
  Obtained from environmental sample
  misc_feature (1)..(268): Xaa is any amino acid
MIHLTWNTGNFSKLEGVFIPNFASHRFVDKGRWRPAQYDTMTDNFMNRTPLVILNRAVDRFSSFIPKETISSMFQSFDTGSSDFSMPPFPDTSTLYNFQSGLRYTTTIGPVDLGAQYFYGSLFNPAVVIPTRNIDAFLDDVIGQFTSSPPGTPLNPNTALLIPLIKYNRYHQIGIDYAQVLFGLNLRAEFAVFLTKDMKGNDGSVQNPFISWSVGFDRDLPWGIYANVQCNETIRLFNGKVGDNPVLDCEAGAKITSTRITAQLSKNT

SEQ ID NO: 33329 - DNA, 843 bp, Unknown
  Obtained from environmental sample
  misc_feature (1)..(843): n is a, c, g, or t
atgatcgaactttttaacaccggagcgtatttgttacagggaacgcggatcatcagagatgatggcgcggatcaccctgaactgaagggcgtctcaaaagacgaagcccgcaaagggactattgcttacgggattttggcgggtcatgacatttcacattgtgaacaggagaacctcaggctcaaatttgattcgcttacgtcccatgacattacatacgtcggcattatacagacggcgagggcgagcggcatggaaaaatttccggtgccatgggttatgactaactgccataacagcctttgcgcggtgggcgggaccataaatcaggacgaccatgtgttcgccctgagcgcggcgaaaaagtacggggggatatatgtgcctccccacctcgcggtgatacatacctataaccgcgagatgatggcgggctgcggcaaaatgatacttggatcggacagccatacgcgctacggcgcgctgggaaccctggcggtaggcgagggcggcggcgaattggcgaaacagcttgtgggcaggacatatgatatagcccggccccaggttgtcgcggtttatttgaccggtgaacctgccgcgggggtcgggccccatgatgtcgccctggccattatcgcggcggtatttaaaaacggttatgtgaaaaacaaagtaatggaatttgtcggggacggcgcaggaaaaatttcggtggatttccgcaacggtattgacgtaatgaccaccgagacaacctgctggtcgtcgatctggaagacggataccagtgtcagggattaccttgagatcaggggcagggaaggggactaccgcgaataa

SEQ ID NO: 33330 - protein, 280 aa, Unknown
  Obtained from environmental sample
  misc_feature (1)..(280): Xaa is any amino acid
MIELFNTGAYLLQGTRIIRDDGADHPELKGVSKDEARKGTIAYGILAGHDISHCEQENLRLKFDSLTSHDITYVGIIQTARASGMEKFPVPWVMTNCHNSLCAVGGTINQDDHVFALSAAKKYGGIYVPPHLAVIHTYNREMMAGCGKMILGSDSHTRYGALGTLAVGEGGGELAKQLVGRTYDIARPQVVAVYLTGEPAAGVGPHDVALAIIAAVFKNGYVKNKVMEFVGDGAGKISVDFRNGIDVMTTETTCWSSIWKTDTSVRDYLEIRGREGDYRE

SEQ ID NO: 33331 - DNA, 921 bp, Unknown
  Obtained from environmental sample
  misc_feature (1)..(921): n is a, c, g, or t
atggccgagcggccgagggcggaatttgcgcaggaggcggaggctgtcgcggctgaccttaggcttgcgcttcagatacagatagaaaaggtaaggataattaaccgctatttcgcggaagggatttccgacggggactttgacgccgctaaaagcgccattttttctgagccgcccgtcgatattgtttatgaagaactgcccgatttgcggggcgcgcttgtttttgctgttgaatttttgccgggacagtttgaccagcgcgcagattcatgcgcacagtgcatatcgcttgcgacaggaaaagaaaggccgttaattcattcgtcaaagatttacgctttgtacggaaatattaccgatgatgaactgaaaaaaataaaaacatggcttataaaccctgttgaaagccgcgaagcgtcattggaaaaaccgcttacgctccttcaaaaatacagcaagcctgaagatgtaaaaaccatcgaaggatttatttccctttcaggacttaagcttgatgaattgcgcgtaacaatgaatttggctatggatacgcaggatattcttttttgtcaggaatatttccgcgataaggaaaaacgcgatccgtctgttactgaaatccgcgtgcttgacacatactggtcggatcactgccgccatacaacttttttaactaagttggacgaagtaaatatcgaagacgacgcgttacgtgaaagttataaaaattatcttgaaacaagggcttttacagggcgagacaaaaagcccgtaacattgatggatatggccactataggcgcaaaagtattaaaaaaacgcggtttattgccggatttggacgaatctgaggaaattaacgcctgttccgtgaaattaaggcggacgcggacggagttgatcaggattggcttttaa

SEQ ID NO: 33332 - protein, 306 aa, Unknown
  Obtained from environmental sample
  misc_feature (1)..(306): Xaa is any amino acid
MAERPRAEFAQEAEAVAADLRLALQIQIEKVRIINRYFAEGISDGDFDAAKSAIFSEPPVDIVYEELPDLRGALVFAVEFLPGQFDQRADSCAQCISLATGKERPLIHSSKIYALYGNITDDELKKIKTWLINPVESREASLEKPLTLLQKYSKPEDVKTIEGFISLSGLKLDELRVTMNLAMDTQDILFCQEYFRDKEKRDPSVTEIRVLDTYWSDHCRHTTFLTKLDEVNIEDDALRESYKNYLETRAFTGRDKKPVTLMDMATIGAKVLKKRGLLPDLDESEEINACSVKLRRTRTELIRIGF

SEQ ID NO: 33333 - DNA, 1605 bp, Unknown
  Obtained from environmental sample
  misc_feature (1)..(1605): n is a, c, g, or t
atggaggacaaaatgaaaagaagagcgcttgtcagcgtgttttacaaagacggaattctggaattggcttcatatctgaatggagcagggtgggagattctttcaaccggcggtacttcaaagtatttaaaggaaaataatattcctgtaaccgacgtttcctcggtgacgggttatcccgaatgtcttgacggcagggtaaagaccctgcaccccgcaatccacgccggcctgctggcccgcagggatgaacaaagtcatatggatacgctccaggcgctggggcttggaaccatcgatcttgtttccgtcaacctgtacccgttttttaaaaaggtacaggcaaagctgactcttgaacagactgttgagtttatcgacataggcgggccgaccatgcttcgttctgccgcgaaaaattatcacgatgtcattgtccttacagaccccgccgattacgccgaaacgataaacggcctgaaacagggaaatgtccctcttgaattcaaaaaacggcttgccggtaaagtcttcaatttgacctccgcttatgacgccgccgtttcccgctatcttctggaagatgaatacccggagtactggcctctgtctctgaaaaaagggcaaagcctccgttacggcggagaacggccatcagtcaggcgcgctttatttgcataccgaccggcccggtgtttttggcggcatggtaaacttcacggcaaggagcttggctacaacaatatcagggatctggatctggcctggaaagcagcctgcgccttcggacttccggcggacggcgcatcgcacagagatgcgacagaaccccttggcgaggctgaggtcagaaaatttattccgcaggccgcgggcagcggcaaggtatgctgtgtcgcggtgaagcacaacacgccctgcggaatagccctgggaaacaccctgctggaagcctttcaaaaaacattcgcttgcgatccggtttcgatattcgggggcatagtggcaagtaccgcgaaagttgacgttgcaacggcaacaaagcttggcgaactttttctggaggttgtggcggctccggactttgagccgcaggcgctggaaatacttatgcagaaaaaaaatctccgcataataaaacttttaaaagcccctgttgaagctcacgaatacgtcgcggttgacggtggtcttttggttcagcaaagcgaccgcaggcttcttgaaaaatgggaggtcgtgacaaaagccgcgcccgccgtcggagacctgagggacatgatcttcggcatgagggccgtaacctttgtaaagtcgaacgcgataatgattgtcaaagacgaggccgcgacgggaataggcggagggcaggtaaaccggatatggccgacaacgcagtcgctggaaaggagcgccgaaattacaagggacgggcccgccagggtgcttgcttccgacgcgtttttcccctttgccgatgttgtggaagccgcggcggcggccaacattaaagcgataatccagccgggcggctcggttaacgacaaactgtcaattgaggcctgcgacaagcacggcatagcgatggtctaccctcgtccataa

SEQ ID NO: 33334 - protein, 534 aa, Unknown
  Obtained from environmental sample
  DOMAIN (18)...(132): MGS-like domain
  misc_feature (1)..(534): Xaa is any amino acid
MEDKMKRRALVSVFYKDGILELASYLNGAGWEILSTGGTSKYLKENNIPVTDVSSVTGYPECLDGRVKTLHPAIHAGLLARRDEQSHMDTLQALGLGTIDLVSVNLYPFFKKVQAKLTLEQTVEFIDIGGPTMLRSAAKNYHDVIVLTDPADYAETINGLKQGNVPLEFKKRLAGKVFNLTSAYDAAVSRYLLEDEYPEYWPLSLKKGQSLRYGGERPSVRRALFAYRPARCFWRHGKLHGKELGYNNIRDLDLAWKAACAFGLPADGASHRDATEPLGEAEVRKFIPQAAGSGKVCCVAVKHNTPCGIALGNTLLEAFQKTFACDPVSIFGGIVASTAKVDVATATKLGELFLEVVAAPDFEPQALEILMQKKNLRIIKLLKAPVEAHEYVAVDGGLLVQQSDRRLLEKWEVVTKAAPAVGDLRDMIFGMRAVTFVKSNAIMIVKDEAATGIGGGQVNRIWPTTQSLERSAEITRDGPARVLASDAFFPFADVVEAAAAANIKAIIQPGGSVNDKLSIEACDKHGIAMVYPRP

SEQ ID NO: 33335 - DNA, 501 bp, Unknown
  Obtained from environmental sample
  misc_feature (1)..(501): n is a, c, g, or t
ttgcccttttttcagagacagaggccagtactccgggtattcatcttccagaagatagcgggaaacggcggcgtcataagcggaggtcaaattgaagactttaccggcaagccgttttttgaattcaagagggacatttccctgtttcaggccgtttatcgtttcggcgtaatcggcggggtctgtaaggacaatgacatcgtgataatttttcgcggcagaacgaagcatggtcggcccgcctatgtcgataaactcaacagtctgttcaagagtcagctttgcctgtacctttttaaaaaacgggtacaggttgacggaaacaagatcgatggttccaagccccagcgcctggagcgtatccatatgactttgttcatccctgcgggccagcaggccggcgtggattgcggggtgcagggtctttaccctgccgtcaagacattcgggataacccgtcaccgaggaaacgtcggttacaggaatattattttcctttaa

SEQ ID NO: 33336 - protein, 166 aa, Unknown
  Obtained from environmental sample
  misc_feature (1)..(166): Xaa is any amino acid
MPFFQRQRPVLRVFIFQKIAGNGGVISGGQIEDFTGKPFFEFKRDISLFQAVYRFGVIGGVCKDNDIVIIFRGRTKHGRPAYVDKLNSLFKSQLCLYLFKKRVQVDGNKIDGSKPQRLERIHMTLFIPAGQQAGVDCGVQGLYPAVKTFGITRHRGNVGYRNIIFL

SEQ ID NO: 33337 - DNA, 720 bp, Unknown
  Obtained from environmental sample
  misc_feature (1)..(720): n is a, c, g, or t
gtgatggatctgccgatagcgattctggccggcggactggcgacgcgcatgcggccgatgacggaaagcgtgcccaaatcgctgttgccggtgacgggtgagccttttatccggcatcaactgcgtctcttggttcacaagggctgcaagcatgtggtgctttgcacgggctacctgggcgagcagatccgggcggaagtcggagatggcgccgactatggcctgcaagtggactattccacggactggccggatttgctgggtaccggcggcgcgctgaaaaaggctctgccgcttttgggttcggcatttttggtgctttatggggacagttacctggacattgcctatgcggacgcggaagagtattttctgcgttcgcgcaagcaaggtctcatgacggtgtatcgtaacaataatcagtatgatgtcagcaatgtcgttttccggcagggggaaattttcgcctatgacaaaaaacaacgtacgccggagatggaatacattgattacggcctaggcgcgctgaaagcttccgtccttgccgcttggccggagcgggcctttgatctggcggatgtctatacaagcttggcgaaggaacgacaactggccggcttggaggcgtttgagcgtttttatgaaatcgggtccgttgccgggctggatgatctggcgcgcaagctgtccgtcaatgccggcaaagcacaggcggaatag

SEQ ID NO: 33338 - protein, 239 aa, Unknown
  Obtained from environmental sample
  DOMAIN (4)...(232): Nucleotidyl transferase
  misc_feature (1)..(239): Xaa is any amino acid
MMDLPIAILAGGLATRMRPMTESVPKSLLPVTGEPFIRHQLRLLVHKGCKHVVLCTGYLGEQIRAEVGDGADYGLQVDYSTDWPDLLGTGGALKKALPLLGSAFLVLYGDSYLDIAYADAEEYFLRSRKQGLMTVYRNNNQYDVSNVVFRQGEIFAYDKKQRTPEMEYIDYGLGALKASVLAAWPERAFDLADVYTSLAKERQLAGLEAFERFYEIGSVAGLDDLARKLSVNAGKAQAE

SEQ ID NO: 33339 - DNA, 768 bp, Unknown
  Obtained from environmental sample
  misc_feature (1)..(768): n is a, c, g, or t
atgcggatttccaaagccgaggccgcgcacatagtgcggcaggcaattggtcttggaataaatttcatcgacactgccacaggttacgccgacagcgaagaaaagatcggggaagcaattaaaggaatgaaaagggaagaccttgtcattgcgtcaaaatccccggcaaaagacaaaaaaactttcacggaaaatttggatctgagcctgaaacggcttggaatagattacatcgatatttaccagctccacaatgtaagctccgaaccccaaaaagaagcagtgtttggcccggacggcgcgatggcggggctggaagaagcggtaaaagcaggcaaagtgcggttcccggctttttccagccacagtatctctatggcaattgagatcatgaagagcgagaaattcgccgccgttcagcttccattcaactacatcgacacagaagcggctgaaaaggcaatcccgctggcgaaggaactcgacatgggctttatcgccatgaagccgatgggcggcggccttcttaacgacgcggcgctttccttccggttttttgggcaatacgaaaacattgttcccgatcctggctttgaaaaaattgaagaagtccgggaaattgtgggaattttagaaaaaaaagaagctctcagcgccggggacgaaaaagaaattgaaaggcagcgccttgagttaggcccaagttggtgccatcgctgcgattactgccagccctgtccacagggcattcatatcagcacggcgtaa

SEQ ID NO: 33340 - protein, 255 aa, Unknown
  Obtained from environmental sample
  DOMAIN (1)...(230): Aldo/keto reductase family
  misc_feature (1)..(255): Xaa is any amino acid
MRISKAEAAHIVRQAIGLGINFIDTATGYADSEEKIGEAIKGMKREDLVIASKSPAKDKKTFTENLDLSLKRLGIDYIDIYQLHNVSSEPQKEAVFGPDGAMAGLEEAVKAGKVRFPAFSSHSISMAIEIMKSEKFAAVQLPFNYIDTEAAEKAIPLAKELDMGFIAMKPMGGGLLNDAALSFRFFGQYENIVPDPGFEKIEEVREIVGILEKKEALSAGDEKEIERQRLELGPSWCHRCDYCQPCPQGIHISTA

SEQ ID NO: 33341 - DNA, 816 bp, Unknown
  Obtained from environmental sample
  misc_feature (1)..(816): n is a, c, g, or t
atgccgaaagtaacaattgaagatcgtcatctgtattttgaaaagataaaaccttataaagccatgattgagtcccttataacgcgggaagaaaaaattttattggaaatcagaaaagatgaccggggagcggcgttaaaacggctggctttggtggaagatatgctttctttagccgccaattttatgataatcagcggtatttcacagtccatgctgaagctgcgcagtgaggaagccctgaatgacagcagaaaatctctttacaaagcggtaatctactttgaagaaattgtaagcccgctggtggacgcgccattttcggattatgaagaccgcctcgctgaaattgacgctatagacgctcaacagcggtataacctgataagaaaaacgggccttaccctgcagctccttgaatccgcctatggggacaatacaaaatggagatggacctttgttgatcttgaaggccggtttgccgctgttgccaaaaatactatgaacctgaaaacagccgtggtaaatacggatccgagttcaccggactatgagcccacgatgtttcatttaaggctgataaaaaagctccttatgcaggccgctgaccgttaccgtgaaaaatacgaattatccaccaaccggatggatgattttaaaatggggataaactttctcaatgctctgcgccgcattcacgcgcttttaggggaacggcctgatgccgaaatggtcaagaaaaaggcggaaatttggtcttcaaaactggaaacggatcaaaagaagaaggacgaagcggttagcaggaaaatataa

SEQ ID NO: 33342 - protein, 271 aa, Unknown
  Obtained from environmental sample
  misc_feature (1)..(271): Xaa is any amino acid
MPKVTIEDRHLYFEKIKPYKAMIESLITREEKILLEIRKDDRGAALKRLALVEDMLSLAANFMIISGISQSMLKLRSEEALNDSRKSLYKAVIYFEEIVSPLVDAPFSDYEDRLAEIDAIDAQQRYNLIRKTGLTLQLLESAYGDNTKWRWTFVDLEGRFAAVAKNTMNLKTAVVNTDPSSPDYEPTMFHLRLIKKLLMQAADRYREKYELSTNRMDDFKMGINFLNALRRIHALLGERPDAEMVKKKAEIWSSKLETDQKKKDEAVSRKI

SEQ ID NO: 33343 - DNA, 1089 bp, Unknown
  Obtained from environmental sample
  misc_feature (1)..(1089): n is a, c, g, or t
ttgggcggcggcgatcccgaggagcgcaagctgaaactccggggaccggatgttatttccacggtgctgatgctgggcttgcagggttcaggaaaaaccaccagttccgccaaactcgccctgcgcctgaaaaaagaaggccgcaagcccctgctggtcgcctgcgacctgatacgccccgcagcgatggaacagcttgccgtgcttggcaagcaaatcggcgtgccggttcaccgtgaggaaggagcgacggacagcgccgcagtgtacaggaacgctcttgcatgggcaaagcaaaatctgattgacaccctgattattgacaccacgggccgcctgcagatcgacgaaaccatgatggcggaactttcccggttgaaagaagccgtacagcccgatgaaatgctcctggtcgccgactcgatgacgggccagtccgccgttgacatagcaaaaacctttgacgaaaaaatcggcctaacgggcgtggttctgaccaagttcgattctgacacgcggggcggcgcggcgctttcccttaaaaccattaccggcaagccccttaaatttacgggaaccggggagaagcccgaagactttgagcccttccatccggagcgcatggcggggcgcatcctgggcatgggcgacgttgtaagcctggtggaaaaagcccaggaggtaatcgaccagaaagaggccctggaactccagaaaaaaatggagaaggaaaactttactcttgaggactggcttaaccaactccgctcggtaaagaaaatgggctccctccagtcaatgctggaaatgatccccggaatgcaggggcagataagcgaagacgacattgacagagcgaacctgaagcgccaggaggccatcatctcatccatgacccgcaaggaacgcgccaaccatctgatcataggccccccgcgccgcagccgcatagccaaaggttccggcacctcggtagcggaagtctcccgccttcttaaacaattcgagaagatgcgcgtcatgatgaaaaaaatggctaaaatgggaaagaatcccgcccagttcacgcaaatgatgaacaaaaggtaa

SEQ ID NO: 33344 - protein, 362 aa, Unknown
  Obtained from environmental sample
  DOMAIN (245)...(342): Signal peptide binding domain
  misc_feature (1)..(362): Xaa is any amino acid
MGGGDPEERKLKLRGPDVISTVLMLGLQGSGKTTSSAKLALRLKKEGRKPLLVACDLIRPAAMEQLAVLGKQIGVPVHREEGATDSAAVYRNALAWAKQNLIDTLIIDTTGRLQIDETMMAELSRLKEAVQPDEMLLVADSMTGQSAVDIAKTFDEKIGLTGVVLTKFDSDTRGGAALSLKTITGKPLKFTGTGEKPEDFEPFHPERMAGRILGMGDVVSLVEKAQEVIDQKEALELQKKMEKENFTLEDWLNQLRSVKKMGSLQSMLEMIPGMQGQISEDDIDRANLKRQEAIISSMTRKERANHLIIGPPRRSRIAKGSGTSVAEVSRLLKQFEKMRVMMKKMAKMGKNPAQFTQMMNKR

SEQ ID NO: 33345 - DNA, 852 bp, Unknown
  Obtained from environmental sample
  misc_feature (1)..(852): n is a, c, g, or t
ttgttcatcatttgcgtgaactgggcgggattctttcccattttagccatttttttcatcatgacgcgcatcttctcgaattgtttaagaaggcgggagacttccgctaccgaggtgccggaacctttggctatgcggctgcggcgcggggggcctatgatcagatggttggcgcgttccttgcgggtcatggatgagatgatggcctcctggcgcttcaggttcgctctgtcaatgtcgtcttcgcttatctgcccctgcattccggggatcatttccagcattgactggagggagcccattttctttaccgagcggagttggttaagccagtcctcaagagtaaagttttccttctccatttttttctggagttccagggcctctttctggtcgattacctcctgggctttttccaccaggcttacaacgtcgcccatgcccaggatgcgccccgccatgcgctccggatggaagggctcaaagtcttcgggcttctccccggttcccgtaaatttaaggggcttgccggtaatggttttaagggaaagcgccgcgccgccccgcgtgtcagaatcgaacttggtcagaaccacgcccgttaggccgattttttcgtcaaaggtttttgctatgtcaacggcggactggcccgtcatcgagtcggcgaccaggagcatttcatcgggctgtacggcttctttcaaccgggaaagttccgccatcatggtttcgtcgatctgcaggcggcccgtggtgtcaataatcagggtgtcaatcagattttgctttgcccatgcaagagcgttcctgtacactgcggcgctgtccgtcgctccttcctcacggtga

SEQ ID NO: 33346 - protein, 283 aa, Unknown
  Obtained from environmental sample
  misc_feature (1)..(283): Xaa is any amino acid
MFIICVNWAGFFPILAIFFIMTRIFSNCLRRRETSATEVPEPLAMRLRRGGPMIRWLARSLRVMDEMMASWRFRFALSMSSSLICPCIPGIISSIDWREPIFFTERSWLSQSSRVKFSFSIFFWSSRASFWSITSWAFSTRLTTSPMPRMRPAMRSGWKGSKSSGFSPVPVNLRGLPVMVLRESAAPPRVSESNLVRTTPVRPIFSSKVFAMSTADWPVIESATRSISSGCTASFNRESSAIMVSSICRRPVVSIIRVSIRFCFAHARAFLYTAALSVAPSSR

SEQ ID NO: 33347 - DNA, 972 bp, Unknown
  Obtained from environmental sample
  misc_feature (1)..(972): n is a, c, g, or t
gtgacaagtgctaatgtaccagtaatagccgtgtcagcgggcaatagtcattcgatggcacttaagtccgatggcagcatgtggacgtggggactggattacttgaatctcagcaatggtactggtgtattatatgccccagcccaagttagtacatcgaaggactgggcggccgtgtcggctggcagttgccatactatggccatcaaggcggacggcagcctgtgggcgtggggatacaatttaaatggccagcttggcgatggtaccacaacaggccgtgcccttatccaagttggcacatcgaaggactggaaggccgtatctgcgggtactaattacactgtggccatcaaggcggatggtagcctatgggcttggggacaaaatgatgatggccaactcggcgatggcaccaatacagaccggaacaccccagtccaagttggcatatctaaagattgggcagccgtgtcggctggcaatggccatactatggccatcaaggcggacggcagcctgtgggcgtgggggaagaataagtccaatcagctaggcgatggtacctatacaaatcgaaacgtacccacccaaattgggacaacgaaggattggaaagtcgtgtcggctggcaatggccatactatggcactcaagaccgatagcagcctttgggcatggggatggaatgaattcggccaactcggcgatggcacaaatacagatcggaacacccccgttatggtagtcagggtgagcgccgcccccgttaatgactgctgggtggcgatatcggcatcggcgagcagccacgcgcttgccattaaggcagacggaagcctatgggcatggggagccaatggttatggcggtgcgctcggaatcgactcaagccgcgccgagagcaatcgcgcgacacccgatcttgtaggtcaggggaggtggtacggcaattggaacaactggtattga

SEQ ID NO: 33348 - protein, 323 aa, Unknown
  Obtained from environmental sample
  SIGNAL (1)...(20)
  DOMAIN (171)...(218): Regulator of chromosome condensation (RCC1)
  misc_feature (1)..(323): Xaa is any amino acid
MTSANVPVIAVSAGNSHSMALKSDGSMWTWGLDYLNLSNGTGVLYAPAQVSTSKDWAAVSAGSCHTMAIKADGSLWAWGYNLNGQLGDGTTTGRALIQVGTSKDWKAVSAGTNYTVAIKADGSLWAWGQNDDGQLGDGTNTDRNTPVQVGISKDWAAVSAGNGHTMAIKADGSLWAWGKNKSNQLGDGTYTNRNVPTQIGTTKDWKVVSAGNGHTMALKTDSSLWAWGWNEFGQLGDGTNTDRNTPVMVVRVSAAPVNDCWVAISASASSHALAIKADGSLWAWGANGYGGALGIDSSRAESNRATPDLVGQGRWYGNWNNWY

SEQ ID NO: 33349 - DNA, 408 bp, Unknown
  Obtained from environmental sample
  misc_feature (1)..(408): n is a, c, g, or t
ttgaacgtcccatcgcgcataggcttcgtgaacatcacgcagcaagtccagcaggcactcaaagcgtcaggcattaaagagggcctttgcctagtcaacgccatgcacataaccgcaagcgtattcatcaacgacaacgagggcgggctgcacaaggactatgagcgctggctggagcagttggctccctacaacccgggcagcgacccggcgaggggcggctacctgcacaaccgcacgggcgaagacaacggcgatgcccaccacaaacggcagataatgggcagggaagtggtcgtggcgataacggatggcagtttgcactttgggccttgggagcagatattctatggcgagttcgatgggcggcgcgacaagcggatactgataaagataattggtgaatga

SEQ ID NO: 33350 - protein, 135 aa, Unknown
  Obtained from environmental sample
  DOMAIN (9)...(133): Uncharacterised protein family UPF0047
  misc_feature (1)..(135): Xaa is any amino acid
MNVPSRIGFVNITQQVQQALKASGIKEGLCLVNAMHITASVFINDNEGGLHKDYERWLEQLAPYNPGSDPARGGYLHNRTGEDNGDAHHKRQIMGREVVVAITDGSLHFGPWEQIFYGEFDGRRDKRILIKIIGE

SEQ ID NO: 33351 - DNA, 396 bp, Unknown
  Obtained from environmental sample
  misc_feature (1)..(396): n is a, c, g, or t
atgaaacgtgtggccgacataattgccgaagaactggcggctttggggctgaaggatgtctttatgatcaccggcggcggggccatgcaccttaatgacgcctttgggcgcggccgcaagttcaatatttttttcaaccaccatgaacaggcttcggccatggcggcggaaagttatgcccgcttaagcggccggccggcagtactcaatgtaaccaccggcccgggcggcctcaacgccttaaacggagtttacggggcctatgtggattccctgcccatggtggtcgtttccggccaaatcaagcgccaaaccctggcccgtaactttccctggcccctgcgtcaactggggcgaccgggaagtggatattcatctccatgggcaggcccataa

SEQ ID NO: 33352 - protein, 131 aa, Unknown
  Obtained from environmental sample
  DOMAIN (2)...(128): Thiamine pyrophosphate enzyme, N-terminal TPP binding domain
  misc_feature (1)..(131): Xaa is any amino acid
MKRVADIIAEELAALGLKDVFMITGGGAMHLNDAFGRGRKFNIFFNHHEQASAMAAESYARLSGRPAVLNVTTGPGGLNALNGVYGAYVDSLPMVVVSGQIKRQTLARNFPWPLRQLGRPGSGYSSPWAGP

SEQ ID NO: 33353 - DNA, 621 bp, Unknown
  Obtained from environmental sample
  misc_feature (1)..(621): n is a, c, g, or t
ttgattgaaaaataccgcgaatgcgcctttcctattaccattgtccgtcccagccacacttacgatgaaagaaatgtcccgctcggagttcacggcaaaaagggaagctggcaagtattaaaaagaatgatagaaggcaaacctgttatcatacacggagacggcacaagcctttggacaattacacataacagcgattttgccggcgcttttttgcggctaatgggaaatatacacgccataggggaagccgtgcatataacttcggacgaaagcgtaacatggaaccaaatctacatggtaatagcggatacgcttaatgttgaactaaaagccgtacatatagcaagtgattttctcgatgaatgttcgggcggcatttatgattttaggggaagtctgacaggggacaaggcaaactccgttatttttgataatacaaagttaaaacgccttgcgcccggtttctgcgcaacggtacgtatggacgaaggtatcagaatgacaatcgccaacattcttgcacacactgaatgncagcaggagnacgcggaattcgaccaatggtgcgacaaagttatcgccgcagtccgcgccgcaaagaacgctntcagtcaatga

SEQ ID NO: 33354 - protein, 206 aa, Unknown
  Obtained from environmental sample
  misc_feature (1)..(206): Xaa is any amino acid
MIEKYRECAFPITIVRPSHTYDERNVPLGVHGKKGSWQVLKRMIEGKPVIIHGDGTSLWTITHNSDFAGAFLRLMGNIHAIGEAVHITSDESVTWNQIYMVIADTLNVELKAVHIASDFLDECSGGIYDFRGSLTGDKANSVIFDNTKLKRLAPGFCATVRMDEGIRMTIANILAHTEXQQEXAEFDQWCDKVIAAVRAAKNAXSQ

SEQ ID NO: 33355 - DNA, 960 bp, Unknown
  Obtained from environmental sample
  misc_feature (1)..(960): n is a, c, g, or t
ttgccgatgaaagaaaaagccgcttatgaccagttcggctttgctggcgttgacaatataggcggccaaacccatgactggagcaatttccggggctttgaggatatttttggtggcggcgactttggcagtatttttgacagcctttttggcaactttggcggcggcggcttccgcaggagcggcggccagagcggggtaaggcagggctcagacctccgatacgaccttgatatcgctttcaaggatgcggtttttggcaccaaggaagaaatccagtttttccataatgaatcttgccaagcctgcaagggctccggggccgccaaaggcgcggaaagaaaaacatgtcctacttgccagggttccggacagatacggcatacccaaagttttttctcggtagcatctacctgtcccagctgcagagggcaaggctttatcattgaaaggccctgcccggaatgcggcggctccggcacccagaagaaacggataaaaatcgcagtgacaattcccccaggagttgaaaacggaaggagattggttattccccgtcaaggcgacgcgggccaaaacggcggcccggcaggcgatctgtatgtgataatccggataaaaccccatgaatattttgagcggcatgactttgacctttactgcgcggttccaatctcggtaacccaggcggccttaggcgcggaaatccgtgtcagtacccttgacggcaagacaataaaggtaaaagtgccccccggaactcagaacggtaaaatgctccgcatccgcgacgagggcgtgccttcgggtagccaccggggaaatctctacatcaaactgattgtccgcataccggataaactttcccgccgcggcaaggagctgctggaagaactgtcccgcatcgaaggcgaaaatgacagccccggaccagtccccctttcgcagttaagcgagtaa

SEQ ID NO: 33356 - protein, 319 aa, Unknown
  Obtained from environmental sample
  DOMAIN (87)...(167): DnaJ central domain (4 repeats)
  misc_feature (1)..(319): Xaa is any amino acid
MPMKEKAAYDQFGFAGVDNIGGQTHDWSNFRGFEDIFGGGDFGSIFDSLFGNFGGGGFRRSGGQSGVRQGSDLRYDLDIAFKDAVFGTKEEIQFFHNESCQACKGSGAAKGAERKTCPTCQGSGQIRHTQSFFSVASTCPSCRGQGFIIERPCPECGGSGTQKKRIKIAVTIPPGVENGRRLVIPRQGDAGQNGGPAGDLYVIIRIKPHEYFERHDFDLYCAVPISVTQAALGAEIRVSTLDGKTIKVKVPPGTQNGKMLRIRDEGVPSGSHRGNLYIKLIVRIPDKLSRRGKELLEELSRIEGENDSPGPVPLSQLSE

SEQ ID NO: 33357 - DNA, 618 bp, Unknown
  Obtained from environmental sample
  misc_feature (1)..(618): n is a, c, g, or t
ttggagagcatttccatggatatgtgggacccgtatataaaagcggtacgggcggctgttcccgaagcggatcagaagatagcgtttgaccggtttcacgtgagcaagcatataaacgaggcgctggataaagtaaggcagaaggaacaccgggcgttcatggaacaggcgggagaaagtccgttaagcaaaagccggttccaatggctgacaaactcaaacaggactgacaacagaagcgggaagcggaaagcattcatgagtctgtcacggctcaatctgaagacggcgagggcgtggaggataaaggaggccgccaacagcctgtgggaatatgtgtacatgaatgtagcacaggaggcgtggaagaagctgctgtggtggataagccactgccggataccagaaatgatccaggccggcaagaccatacaaaattatttctggggaattctaaatgcaatacgacttagggtaacaaacggaatgctcgaggccaagaacaacagcatccagcagattaaacgaatggcgtgtggatttagaaatccgcaaagattcaaaaacgctatcctatttcaccttgggaatttagaccttctcccttccaccacatag

SEQ ID NO: 33358 - protein, 205 aa, Unknown
  Obtained from environmental sample
  DOMAIN (1)...(49): Transposase
  misc_feature (1)..(205): Xaa is any amino acid
MESISMDMWDPYIKAVRAAVPEADQKIAFDRFHVSKHINEALDKVRQKEHRAFMEQAGESPLSKSRFQWLTNSNRTDNRSGKRKAFMSLSRLNLKTARAWRIKEAANSLWEYVYMNVAQEAWKKLLWWISHCRIPEMIQAGKTIQNYFWGILNAIRLRVTNGMLEAKNNSIQQIKRMACGFRNPQRFKNAILFHLGNLDLLPSTT

SEQ ID NO: 33359 - DNA, 1110 bp, Unknown
  Obtained from environmental sample
  misc_feature (1)..(1110): n is a, c, g, or t
atggcgcgaatgcgtaataccgaaggaatgaacgagagggtatgctctttttgcggaaaaagcaccgatatggcccgcaggcttatagcggggccgaacaaggtgtttatctgcgatgagtgtgtcgaggtctgccgcaagatactgacggacgaagaccatgaaataaccagccagttcaccggggacatacccacgcctgttgaaatcaaactgtaccttgaccagtttgtgattggccaggacgcggccaaaaaagccctgtccgtcgccgtttacaatcactacaaaagaatcgcgaacccttcaaaagaaagcgaagaagttgaaattgaaaaatccaacgttctgttaatcggtcctacgggaaccggcaaaacattactcgcgaaaatattggcgaagaaattaaaagttccgtttgccattgtggacgccacaactcttacggaagccggatatgtcggcgaagacgtggagaacattcttcttaaactgatacagagcgcgggcggcaatatctccgccgcggaaagaggaattgtttatatcgatgaaatcgacaaaattgcgcgcaagggagaaaatatttccattacacgcgacgtttcaggcgagggcgttcaacaggcgcttttaaaaataattgaggggactgttgcctctgttccgccgcagggaggcagaaaacatcctaatcaggaaatgatacggattgacaccacaaatattctttttatttgcggcggagcttttgtaggactggataaattaatcgctcagcgcgttgttaaccacccgctgggctttggctccgagacatacggcggagaaaaatctttaagggaactttacgacgccctgcatccggacgatttaatccgtttcggcatgattcctgaatttatcgggaggcttcccattaccgtcggtcttgaagaattaagactcgaagatttaaaacgcatcatcacggagccgcgcaacgctattgtacgccagtatcaggcgtctttggcttatgataatgtaaaacttgagtttacagaaaaagcaatcgacgcgatagcggacaaggcgattaagcaaaaaacaggcgcgcgcggttaa

SEQ ID NO: 33360 - protein, 369 aa, Unknown
  Obtained from environmental sample
  DOMAIN (115)...(333): ATPase family associated with various cellular activities (AAA)
  misc_feature (1)..(369): Xaa is any amino acid
MARMRNTEGMNERVCSFCGKSTDMARRLIAGPNKVFICDECVEVCRKILTDEDHEITSQFTGDIPTPVEIKLYLDQFVIGQDAAKKALSVAVYNHYKRIANPSKESEEVEIEKSNVLLIGPTGTGKTLLAKILAKKLKVPFAIVDATTLTEAGYVGEDVENILLKLIQSAGGNISAAERGIVYIDEIDKIARKGENISITRDVSGEGVQQALLKIIEGTVASVPPQGGRKHPNQEMIRIDTTNILFICGGAFVGLDKLIAQRVVNHPLGFGSETYGGEKSLRELYDALHPDDLIRFGMIPEFIGRLPITVGLEELRLEDLKRIITEPRNAIVRQYQASLAYDNVKLEFTEKAIDAIADKAIKQKTGARG

SEQ ID NO: 33361 - DNA, 615 bp, Unknown
  Obtained from environmental sample
  misc_feature (1)..(615): n is a, c, g, or t
gtggatttcgatacagtaaacgcctcgaacataaaccgccaggttcaggctacaagcagtactatcgggctcttaaaggttgaagtcctgaaacagcgtttactggaaatcaacccgggctgtgaagtgtccgtttgggcaaaaaaattctcccgtgaaaccgccgccgatttcggcatagaaaaagcggactacgctattgacgccattgacacatttccccataaacttgatttgattgaattctttttcaacgcgggagttacctttttttcatcaatgggtatggcgcttaaaattgatcctacacgcataaaaaccggcagtatatgggaatccgggggctgtgcgctggcgaggctggtgcggcagggtctgcgtaaacggggctttaacggcaattttaccgtggtatacagcgatgaaccgccgattaacgccgaacagaacccttcgggcagcaaccccgttgggcaaagcatagacaaaggcgacatggcaggaaaaaaaagaataaacggcagttgcgtcactgttaccgctccggcgggaatgacgctggcaagcctagtgttacgcgacattatcggtcaattttctatggagaagcgatga

SEQ ID NO: 33362 - protein, 204 aa, Unknown
  Obtained from environmental sample
  DOMAIN (1)...(105): ThiF family
  misc_feature (1)..(204): Xaa is any amino acid
MDFDTVNASNINRQVQATSSTIGLLKVEVLKQRLLEINPGCEVSVWAKKFSRETAADFGIEKADYAIDAIDTFPHKLDLIEFFFNAGVTFFSSMGMALKIDPTRIKTGSIWESGGCALARLVRQGLRKRGFNGNFTVVYSDEPPINAEQNPSGSNPVGQSIDKGDMAGKKRINGSCVTVTAPAGMTLASLVLRDIIGQFSMEKR

SEQ ID NO: 33363 - DNA, 477 bp, Unknown
  Obtained from environmental sample
  misc_feature (1)..(477): n is a, c, g, or t
ttgcgtcactgttaccgctccggcgggaatgacgctggcaagcctagtgttacgcgacattatcggtcaattttctatggagaagcgatgagccacaggtttatgcgaaggacaagtccgacagccgtaatacagagattaacaataaaagccgtattggaacggaaattgatctgcgaaggtgacaggatacttatagcggtatcgggcggtaaggattcgactgtgcttgcctgggcgctttcttcgatacgccccgcggtaaaggcaaactacgaactttccgcgattcacatatccaccgatttttgttcatgctgcaaaaaaccggtactttcgcggaggcttgaagaatggggcataccctttcacgacatctttgtgcctgtcatcggcagattaaaagaaggcgaaaaaatgaactgctactggtgtttccacacagcgccgcgcagagttgctaaagtacgcagttga

SEQ ID NO: 33364 - protein, 158 aa, Unknown
  Obtained from environmental sample
  misc_feature (1)..(158): Xaa is any amino acid
MRHCYRSGGNDAGKPSVTRHYRSIFYGEAMSHRFMRRTSPTAVIQRLTIKAVLERKLICEGDRILIAVSGGKDSTVLAWALSSIRPAVKANYELSAIHISTDFCSCCKKPVLSRRLEEWGIPFHDIFVPVIGRLKEGEKMNCYWCFHTAPRRVAKVRS

SEQ ID NO: 33365 - DNA, 372 bp, Unknown
  Obtained from environmental sample
  misc_feature (1)..(372): n is a, c, g, or t
ttgctaaagtacgcagttgaaaatggttttaacaaaattgccctggggcatcatcttgacgacattatcgaaacttttttcatgaacctttgcgccaaagccgagatcagcaccatgcccattttactcaagtaccgcaaattccctatcagccttatccgcccgcttgcgtacatcgaagaaaggcaggtcatagcatgcgccgacgcgcagaacatcctcaaggcggcctgcacctgcccctacggagtcaactccaagcgccgcgacatgcgccagcgcataacggctttgaccggaaactcaggcgcggttaagcggcgtatactcaaagcgctggcaaacggggagcgggacttcttaacggagtga

SEQ ID NO: 33366 - protein, 123 aa, Unknown
  Obtained from environmental sample
  misc_feature (1)..(123): Xaa is any amino acid
MLKYAVENGFNKIALGHHLDDIIETFFMNLCAKAEISTMPILLKYRKFPISLIRPLAYIEERQVIACADAQNILKAACTCPYGVNSKRRDMRQRITALTGNSGAVKRRILKALANGERDFLTE

SEQ ID NO: 33367 - DNA, 891 bp, Unknown
  Obtained from environmental sample
  misc_feature (1)..(891): n is a, c, g, or t
atgattgcatcgtcgataaccgctaacagttacatccgggatattgtaaaccatccagcgttcatgggtttcggcgaacgcatgctgccctgtgatgataattccgcctattacgatacccgaattaccgatgttgcctcgcttatgccgtatcatcaaaacgtgaaccctgccgttgttgtgaacgcgctcaattacatgattaaagaagtgcgagacggcaaaactattttctacgatttttatacggaacagcaaaagaaggcggaccccgctaaaacacacaccggtcttttcttttttaggggaaagcccggcgcgccttttgccattgtgtgtcccggcggcggttttgcatacgtcggatcgctccacgaaggtttccccctcgcgttggcgataagtaaaaaagggtataacgcttttgtaatcaggtaccagataggcggagaacgctttgcctgtgaggatttagcggcggcgattgccttcatctttaccaattcccggacacttgaagtaaagacggaaaactactccctttggggcggctcggcgggagggcgaatggcagcacgactttcttctaacggaaccgcgttttatggtgaaaaggattatccaaaaccggcagtggcgatcttattttataccggaagttcagattttactgtaaataacccgccgactttcgccgttttaggcgagatggacaatatcgcaaatccggcaattatggaacagcgcgttaatgacatgaaagccgtaggcattgacgctgaattttacctgtacccgaatgtcgggcatggttttgggcttggcgttggcacttttgcggaaggctggcttaacaacgccgtgaggttttggaaaaaacacataaaataa

SEQ ID NO: 33368 - protein, 296 aa, Unknown
  Obtained from environmental sample
  DOMAIN (126)...(287): Prolyl oligopeptidase family
  misc_feature (1)..(296): Xaa is any amino acid
MIASSITANSYIRDIVNHPAFMGFGERMLPCDDNSAYYDTRITDVASLMPYHQNVNPAVVVNALNYMIKEVRDGKTIFYDFYTEQQKKADPAKTHTGLFFFRGKPGAPFAIVCPGGGFAYVGSLHEGFPLALAISKKGYNAFVIRYQIGGERFACEDLAAAIAFIFTNSRTLEVKTENYSLWGGSAGGRMAARLSSNGTAFYGEKDYPKPAVAILFYTGSSDFTVNNPPTFAVLGEMDNIANPAIMEQRVNDMKAVGIDAEFYLYPNVGHGFGLGVGTFAEGWLNNAVRFWKKHIK

SEQ ID NO: 33369 - DNA, 468 bp, Unknown
  Obtained from environmental sample
  misc_feature (1)..(468): n is a, c, g, or t
gtgtttgtgcctgaggtgctgatagcggccagagccttaaacaagggtactgaggcgttaaagccgaggctcattgaagcaggcgtcaagccaatcggcaaagtagttatctgcaccgtaaagggcgatctgcatgacatcggtaaaaatctggtgcgcatgatgcttgaaggggccggtttcgaggtcatagacctcggcgttgatgtggacgaaaacaaaattattgaagccgtcaaacaacatcagccccaggtactgtgcctgtcagctttgcttacgacgacaatgagccagcaaggcgtggtaatcgaagccctaaaaacttccggtttgcgcgacaaggtcaaagtaatggttggcggcgcaccggttacccaaagcttttgcgaatcgatccacgctgatgcctatagcccggacgcggcaagcgcggcggaaaccgcaaaggcgtttgtcgtagcctaa

SEQ ID NO: 33370 - protein, 155 aa, Unknown
  Obtained from environmental sample
  DOMAIN (33)...(151): B12 binding domain
  misc_feature (1)..(155): Xaa is any amino acid
MFVPEVLIAARALNKGTEALKPRLIEAGVKPIGKVVICTVKGDLHDIGKNLVRMMLEGAGFEVIDLGVDVDENKIIEAVKQHQPQVLCLSALLTTTMSQQGVVIEALKTSGLRDKVKVMVGGAPVTQSFCESIHADAYSPDAASAAETAKAFVVA

SEQ ID NO: 33371 - DNA, 975 bp, Unknown
  Obtained from environmental sample
  misc_feature (1)..(975): n is a, c, g, or t
ttgcagcaatttccgcgagatacgttttatcttgccacgaaaatgcccggccacatgatgcagtatgaagacggtgtgtaccggtttatcgggcttcttgctaataatgaacctcgttctcctcaggaactttttgaggaacaacttgaaaaatgccgtgttgattattttgatttctaccttttgcataacttaagtgaaacggcctgggatttctatactaacgatgaaattggtgtggtggattatttattgaaagagaaacaagcggggcgtatccgtcatcttggcatatcagcccacggcagagccgatacaattgacaaatttctatccaaatatgattgctttgagtttgttcagattcagcttaattacctggattggactttacaaaacgctggcaaaaaatatgaggttattacaaaacacgacctgccggttattacgatggagtcatgccgcggagggcggctcgtatcccttagccctgaagctaatgcattgcttaaggccgcacggccaaacgattcaatagtttcctgggcgtttcgctttcttcaatcacttccaaatattccggttatcttaagcggcatgactactcttgaacagttaaaagaaaatattgagctattttccagagaagacccgacaacagatcaggaaaaggagttactccaaaaggctatcaagacaatggcagatatagttccgtgtaccgcctgcgcttattgtaccgaagcctgtccacagaaactgaacatacccaaacttatctcgatgtataatgaaatgcgttttaacaccgagacgtttattgtgagaaactttactctcaaggctatgacagaaaaggaactgccttccgcctgtattgcttgcggggcttgtagtaagctctgtccgcaaggtatagatatcccttctgtactgaaacggttttcagatacgctgaagaaacaattatcttag

SEQ ID NO: 33372 - protein, 324 aa, Unknown
  Obtained from environmental sample
  DOMAIN (285)...(308): 4Fe-4S binding domain
  misc_feature (1)..(324): Xaa is any amino acid
MQQFPRDTFYLATKMPGHMMQYEDGVYRFIGLLANNEPRSPQELFEEQLEKCRVDYFDFYLLHNLSETAWDFYTNDEIGVVDYLLKEKQAGRIRHLGISAHGRADTIDKFLSKYDCFEFVQIQLNYLDWTLQNAGKKYEVITKHDLPVITMESCRGGRLVSLSPEANALLKAARPNDSIVSWAFRFLQSLPNIPVILSGMTTLEQLKENIELFSREDPTTDQEKELLQKAIKTMADIVPCTACAYCTEACPQKLNIPKLISMYNEMRFNTETFIVRNFTLKAMTEKELPSACIACGACSKLCPQGIDIPSVLKRFSDTLKKQLS

SEQ ID NO: 33373 - DNA, 1218 bp, Unknown
  Obtained from environmental sample
  misc_feature (1)..(1218): n is a, c, g, or t
atggaatttatcgaaaaaaccctcagtcaggtactgcgcgataaaacacaggctcaccccgatcatgattttcttgtttattcggatcgcaatcttcatttcacttatgcccaatttgacaaaagggtggacgatcttgcgaaaggttttcttgctatgggcgtaaaaaaaggcgacaatgtggggatttgggcgacaaatgtacctgactggaacacggtgctttttgcctgcgcgagaatcggcgccgtacttgttacgataaatacaggttataaaacccacgagcttgaatatgtgttaaaacaatccgacatggtctgcctgtgcctgacaaacggctggcgcgattccgactatataggcatggtaaacgaacttgtgccggaattaaaaacttcgcaaagggggcatatcaattccgaaaaattccccttcttaaaatacgtcgtccatgtgggacagcagaaacacaggggcatgtacagttttaacgaagttctgcttttaggacagcataccgatcccgcgctgttaagcgaaattgagaaaacgcttgataccaacgatgtcgtaaatatgcagtacacttcaggcactacgggctttcccaagggcgtaatgcttactcacagaaatatcctaaataacgggcttggcataggcgacaaccagcggcttaccgaaaaagacatcgtgtgccttcccgtgccgctgttccactgtttcggccttgttcttggaatgatggcaatccttacccacggttccaccgccgcgatgatagagtggttcgatcctttgcttgtactggctaccattcaaaaggaaaaatgcaccgcggtttacggagtccctacaatgtttatcgcggagcttaaccaccccatgtttaaaatgttcgatctttcaagccttcgcaccggcatcatggcgggatctccctgtccaatagaggcgatgcgccgtgtaatcgatcttatgttcatgaaggaagttacgatttgctatgggcttacggaatcgtcgcccgttatgacccagacgcgcttcgatgacgatataaccgtaaaagtggaaaccgtaggcagagccctgccaggcgttgaggtgactatccgcgacccggaaacaggcgaagaatgtcccgacggcgaacacggggaattctgctgccggggctacaattcaatgctcgtgccgctcggccaattctga

SEQ ID NO: 33374 - protein, 405 aa, Unknown
  Obtained from environmental sample
  DOMAIN (35)...(405): AMP-binding enzyme
  misc_feature (1)..(405): Xaa is any amino acid
MEFIEKTLSQVLRDKTQAHPDHDFLVYSDRNLHFTYAQFDKRVDDLAKGFLAMGVKKGDNVGIWATNVPDWNTVLFACARIGAVLVTINTGYKTHELEYVLKQSDMVCLCLTNGWRDSDYIGMVNELVPELKTSQRGHINSEKFPFLKYVVHVGQQKHRGMYSFNEVLLLGQHTDPALLSEIEKTLDTNDVVNMQYTSGTTGFPKGVMLTHRNILNNGLGIGDNQRLTEKDIVCLPVPLFHCFGLVLGMMAILTHGSTAAMIEWFDPLLVLATIQKEKCTAVYGVPTMFIAELNHPMFKMFDLSSLRTGIMAGSPCPIEAMRRVIDLMFMKEVTICYGLTESSPVMTQTRFDDDITVKVETVGRALPGVEVTIRDPETGEECPDGEHGEFCCRGYNSMLVPLGQF

SEQ ID NO: 33375 - DNA, 693 bp, Unknown
  Obtained from environmental sample
  misc_feature (1)..(693): n is a, c, g, or t
atgggttatgtatatcaagaagtttcacgccatatatataccatagggcttgtaaaaaaccaaccctcttgttacagtaaccacatgcacatggtatgtctcgatcttgaaggggttctggttcccgagatatggattgccttttccgaggcgacggggataccggaattacggcgtacaaccagggatgaacctgattacgacaagctcatgcgtttccggcttgatctgcttgaaaaaaacaaccttaaactccatgacatccagcgggtcatttcaggcatggatcctctgcccggcgcggttgaatttaccaacgcgctgcgggaacgcgcccaagtagtaatcttgtccgatacctttgaacaattcgcaaaaccgctgatggcgaagcttggctggccgtgtttactgtgcaacagcctggaaattgatccccagggaaaagtaaccggatacaggctgcgccaaaagaacggaaagaaagaagctgtaaaagcgttcaaatcgcttaacataaaagtctttgccgccggggattcttttaacgatcttgccatgatccgcgaggccgattcgggctgcctgttccgcgcccccgaagcaatccgcaaagactgcgccgacatcccctgtgtggacacctttaatgatttgcttgcttacgcaagcaaatcattaaatagcaaatag

SEQ ID NO: 33376 - protein, 230 aa, Unknown
  Obtained from environmental sample
  DOMAIN (29)...(201): haloacid dehalogenase-like hydrolase
  misc_feature (1)..(230): Xaa is any amino acid
MGYVYQEVSRHIYTIGLVKNQPSCYSNHMHMVCLDLEGVLVPEIWIAFSEATGIPELRRTTRDEPDYDKLMRFRLDLLEKNNLKLHDIQRVISGMDPLPGAVEFTNALRERAQVVILSDTFEQFAKPLMAKLGWPCLLCNSLEIDPQGKVTGYRLRQKNGKKEAVKAFKSLNIKVFAAGDSFNDLAMIREADSGCLFRAPEAIRKDCADIPCVDTFNDLLAYASKSLNSK

SEQ ID NO: 33377 - DNA, 984 bp, Unknown
  Obtained from environmental sample
  misc_feature (1)..(984): n is a, c, g, or t
ttgtacgccgtaattccggtatccccgtcgcctcggaaaaggcaatccatatctcgggaaccagaaccccttcaagatcgagacataccatgtgcatgtggttactgtaacaagagggttggttttttacaagccctatggtatatatatggcgtgaaacttcttgatatacataacccattaaacgcgcccgttantcacgaagaaacggtaagcagtaccatggaagtttcaaagcttcttgcgcaaaacaacgcgcctcacggaactgtgatcgcggccgattttcaggaagcggggaggggaagaatacgcgaacgccgctgggaaatggaaaagggaagcgccctggcctttacaattttactgcgttttaatggatgcgacaatgccgttggtaatgccaacggcattgctttccctacggctctagggttgagggctggacttgctgtaactcttgccatagaagaattcgccccaacgcttaagggcaagactctgatcaaatggccaaacgacatactgtttccggcgttatcatcagacggcaaaccgtcaattttgaaggccgccggcatccttaccgaaggggagggcggcaacgtgcatataggcataggtgtaaatgtttcgcaaaaacaaatgcctgtatttttacgcgataaagcgacaagcatcagccttgcggcctgtacggactacgacagcggggacagattcatccttctggaaaaaattctttcacagttacgcgatgaaattgaaaacgccaaaggcgtagatgactggcgtgaacgaacagaagcgcgtttgtacaaaaaaggcgcacaagtatgtttcgccaaaggcgcggcggattcaagcgatctgttaacaggcgtctttgcgggtataggccatgagggagaattgctgattgtgccgatgggagggaataaacctctggcgtttacctcaggcgaaatgctgtacgaaagatga

SEQ ID NO: 33378 - protein, 327 aa, Unknown
  Obtained from environmental sample
  DOMAIN (65)...(178): Biotin/lipoate A/B protein ligase family
  misc_feature (1)..(327): Xaa is any amino acid
MYAVIPVSPSPRKRQSISREPEPLQDRDIPCACGYCNKRVGFLQALWYIYGVKLLDIHNPLNAPVXHEETVSSTMEVSKLLAQNNAPHGTVIAADFQEAGRGRIRERRWEMEKGSALAFTILLRFNGCDNAVGNANGIAFPTALGLRAGLAVTLAIEEFAPTLKGKTLIKWPNDILFPALSSDGKPSILKAAGILTEGEGGNVHIGIGVNVSQKQMPVFLRDKATSISLAACTDYDSGDRFILLEKILSQLRDEIENAKGVDDWRERTEARLYKKGAQVCFAKGAADSSDLLTGVFAGIGHEGELLIVPMGGNKPLAFTSGEMLYER

SEQ ID NO: 33379 - DNA, 1338 bp, Unknown
  Obtained from environmental sample
  misc_feature (1)..(1338): n is a, c, g, or t
gtgatttccgataacgccgatgactttctgggaagactttccgacaaggttttctcttatgcctttgtttcagaaccaatgctggaaaaagcgcagacgatatcaaaagagaataccattcaaacagttttggtactgctgctggaaatcgggaaaaaagccccggaaaacgttatggttttatccatgcccgcgtatgccgttcctgtggctaatgtacttaacggcaagggaattgtacagcaggaagtaaaaagtgccggcgcgaattttaccgcgccttcggcgcggcttttggtggtggacgatattcagcctaatctcgtcgtggcggaggggctattatcgtcatttaagtcgcggatagacctttgttccagcggggccagagccctggaacttgtcaaggaacagcattacgaccttgtttttatggatcacatgatgccggaaatggacggcattgagacggtaaaacatatccgtcaatgggaaaaggaagaacaaaaaagagaagccgacaggcttcggattgtcgcccttacagctaacgccgtctcaggcatgaaggaaatgtttctgaatgaaggtttcgacgattttcttgccaagccgattgagactttaaggcttaaggaaattatgaaaaactggattccctcggaaaagcaaatagaaaaggaagaggatagtgtaataattgataacaaggagggaatagtggaacagcctgatatttttaaagatattgccattgatggtattgatctgaagaaagggcaggaaacgttcccggaaaataaatatctggatgttcttcgcgcctggtgcatgcatactccggcgttattggaaaagctgcgaagtctgaccgctggacccctaggggatgatgatataggggaatataccattgcggttcacgggcttaaaggctcgtcttacgggatatgcgctcaaggcatcgggaaaaaagcggaagccctggaagccgcgtcccgccggaaggatattgaatttgttaaggcaaataacaaaatattattggaagaagccggcgctatgcatcaaaaacttgaagaattgctggcaagcgccgcggaacactcgacggcgaagccaggcgccaagtcgccggatcccgaattgctcaggcagcttcttgacgcgtgcaaacagttcaaatccagcctcatggaggaaattcttgagaaaatagacgcgttcaaatatgaatcaggcggagacatggtacagtggctgcgcgaacaaatggacaaccttgaatacgacgcaatggagcagcgcctaacggaagagttaggaactaaggcataa

SEQ ID NO: 33380 - protein, 445 aa, Unknown
  Obtained from environmental sample
  DOMAIN (96)...(216): Response regulator receiver domain
  misc_feature (1)..(445): Xaa is any amino acid
MISDNADDFLGRLSDKVFSYAFVSEPMLEKAQTISKENTIQTVLVLLLEIGKKAPENVMVLSMPAYAVPVANVLNGKGIVQQEVKSAGANFTAPSARLLVVDDIQPNLVVAEGLLSSFKSRIDLCSSGARALELVKEQHYDLVFMDHMMPEMDGIETVKHIRQWEKEEQKREADRLRIVALTANAVSGMKEMFLNEGFDDFLAKPIETLRLKEIMKNWIPSEKQIEKEEDSVIIDNKEGIVEQPDIFKDIAIDGIDLKKGQETFPENKYLDVLRAWCMHTPALLEKLRSLTAGPLGDDDIGEYTIAVHGLKGSSYGICAQGIGKKAEALEAASRRKDIEFVKANNKILLEEAGAMHQKLEELLASAAEHSTAKPGAKSPDPELLRQLLDACKQFKSSLMEEILEKIDAFKYESGGDMVQWLREQMDNLEYDAMEQRLTEELGTKA

SEQ ID NO: 33381 - DNA, 1218 bp, Unknown
  Obtained from environmental sample
  misc_feature (1)..(1218): n is a, c, g, or t
atgttcggcgaattaaccgtaggcttgcttaccgattccgctatcgcgtcgcataaacgcctgccctatttaacctatgaacagagaaaagacgttatcgaaaatatcaagggtgtcgcgcgggtaatcccgcaggaagaatggagttatgtgcctaacttgcgaaaattaaaacctgactacataattcatggagacgactggaaaagcggcgctctcaaaaaagaacgcgatgaagtttttgcggtaatgaaagaactcggcggtgaagttattgagattccctataccgcagggattaattcatcatcaatcaatgaggcgatacgttccattggaacaacgccggacattcggctcaaaacactgcgcagacttcttgagacaaaacatcttgtaagaattatggaagcgcattccggtttatccggtttaataatagaaaatcttgagatcgaaaaagaagacggtctgcacagttttgacggaatgtggtcgtcaagtttaaccgattcaacaagcaagggaaaacccgatattgaagcggttgatcttactacccgcctgcatgatttgacgaatattctggaatgtacgacaaagccgataatttttgacggcgataccggcggtcatcattttgccttcaccgtaaaaacccttgaacgaaacggcatatctgcggtcattatagaagacaagaccggccttaaaagaaattcgctttttggaaccgatgtaaatcaggaattatgccctattccggatttctgcggcaaaatcaaagccggtaaacaggcgcaggttacaaaagaatttatgattatcgcgcgtcttgaaagtttgattgccggttttccggtttcccacgcgcttgaaagggcgcgtgcttttgtcgaagcgggtgcggacggcattatgatacacagcaaagaaaagacgggcgaggatattaagcaattttgctcgcttttccgcgccgaatatcctcatataccgctggtgctggttccgacaacgtataaccagtttacagaaaaagaactcgcctcatggggtgcgaatatcgttatatacgcaaaccatatgctccgttcagcgtatcccgcaatggtaaacaccgcaaaaatgattttacaaaatgaacgctcgcttgaggcggattcggtttgtatgccgataaaggaaatacttgaattaattccaggcggtaaataa

SEQ ID NO: 33382 - protein, 405 aa, Unknown
  Obtained from environmental sample
  misc_feature (1)..(405): Xaa is any amino acid
MFGELTVGLLTDSAIASHKRLPYLTYEQRKDVIENIKGVARVIPQEEWSYVPNLRKLKPDYIIHGDDWKSGALKKERDEVFAVMKELGGEVIEIPYTAGINSSSINEAIRSIGTTPDIRLKTLRRLLETKHLVRIMEAHSGLSGLIIENLEIEKEDGLHSFDGMWSSSLTDSTSKGKPDIEAVDLTTRLHDLTNILECTTKPIIFDGDTGGHHFAFTVKTLERNGISAVIIEDKTGLKRNSLFGTDVNQELCPIPDFCGKIKAGKQAQVTKEFMIIARLESLIAGFPVSHALERARAFVEAGADGIMIHSKEKTGEDIKQFCSLFRAEYPHIPLVLVPTTYNQFTEKELASWGANIVIYANHMLRSAYPAMVNTAKMILQNERSLEADSVCMPIKEILELIPGGK

SEQ ID NO: 33383 - DNA, 1260 bp, Unknown
  Obtained from environmental sample
  misc_feature (1)..(1260): n is a, c, g, or t
atggcaaagcttcgtaacggccctgatacttttgaacgcatttgttcattctgcggaaaaagcgccgacatggcgcgccgccttatcgcggggcccaacgacgtttttatctgcgacgaatgtatagaagtctgccggaaaatcctaagcgaagaagatcacgatcttacgacaaattttacaggcgatattcccactccgcatgaaataaaaagctacctcgaccttttcgttatcgggcaggacaacgcgaaaaaagccctgtccgtagccgtttacaaccactacaagcggatcgccaacccttccatggggaaagaaaacgccgatgttgaaatcgagaaatctaacgtccttttaatcgggcctacgggaacaggaaaaacattactcgcgaaaattctcgcaaaaaaacttaaagttcctttcgccattgtggacgcgaccacccttaccgaggcgggctatgtcggcgaggatgtcgagaacattctcttaaaacttatacagagcgccggcggcaatatagcggcggcggaaaggggcatagtctatatcgacgaaattgacaagatagcgcgcaagggcgaaaacgtttccataacgcgcgatgtttcgggcgaaggcgtccagcaggcgctgttgaaaataatcgagggaaccatcgcttcggtcccgccccagggcggcagaaaacatcccaaccaggaaatgatccgcattgataccacgaacattctctttatctgcggcggcgcttttgtggggctggacaaattcattgcccggcggatagttcagcatcctttagggttcggggcggatacaaagggcggtggggagaagagcctgaaagagctatacgacgcgcttcatccggacgatcttatacattacgggatgataccggagtttatcggcaggctccccatcacggtaagccttgaggaactcaagcgggaggatctcaagcggataatcaccgagccgcgaaacgccattgtcaggcagtaccaggcttccatggccattgacgatgttaagctcgagtttaccgaagacgcgattgacgctatcgcggacaaggcaatcaagcaaaaaaccggggcgcgcggactgcgggctatcgtggaaaggctgatgaccgacatcatgtttgagattccctcaatgaagggcggcaaacaggtaattatcagccggcagacagtggaacaatccgaaccgccggaaattcttttcctgcaaaagagcgcgtaa

SEQ ID NO: 33384 - protein, 419 aa, Unknown
  Obtained from environmental sample
  DOMAIN (117)...(336): ATPase family associated with various cellular activities (AAA)
  misc_feature (1)..(419): Xaa is any amino acid
MAKLRNGPDTFERICSFCGKSADMARRLIAGPNDVFICDECIEVCRKILSEEDHDLTTNFTGDIPTPHEIKSYLDLFVIGQDNAKKALSVAVYNHYKRIANPSMGKENADVEIEKSNVLLIGPTGTGKTLLAKILAKKLKVPFAIVDATTLTEAGYVGEDVENILLKLIQSAGGNIAAAERGIVYIDEIDKIARKGENVSITRDVSGEGVQQALLKIIEGTIASVPPQGGRKHPNQEMIRIDTTNILFICGGAFVGLDKFIARRIVQHPLGFGADTKGGGEKSLKELYDALHPDDLIHYGMIPEFIGRLPITVSLEELKREDLKRIITEPRNAIVRQYQASMAIDDVKLEFTEDAIDAIADKAIKQKTGARGLRAIVERLMTDIMFEIPSMKGGKQVIISRQTVEQSEPPEILFLQKSA

SEQ ID NO: 33385 - DNA, 333 bp, Unknown
  Obtained from environmental sample
  misc_feature (1)..(333): n is a, c, g, or t
atgcggggcctgcaacgtgatcatcaacggggaatgtttcaattcctgcatatacctggccgtctgggcggacggcaaggagattaccaccaccgaggggctttaagcgcggacggggaactctccgcgatccagcaggcgttcattgacgagggcgctgtgcagtgcggcttttgcactccgggctttttgatgagcgccacggagatcatacgatctgggaaaacctacagcgacgctgaactgcgtaaactgctgtccggtcatctttgccgctgcactggctatgaaaacatattccgcgctgtaagaaaattaggaatgaggaattag

SEQ ID NO: 33386 - protein, 110 aa, Unknown
  Obtained from environmental sample
  DOMAIN (35)...(105): [2Fe-2S] binding domain
  misc_feature (1)..(110): Xaa is any amino acid
MRGLQRDHQRGMFQFLHIPGRLGGRQGDYHHRGALSADGELSAIQQAFIDEGAVQCGFCTPGFLMSATEIIRSGKTYSDAELRKLLSGHLCRCTGYENIFRAVRKLGMRN

SEQ ID NO: 33387 - DNA, 516 bp, Unknown
  Obtained from environmental sample
  misc_feature (1)..(516): n is a, c, g, or t
atgggaaaaaaattttcatcgattcacactcatactattttctgcgacggcaaagacgacgtggaaacaatgtgccgcgcggcttatgaaaaagggctcgcgtccatagggttcagcagccatgcccctatcggaaaaaccgggcttaaatcagcctggcacatgaaaggcgaaaaacttgaaaattatattgacgaaattcgcgccgcccgccttcgctgggagggaaggctccccgtctaccttgggcttgaaatagatcgcatcaagggattgcgctcgccgttggacagggacattaagggcttgaacctggattacgccattggcgcggtacattatcttacgccgccccgcagagagccgtttactgtcgacggcccgcttgaggaactggagaacggcatactggacgggtttggcggcgacggagacgcaatgctgcgcgcctactgggacaatgttatggaaatgatcactctgggcgggtttgacattgtagcccatctgatctga

SEQ ID NO: 33388 - protein, 171 aa, Unknown
  Obtained from environmental sample
  DOMAIN (6)...(162): PHP domain
  misc_feature (1)..(171): Xaa is any amino acid
MGKKFSSIHTHTIFCDGKDDVETMCRAAYEKGLASIGFSSHAPIGKTGLKSAWHMKGEKLENYIDEIRAARLRWEGRLPVYLGLEIDRIKGLRSPLDRDIKGLNLDYAIGAVHYLTPPRREPFTVDGPLEELENGILDGFGGDGDAMLRAYWDNVMEMITLGGFDIVAHLI

SEQ ID NO: 33389 - DNA, 435 bp, Unknown
  Obtained from environmental sample
  misc_feature (1)..(435): n is a, c, g, or t
atgacaaagaccatgtacgcaggaatggaactcgaagcccgttgcgggcggtgcaagatggagaccaagcaccgcatactgtccatcacagacggagttccagaaaaattgatctgcgtcaattgcaatgcagtccacaaatacaagcccgaaagggtgatagccgagaggccgtcaagctccagggccacaggccaggcaaaggcggcccgtccaagcccaaggcaatcttctgcgtccccctcaaattttcagcagttgatgatttcagagcaagccggggccaaagcgaaaccgtacggccaaggcgttgcatgggaagaggggatgtgggtggatcatccctcttttggcttggggaaaatacagcataaagctggccgcaaaatagatgtgctatttcatgccggactcaagaccctgatggctacgtga

SEQ ID NO: 33390 - protein, 144 aa, Unknown
  Obtained from environmental sample
  misc_feature (1)..(144): Xaa is any amino acid
MTKTMYAGMELEARCGRCKMETKHRILSITDGVPEKLICVNCNAVHKYKPERVIAERPSSSRATGQAKAARPSPRQSSASPSNFQQLMISEQAGAKAKPYGQGVAWEEGMWVDHPSFGLGKIQHKAGRKIDVLFHAGLKTLMAT

SEQ ID NO: 33391 - DNA, 519 bp, Unknown
  Obtained from environmental sample
  misc_feature (1)..(519): n is a, c, g, or t
atggccgcaggcgacgccgtcatctcgcttccctcttcggggcttcccaccaacggctattcgcttgaccgcaggtctgctttgaaattgtctgggcctggcctgaatgatgaaccgccgggcactggtacaaaccttgccgaggccctcttgggggtacacaagagctttctgccccacctgctgccccctgtgaaagaaaaagtggtcagcgcgatggcgcacatcacgggcggggggctgacggacaacgtgccgagggtgctgccccccacactggatttcgtggtggacgcgtctggctggaaaattccgcccctatttaatttcataatcgaaaaggcgaacatgcccatagaggacgcaaggcgaacttttaaccttggcgcgggaatggtggccgtggttaaaaagtgcgactgcgacagcgcactgcgccaattggagactagcggcgaaaagccttgggtcataggcgaattggccaagggcagcggaaaggtcatatacaccagctag

SEQ ID NO: 33392 - protein, 172 aa, Unknown
  Obtained from environmental sample
  DOMAIN (2)...(172): AIR synthase related protein, C-terminal domain
  misc_feature (1)..(172): Xaa is any amino acid
MAAGDAVISLPSSGLPTNGYSLDRRSALKLSGPGLNDEPPGTGTNLAEALLGVHKSFLPHLLPPVKEKVVSAMAHITGGGLTDNVPRVLPPTLDFVVDASGWKIPPLFNFIIEKANMPIEDARRTFNLGAGMVAVVKKCDCDSALRQLETSGEKPWVIGELAKGSGKVIYTS

SEQ ID NO: 33393 - DNA, 432 bp, Unknown
  Obtained from environmental sample
  misc_feature (1)..(432): n is a, c, g, or t
ttggcaaaggccacaaagacggctggagtccgcagcgacttaggccttttcggcggccttttcagcgcgtctttttcagagccaaggcccttgttggtggccagcatggatggcgtgggcacaaagatgaaggtagctaggttggcgggcgtttgggacacagtgggcgcggatttggtgaaccactgcatcaacgacatcctagtgcagggcgcccgcccactgttctttttggactacatagcggcacagcggttggagccagaaatcatcgaacagattgtgaaaggcatggcgggagcatgcagcgcggcggggtgcgccctcatagggggcgagctcgccgagatgcccggcgtgtacaccagcggcgaagtatatgttgcggggacaatagtcggactcgttgacgaaggcgaccttttgccatag

SEQ ID NO: 33394 - protein, 143 aa, Unknown
  Obtained from environmental sample
  DOMAIN (1)...(137): AIR synthase related protein, N-terminal domain
  misc_feature (1)..(143): Xaa is any amino acid
MAKATKTAGVRSDLGLFGGLFSASFSEPRPLLVASMDGVGTKMKVARLAGVWDTVGADLVNHCINDILVQGARPLFFLDYIAAQRLEPEIIEQIVKGMAGACSAAGCALIGGELAEMPGVYTSGEVYVAGTIVGLVDEGDLLP

SEQ ID NO: 33395 - DNA, 822 bp, Unknown
  Obtained from environmental sample
  misc_feature (1)..(822): n is a, c, g, or t
atgatcccggttttgtccgcgcaggattggcaagaacgcctgtttgccctgcccggcgcggattgtgcgggcattctggctttttacgatcacaggctgggggccatcgtgcgcgatccgcgttgcgctctggcgccgctggacgaccacctgatacaccggggcgacggcatatttgaaaacatccgtttcagtgaacgccgcatcatcaatctggacgcgcatcttgcccggctgcgccagtcggcggcagggcttgagttgtcgccgccgtgttcatgggacgcggtgcgcgacgttcttattgagacagcgagggcttcgggccgggacgaaggcgcgttgcggattctgattgggcgggggcagggcggtttcggcgtcgaaccgggcgaatgcccgcaaaccagcctgtatgcggtcgcgcatgcgttgccccctgtgccggaagcgctgtttgaacagggggcgtccgcctgccgcagccgtgtgccggtcaaaccggccatgctggcgaggctcaagaccacgaattacctgctgaacgtgttgatggttttagaagccgcgcagcgcggcgttgatttttctttttctttcgacgacgacgggtatctggccgaagccgccgtggccaacgtggctttggtcgatgccggcggcagcctgatcatgccggaatttcgcaacgccctgcagggaaccacagtgcgcaaggcggccgaactggctgagcgcttcacgccggtgcaatggcgtcctgtgccggagccggaattgttcgccgccagggaaattctgtgcctcggccgtcggccataa

SEQ ID NO: 33396 - protein, 273 aa, Unknown
  Obtained from environmental sample
  DOMAIN (33)...(272): Aminotransferase class IV
  misc_feature (1)..(273): Xaa is any amino acid
MIPVLSAQDWQERLFALPGADCAGILAFYDHRLGAIVRDPRCALAPLDDHLIHRGDGIFENIRFSERRIINLDAHLARLRQSAAGLELSPPCSWDAVRDVLIETARASGRDEGALRILIGRGQGGFGVEPGECPQTSLYAVAHALPPVPEALFEQGASACRSRVPVKPAMLARLKTTNYLLNVLMVLEAAQRGVDFSFSFDDDGYLAEAAVANVALVDAGGSLIMPEFRNALQGTTVRKAAELAERFTPVQWRPVPEPELFAAREILCLGRRP

SEQ ID NO: 33397 - DNA, 498 bp, Unknown
  Obtained from environmental sample
  misc_feature (1)..(498): n is a, c, g, or t
ttggccttggcgctccggccgagccgtgtttttttcatttccacgaaatttccgacatgcgcctgttcttccagcacggcgccgggacgcagccgcgcaaacgggccgacgcggcaatccgggccgatctccgcgtcttccaggtggcaaaaattgtgcacgacggcgcgggcggccactgtgctgttccgtatccagcagtgcgaagccacgctggcgccggaggctatgcggcttgtcccgtatagttcgcaagggccggacaattccgcgccgggctcgatcgcgacgtccgggccgatccggatggagtccgcgccgtgcatgatcacgcccgcggccaggtgttcccggacgatggcgcgccgcagcgtctcttccgcttcggccagttcctccggcgtgttgacgccaagcagacccggctcgcaaccgcggttcagcccgcgaaccgcgagacccgcttccgccgcgagcgccacgagatcggtaagatag

SEQ ID NO: 33398 - protein, 165 aa, Unknown
  Obtained from environmental sample
  misc_feature (1)..(165): Xaa is any amino acid
MALALRPSRVFFISTKFPTCACSSSTAPGRSRANGPTRQSGPISASSRWQKLCTTARAATVLFRIQQCEATLAPEAMRLVPYSSQGPDNSAPGSIATSGPIRMESAPCMITPAARCSRTMARRSVSSASASSSGVLTPSRPGSQPRFSPRTARPASAASATRSVR

SEQ ID NO: 33399 - DNA, 1179 bp, Unknown
  Obtained from environmental sample
  misc_feature (1)..(1179): n is a, c, g, or t
gtgccggttctctccggtttcattacagctaacgatacggaactcggcgcaatggcagcccaatacgggcttgcgatggccattgaggatctgagcttttgccgtgaatggttttcttccataaacagggatcctaccctggcggaactgcgcgtgctggacacctactggtcagatcactgccgccacaccacctttaatacgattcttgataaaatagaaacaggagaaggcccattcgcccccgcgctgaaaaacgccctcgcgttatacgaatcgttacgcgaagagctttatggcaatgatgacgcggcgctttccggacatcaaggggggaaccttcgcccagcgggctcggttgaggttccgcgctcgttatgggacatggcggttatcggggcgaaggttctgggaaaacgcggggcagcggacgatgttgacgcgtcaaaagaaattaacgcctgtactgttaaaataaacgcggaattcggcgacggctcaaccgagccctggcttctgttgttcaagaacgagacccacaaccaccctacggagatcgagccgtttggcggcgcggcgacctgtcttggcggcgcgattcgggatccgctttccgggcgggcctttgttcatcaggcgatgcgagttacgggcggcgcggatccccggacgagacttgataaaaccatgccgaacaaactcccgcagctaaaaatcgcccgagaagcagcggcgggttattcctcttacggaaaccagatagggcttgcgaccggccaggtggctgaattttaccatgacggttttttggcaaagcgcatggaacttggagcggtgattgccgctgtccccgcagcatgggtgcgccgggaagaacccgcgccgggcgaccttgtgatccttgtcggcggcaagacaggcagggacggcataggcggcgcgacaggctcatcaaaggtgcataccggggattccgttcagaacgccggggcggaggtgcanaagggcaatcctgtggaagagcgcaagctgcagcggctgttccgcagcccgctggtgacaaggcttgtcaaacgctgcaacgattttggcgcgngaggcgtttcggtcgccgtggggggacttgcccgccgccttggatatgatctggacaagtccccaaaaatatgccgggcttga

SEQ ID NO: 33400 - protein, 392 aa, Unknown
  Obtained from environmental sample
  DOMAIN (125)...(284): AIR synthase related protein, N-terminal domain
  misc_feature (1)..(392): Xaa is any amino acid
MPVLSGFITANDTELGAMAAQYGLAMAIEDLSFCREWFSSINRDPTLAELRVLDTYWSDHCRHTTFNTILDKIETGEGPFAPALKNALALYESLREELYGNDDAALSGHQGGNLRPAGSVEVPRSLWDMAVIGAKVLGKRGAADDVDASKEINACTVKINAEFGDGSTEPWLLLFKNETHNHPTEIEPFGGAATCLGGAIRDPLSGRAFVHQAMRVTGGADPRTRLDKTMPNKLPQLKIAREAAAGYSSYGNQIGLATGQVAEFYHDGFLAKRMELGAVIAAVPAAWVRREEPAPGDLVILVGGKTGRDGIGGATGSSKVHTGDSVQNAGAEVXKGNPVEERKLQRLFRSPLVTRLVKRCNDFGAXGVSVAVGGLARRLGYDLDKSPKICRA

SEQ ID NO: 33401 - DNA, 876 bp, Unknown
  Obtained from environmental sample
  misc_feature (1)..(876): n is a, c, g, or t
atgaaaaacctcggcgttgacgttaccattcatgtaaaccaccgcggtcttttcaaccgctttttgtcgcacataggacaaagcgaaaaatccgtcgaggtcctccgcgcggtagacaaacttggcaaagtgggagaagacgaaacgcttaaaagccttacggaacttgccggagaattaaacgcgaataaaataattgagtttataaacgcgaaaggcggtttctcacaagcgcttgaccgtttaacggaattgtccggcggcagttgtcccgaatccgaacggctggcttcccttaggcaatttatggcggattctctcggcggctcttcagccgatgaaacctcaacagaaccatttgtactcaacccttcgattacccgcggtcttgattactacacgggagtagttttcgaaaccttcctgaacgatttgcccgacataggctccgtctgttccggcggccgttacgacaacctcgccggcctgtactccaaagataaaaactcaatcagcggcgtaggcgcgtccataggtcttgaccgcctgattgccggtcttgagagccttaacaaactgcccgccgcgaactggtgccgcgccgccatagcctgcgtggaaattgaaaaatcgggacagtatcaggcgtttgccggaagactgcgccaagcaggaatcccttgcgaggtatttacggaaggctgcggcgaaaaacagcttgtaaaacaatatgtgcttgccgagaaaaagggattgcgttatgtgataataccgggaaaagatatattgaatgacaccgttaccttacgcgacataacaacacggcaaaatcatgagttatccattgaagagttgatcgagattttgaagcgctag

SEQ ID NO: 33402 - protein, 291 aa, Unknown
  Obtained from environmental sample
  DOMAIN (200)...(291): Anticodon binding domain
  misc_feature (1)..(291): Xaa is any amino acid
MKNLGVDVTIHVNHRGLFNRFLSHIGQSEKSVEVLRAVDKLGKVGEDETLKSLTELAGELNANKIIEFINAKGGFSQALDRLTELSGGSCPESERLASLRQFMADSLGGSSADETSTEPFVLNPSITRGLDYYTGVVFETFLNDLPDIGSVCSGGRYDNLAGLYSKDKNSISGVGASIGLDRLIAGLESLNKLPAANWCRAAIACVEIEKSGQYQAFAGRLRQAGIPCEVFTEGCGEKQLVKQYVLAEKKGLRYVIIPGKDILNDTVTLRDITTRQNHELSIEELIEILKR

SEQ ID NO: 33403 - DNA, 645 bp, Unknown
  Obtained from environmental sample
  misc_feature (1)..(645): n is a, c, g, or t
gtggcaaaacgcctgctctacgggcaagtgggaattgattttgtcgcagggccttcagatgttttggtaattgcggataacacctctattcaatcagcggatattattgcggcggacatgatcgcacaggcggaacatgatcccgacgcccgagccagagccatcgtgcctgacaaggaatttgcagacaaaattattaccgcaatcgaaaaaaggcttattactctgcccactgcaaaaaccgccaatgcttcactggaaaacgggcttatcattgtctgtaacagcagggaagaatcggttcgtattgccaacaaaatcgcgcctgaacatcttgagcttcaaactgcggatgcggacagttggattccttggttaaaaaattacggctcgctttttatcggcagcctttccgcggaagttctcggcgattattcagcgggtatcaatcatactttgccgacatcaggcagcgcgcgctttacaggcgggcttgctgtgcggcatttcctaaaaactgttaccaccctgcgctgcgcttcaggcgaaggctttgaaaaagcaagaaacgcggcggaagtacttgcccgtgctgaggggctggaaggacatgcgcaaagcgcagtgtcgcgggaaaataaataa

SEQ ID NO: 33404 - protein, 214 aa, Unknown
  Obtained from environmental sample
  DOMAIN (1)...(213): Histidinol dehydrogenase
  misc_feature (1)..(214): Xaa is any amino acid
MAKRLLYGQVGIDFVAGPSDVLVIADNTSIQSADIIAADMIAQAEHDPDARARAIVPDKEFADKIITAIEKRLITLPTAKTANASLENGLIIVCNSREESVRIANKIAPEHLELQTADADSWIPWLKNYGSLFIGSLSAEVLGDYSAGINHTLPTSGSARFTGGLAVRHFLKTVTTLRCASGEGFEKARNAAEVLARAEGLEGHAQSAVSRENK

SEQ ID NO: 33405 - DNA, 1371 bp, Unknown
  Obtained from environmental sample
  misc_feature (1)..(1371): n is a, c, g, or t
gtggggccccagaatcttaccgttgacgaagaaggctatctttacgtggtcgattacggaaacaggcggatttgcaaattcgatccttccggagcctttattctgtcctttggcttaaaaagagacggttttcagggatttttttcccccacgggcatcgcggcccgcaacggcaggatatacgccgccgacagccttttaaagcagatttttattttcgaccgcaacggaacttacctgggccctttaattcaggagggccttcatgctcccgaaagccttcgctttctttcggacggaaagcttctcgttgcggattcaaaccgggttttattgattgatcccgacacggcaattgtccgggagcttggtgttttccgcaacgcctccagcgtgaggattaccggggcggaaatggacataaacggcaatgtactgctggcggattttaaaacaggggaagtagccgtcatgacccgcattgacgatatggcctccggcctttttgttgaaattaccaggatcattagcgatgaattccccaaagtaacggttgaagttgaagttaccgaccggctgcgccgccctgtatctggcctggatcagaggaatttcctgctcagcgaagggggctatgcagtcagcgaacaaaatttcatcacttctttttataattcaaccaatttagatctgtcgatactaatggaacgatctcccgctaccctcccctttagggatgactttgcaacggccatccgggacatcagcgccgcaggaaggatcgtctcgataatttcagcgggagaacagcctgtaaaagaaaacccggcttccgcctccggcgctacgccggaagcaaggctcgcgtctgtagcgagaggaagcgtggcatcttattctgcccgctggcgttttgatcttggcttgcgcctggcagccaccgatttattaagcggcgaaaaaaagcgtgcggtagtttttgttggggctggcgcggctaccggcgcgctaggcagtctgggtaacagttccagcacttttgatcaatacagcatttccgagcttgcgtcttatctttccaacaacaatgtggttttctacgctgtcattgtcggtggcggaacggcgggcgctgatttacgctacctctgcgagcaaacaggcggcaaggtgctttcgctattccgcaatgagggcatcacgcctgagatccgcagccagagcgaaaaaccatccggcatctacgtcctcagctacagttcccggctgcctacggatttcgggcgctcttacctgccgcttgaagcagaagtttatcttatggaaagatcaggcagggatagcacgggctactttgcgcctctggaataa

SEQ ID NO: 33406 - protein, 456 aa, Unknown
  Obtained from environmental sample
  misc_feature (1)..(456): Xaa is any amino acid
MGPQNLTVDEEGYLYVVDYGNRRICKFDPSGAFILSFGLKRDGFQGFFSPTGIAARNGRIYAADSLLKQIFIFDRNGTYLGPLIQEGLHAPESLRFLSDGKLLVADSNRVLLIDPDTAIVRELGVFRNASSVRITGAEMDINGNVLLADFKTGEVAVMTRIDDMASGLFVEITRIISDEFPKVTVEVEVTDRLRRPVSGLDQRNFLLSEGGYAVSEQNFITSFYNSTNLDLSILMERSPATLPFRDDFATAIRDISAAGRIVSIISAGEQPVKENPASASGATPEARLASVARGSVASYSARWRFDLGLRLAATDLLSGEKKRAVVFVGAGAATGALGSLGNSSSTFDQYSISELASYLSNNNVVFYAVIVGGGTAGADLRYLCEQTGGKVLSLFRNEGITPEIRSQSEKPSGIYVLSYSSRLPTDFGRSYLPLEAEVYLMERSGRDSTGYFAPLE

SEQ ID NO: 33407 - DNA, 864 bp, Unknown
  Obtained from environmental sample
  misc_feature (1)..(864): n is a, c, g, or t
ttgcccgatataaatgaagaggaagcaccaagcagctcgtctggcaaagggacaagcagtatgtcttcgggtgggacaaatccaagcagttcttgtgctacccaaagctcaaattctacggaactgtcttcgtctggcacaaggccaagtagttcttctgctattcaaagctcaagttctgcgaagttgtcttcgtctgacacagttctgagtagtagcggtttaaatacaagcagttcttctgctaccccccaaagctcaagttctgcggtactgtcttcttctagcgtagttcagagcagtagtggcggttctccggtaactaagaataatatttggaatggaacggcagataccacttggtttaccaattccaaaacaggaacagcatttctcataagcactgcggaggagttggcagggcttgctttgcttgtgagtgggagcgcaaacaatggcacatacgacatgagtggcaaaacgataaaactaggtgccgatattatgctaaacgatactgcgaattggcggaattgggaatatgctcaatataaacctgcaaatacttggacacctatagggcctaattctaataatacttttcagggaacatttgatggcaacgggaagatagtaagcggtatgtattatgaaaacaccagtaataccagtaatggtagtaatataggcttgtttggatacgttggtacttcaatagttagagtctccactataataaaaaatgtcggtgttgtcgccttttatatttctggctattataatgtaggcggtcttgttggttctaatgttgataacggacaaatcataagcagttattcaaatggtatagtaaaaggtgggtaa

SEQ ID NO: 33408 - protein, 287 aa, Unknown
  Obtained from environmental sample
  misc_feature (1)..(287): Xaa is any amino acid
MPDINEEEAPSSSSGKGTSSMSSGGTNPSSSCATQSSNSTELSSSGTRPSSSSAIQSSSSAKLSSSDTVLSSSGLNTSSSSATPQSSSSAVLSSSSVVQSSSGGSPVTKNNIWNGTADTTWFTNSKTGTAFLISTAEELAGLALLVSGSANNGTYDMSGKTIKLGADIMLNDTANWRNWEYAQYKPANTWTPIGPNSNNTFQGTFDGNGKIVSGMYYENTSNTSNGSNIGLFGYVGTSIVRVSTIIKNVGVVAFYISGYYNVGGLVGSNVDNGQIISSYSNGIVKGG

SEQ ID NO: 33409 - DNA, 1059 bp, Unknown
  Obtained from environmental sample
  misc_feature (1)..(1059): n is a, c, g, or t
ttggtactgatactggccctatccggttgcgaccagttgcagaaagacaagaagaaggacgccgcctccgaccaattggtggaggtcgagaagatttaccttcctgtcaaggccgccacagccgtcaggcgcgatatcgtgcaggcgctcaacttttccggcagcatagacgccttccgccgcgccgccatcgcgccggccgtgatgggcagccgcgtaatgcggatattcgttgaggagggggcctcggtgaaagaggggcaactgcttgtcaggatggaagacttccaattgcgccagtccgcggcgcagatgtcgcaacttgagtcggactacaaacgtatgtccgcgctgtacagcaagggcagcgtgaccgcgcagcagtacgagcaggtaagttccggcttcaacgccgccgtcgcaggttacgagttgctgaagaactcggtggaactgcgcgcccccttcgccggcaccgtcataggcaagtacgtgaacgagggcgaggtctacaccggcacgccgggctacgacggcatctccggcgtactctccatagcgcaactcggccggatgaaaatagaggttatggtacccgaacaggacttcgtgttgctgcgccccggacagtcggctcaggtgagaaccgacgcctatccgggcgttgacttcgagggaaaaattttcaccgtaaaccccgccctaaacagaatgagccgcacatcccgcgtcgccgtagagataaagaacgaccaacaaatgctgaaaccggggatgttcgcgaaggtggagattgtcaccaacagcctgaaagacgtgctggcggttcccgccaccgcggtagtaatgagagacggggaggcaaacgtctttatcgtagagcgccaagagaatatcccgtacgcgacaaagccgaaaatcgtaaaagtaaagacggggcttgtgacggacgcttacgcgcaaatattagaggggataaacgaggggatgatagtgctgacggataataacgtcagcttgacgaacgggactaatatcagggtgatggaggttaaataa

SEQ ID NO: 33410 - protein, 352 aa, Unknown
  Obtained from environmental sample
  misc_feature (1)..(352): Xaa is any amino acid
MVLILALSGCDQLQKDKKKDAASDQLVEVEKIYLPVKAATAVRRDIVQALNFSGSIDAFRRAAIAPAVMGSRVMRIFVEEGASVKEGQLLVRMEDFQLRQSAAQMSQLESDYKRMSALYSKGSVTAQQYEQVSSGFNAAVAGYELLKNSVELRAPFAGTVIGKYVNEGEVYTGTPGYDGISGVLSIAQLGRMKIEVMVPEQDFVLLRPGQSAQVRTDAYPGVDFEGKIFTVNPALNRMSRTSRVAVEIKNDQQMLKPGMFAKVEIVTNSLKDVLAVPATAVVMRDGEANVFIVERQENIPYATKPKIVKVKTGLVTDAYAQILEGINEGMIVLTDNNVSLTNGTNIRVMEVK

SEQ ID NO: 33411 - DNA, 357 bp, Unknown
  Obtained from environmental sample
  misc_feature (1)..(357): n is a, c, g, or t
atgaaagtaacggaagcggttgaattgctggaagggcagtttttttccgggaaagaaaaaggggattatgaggtagcctcagcgtgcggagccgaccttatgagcgacgtcatggcctttgtaaaagacaaggttctgcttcttacaggactggttaaccctcaggtaatacgcacagccgaacttttggacatacacgcgataatctttgtccggggtaaagttcccggcagggatatgatagatatggctgaagaatctgatataattttagcaggaactaaattacccatgtttttagcctgcggaaaactttatgaagccggccttcgtacaggcggaaccagggcaatctaa

SEQ ID NO: 33412 - protein, 118 aa, Unknown
  Obtained from environmental sample
  misc_feature (1)..(118): Xaa is any amino acid
MKVTEAVELLEGQFFSGKEKGDYEVASACGADLMSDVMAFVKDKVLLLTGLVNPQVIRTAELLDIHAIIFVRGKVPGRDMIDMAEESDIILAGTKLPMFLACGKLYEAGLRTGGTRAI

SEQ ID NO: 33413 - DNA, 510 bp, Unknown
  Obtained from environmental sample
  misc_feature (1)..(510): n is a, c, g, or t
atgaaggcggcctacgagaggattgtcgtccccgcaggtttgcatccgttaaagatatgcttagagagcgcaaggatgatgaccggcccttacggatttttggtatcgaaggtattgcacgtaaaaaagacgtataagcattatgtgggtttggacgcttgcatggcgaatttgatgaggccggcgctctacggggcgtatcaccatatcaccgttataggtaaagaaaacgagccggctaaccatatttatgatgtgacggggtcgttgtgcgagaataacgataaattcgcaatcgacaggaaacttccgacaatcgccccgggcgacatcttggtaatccacgacgcgggagcgcacgggcacgcgatgggttttaactacaacgggaagacgcggagcgcggagctgttgagaagggagaacggggaggttatggagattaggagggcggagacgttggaggatttgtttgctactttggattttgagaagttggagatgttttaa

SEQ ID NO: 33414 - protein, 169 aa, Unknown
  Obtained from environmental sample
  DOMAIN (33)...(139): Pyridoxal-dependent decarboxylase, C-terminal sheet domain
  misc_feature (1)..(169): Xaa is any amino acid
MKAAYERIVVPAGLHPLKICLESARMMTGPYGFLVSKVLHVKKTYKHYVGLDACMANLMRPALYGAYHHITVIGKENEPANHIYDVTGSLCENNDKFAIDRKLPTIAPGDILVIHDAGAHGHAMGFNYNGKTRSAELLRRENGEVMEIRRAETLEDLFATLDFEKLEMF

SEQ ID NO: 33415 - DNA, 945 bp, Unknown
  Obtained from environmental sample
  misc_feature (1)..(945): n is a, c, g, or t
ttgccgagaattctccagtccgggggtgcatggttattaaccctggggttcgcgctttgggagaatattcagcgcgtgcttgacgggatgtttaaggcgacggggcacaagaacgcttatttcccgctcttcatccccaagagcttcctcgaaaaagaggctcagcacgtggaggggttcgctaaagagtgcgcggtggttacgcatcaccgccttcaggcgggggcggacggaaagctcgtcccggccggagagcttgaggagccgctcattgtccgcccgacctccgagaccatcatcggcgctatgttcgccaagtggacgcaatcctaccgcgatctgccgctgctcataaatcaatgggccaacgtcgtcagatgggaaatgcgcaccagactatttttgcggacggcggaatttctatggcaggaggggcatacggcgcacagcacgcaaaaagaggcgcgtgaggagacgatgaagatgctcgacgtgtacggcaagttcgcggaggagtacatggcgatgccggtcataaagggcgagaagacggagtcggaacgcttccccggggcagtgtctacgtactgcatagaggctatgatgcaggaccgcaaggctttgcaggcggggacgtcgcattttctcggtcagaacttttccaaggcctcggacataaagtttcttgacgcggagggaaaggacgaatacgcctggacgaccagctggggcgtctcgacgcggctgataggcgggctgatcatgacgcacggagacgacgacggactgatagtgccgcccagactggcgccgtcgcatatcgtcatactgccgatagtacatgacgacgcgtcgtcaagcgacgtgtttgagtattgcgacaaattggcggcggaactggccggggcgcggtacgacgacaggcggcttgaggttgaggtttga

SEQ ID NO: 33416 - protein, 314 aa, Unknown
  Obtained from environmental sample
  DOMAIN (19)...(205): tRNA synthetase class II core domain (G, H, P, S and T)
  misc_feature (1)..(314): Xaa is any amino acid
MPRILQSGGAWLLTLGFALWENIQRVLDGMFKATGHKNAYFPLFIPKSFLEKEAQHVEGFAKECAVVTHHRLQAGADGKLVPAGELEEPLIVRPTSETIIGAMFAKWTQSYRDLPLLINQWANVVRWEMRTRLFLRTAEFLWQEGHTAHSTQKEAREETMKMLDVYGKFAEEYMAMPVIKGEKTESERFPGAVSTYCIEAMMQDRKALQAGTSHFLGQNFSKASDIKFLDAEGKDEYAWTTSWGVSTRLIGGLIMTHGDDDGLIVPPRLAPSHIVILPIVHDDASSSDVFEYCDKLAAELAGARYDDRRLEVEV

SEQ ID NO: 33417 - DNA, 603 bp, Unknown
  Obtained from environmental sample
  misc_feature (1)..(603): n is a, c, g, or t
ttgaaagaaaaaggaatgaattcggcagatgcaatagacatatttgttatagatacttctccaacgctggggcttttgaacagaataattttattaggaacggattattttgccgtacccgttatgccggatgctttttctttgcagggcattgaaaatttagggaaaatatttgaagaatggaaaatcaaatggaaaaatacaggacttgctctttgtggcgatattgaaaataaattcgtgcttaacggtgatgctttgtttataggttatattttaaattcctacaatgtttacggaaaacgtccaataaaggatcacagaattttcatagaacaaattccaagtttagtcaaaaaatttctatctgaaaaacactgcaaaaatggacttgttgcacaaagttgcgcaaactcaatttgcgacattcaagactatggcaggctaccatcacttgcgcacgaaacggctcaggcaatttttgacatagaccctataaaagcagaagctatgcagctcggcacggttgagaatattgaaaaagcaaaagaagaatttgaatgcttatcaaataaaattttgaatttgctggcggagtattag

SEQ ID NO: 33418 - protein, 200 aa, Unknown
  Obtained from environmental sample
  misc_feature (1)..(200): Xaa is any amino acid
MKEKGMNSADAIDIFVIDTSPTLGLLNRIILLGTDYFAVPVMPDAFSLQGIENLGKIFEEWKIKWKNTGLALCGDIENKFVLNGDALFIGYILNSYNVYGKRPIKDHRIFIEQIPSLVKKFLSEKHCKNGLVAQSCANSICDIQDYGRLPSLAHETAQAIFDIDPIKAEAMQLGTVENIEKAKEEFECLSNKILNLLAEY

SEQ ID NO: 33419 - DNA, 738 bp, Unknown
  Obtained from environmental sample
  misc_feature (1)..(738): n is a, c, g, or t
ttgctgaatttttactcaactctttttatcgttttaacctccccttatcagcaaaatccagcttcggcttttgggcacgtgtttcttcttcaagcggattcacttccatatccgttatggaacacaatagaatttgtggcagaagcagaaaacttcagtaaactcagctacataacaaaaggtgtatatggcggctttgctgcaaaatatgaaattacgcctttttatgaaaaaatttataaatatgtggataaagagaaacgtgacttgtttatttatccgctcagaatttcaaatgcggagctggcaaaattcaacgatactttaaattcatggaaaacaaaaaaagattcatataaatttttcacaaataattgcgtggatggaatttacaatttgttgaaaagtactcttgattccgttcaagaagcacctattttgctaactccgcaaaatttaatcaggttgctaaacgaaagcgataaaatagaaaaacctatagtgctacgattttctggcaataaaaaagatgaggaaaattttatagtgcaaaaagatatgcaaatccctcacaaatacagccgttttgacatagggctgttatttcttgaaaagttttatgggaatttgcgtttccggttatttttacacgatgtaagcgattatgggggctattattcaaattttataaatcttgaagtattatatttgaatctatatttaacaacggcaaaataa

SEQ ID NO: 33420 - protein, 245 aa, Unknown
  Obtained from environmental sample
  misc_feature (1)..(245): Xaa is any amino acid
MLNFYSTLFIVLTSPYQQNPASAFGHVFLLQADSLPYPLWNTIEFVAEAENFSKLSYITKGVYGGFAAKYEITPFYEKIYKYVDKEKRDLFIYPLRISNAELAKFNDTLNSWKTKKDSYKFFTNNCVDGIYNLLKSTLDSVQEAPILLTPQNLIRLLNESDKIEKPIVLRFSGNKKDEENFIVQKDMQIPHKYSRFDIGLLFLEKFYGNLRFRLFLHDVSDYGGYYSNFINLEVLYLNLYLTTAK

SEQ ID NO: 33421 - DNA, 492 bp, Unknown
  Obtained from environmental sample
  misc_feature (1)..(492): n is a, c, g, or t
ttgcttgcgcaaaaaagaaagaacccgtatgggttgaaccgccgccaccgccaccgccagtggagagaggttaggcaagaacctgtaaggcaggctcctcaagaagaccctctggaagcagagcgcagacgcttggaagaactcatgaacagaataatgtctgacgacatttattttgaatatgaccaagcgaccctcacttccagggcaaaagacattctgacggaagttggcaccattctgaagcgtgaacctcgctttaccgttttaacggaagggcacacggatgaacgcggaacagaaaattacaacttagggcttggaatgcgcagggcagagtctgttgtgaaattcttaacgaattacggcgttgcgtctagccgcctcacaaaggtgagctatggcgaagaacaacccaaggtcgcaggcagcacggaagatgcttattcgcagaaccgccgcgcagcgtttagagttaaaataaccaactag

SEQ ID NO: 33422 - protein, 163 aa, Unknown
  Obtained from environmental sample
  DOMAIN (58)...(153): OmpA family
  misc_feature (1)..(163): Xaa is any amino acid
MLAQKRKNPYGLNRRHRHRQWREVRQEPVRQAPQEDPLEAERRRLEELMNRIMSDDIYFEYDQATLTSRAKDILTEVGTILKREPRFTVLTEGHTDERGTENYNLGLGMRRAESVVKFLTNYGVASSRLTKVSYGEEQPKVAGSTEDAYSQNRRAAFRVKITN

SEQ ID NO: 33423 - DNA, 765 bp, Unknown
  Obtained from environmental sample
  misc_feature (1)..(765): n is a, c, g, or t
ttgtgggtatcagattacgatgtttttcgcaaaaggcaatacctaaaagacaacagcgtaaactttttgccagctggnagcagagataattccaaaatatattttacaagcatgaggggtggcaagcctcagatttatgaaaggaatttggcaggcaactccgataaacatctctttccccaaatagaccaagcttttggtccatctgtaaatcccaaagatggaacactccttttttcaataatagggcaaaacggcacggatatttggcagggcaatccgcaaaccggaaccgccgctcgcttaatttacaccaaaaatatagaagttagcccctcttggagcccttatggaacggcattcctgttttcaagcgacaaaggtggcgcaccgcaaatatacatggctttaaaagacggcagcgatatgcagcgcgtttcttttgtaggcaaatacaacgaaagcgcagtttggtctccagaaggagatagaattgcctactgctcaatggatggcggaaaattcaatatttacacaagcgccattgatggcagcgatgttctcaaattgacttctgaaggcaataacgagcgtccaacttggtcgccagatggaatggcaatagcattcgccagcgaccgctctggaagctcacaaatctacataatgcgtcgcgatgggagcggcgtaatacgtataacaaatgcgggtgaaaattcttcgcccgtatggtcaaacctcatcaaaggagaaacagcaccatga

SEQ ID NO: 33424 - protein, 254 aa, Unknown
  Obtained from environmental sample
  DOMAIN (144)...(179): WD40-like Beta Propeller Repeat
  misc_feature (1)..(254): Xaa is any amino acid
MWVSDYDVFRKRQYLKDNSVNFLPAGSRDNSKIYFTSMRGGKPQIYERNLAGNSDKHLFPQIDQAFGPSVNPKDGTLLFSIIGQNGTDIWQGNPQTGTAARLIYTKNIEVSPSWSPYGTAFLFSSDKGGAPQIYMALKDGSDMQRVSFVGKYNESAVWSPEGDRIAYCSMDGGKFNIYTSAIDGSDVLKLTSEGNNERPTWSPDGMAIAFASDRSGSSQIYIMRRDGSGVIRITNAGENSSPVWSNLIKGETAP

SEQ ID NO: 33425 - DNA, 330 bp, Unknown
  Obtained from environmental sample
  misc_feature (1)..(330): n is a, c, g, or t
ttggtatcaaaaagcgccgatcaggggcatgcaagggcgcagcttactttgggcatgatgtatgccatcgggcagggtgtgccgagagatgccacncaggccgcacagtggtatcgcaaagccgccgaccaaggggatgccgatgcgcaattcaatttgggcgtgagtcatttaaccggaaaaggcgcaagccgcgaccgggaaaaaggttgcgccctgctgcgcgcctccgccgagcaaaatttgaaacaggccgttaagctctataacgatgtgtgcgttgccggccgacctctcccaagccgaactcacaaagcgcccggacgatga

SEQ ID NO: 33426 - protein, 109 aa, Unknown
  Obtained from environmental sample
  DOMAIN (47)...(82): Sel1 repeat
  misc_feature (1)..(109): Xaa is any amino acid
MVSKSADQGHARAQLTLGMMYAIGQGVPRDATQAAQWYRKAADQGDADAQFNLGVSHLTGKGASRDREKGCALLRASAEQNLKQAVKLYNDVCVAGRPLPSRTHKAPGR

SEQ ID NO: 33427 - DNA, 690 bp, Unknown
  Obtained from environmental sample
  misc_feature (1)..(690): n is a, c, g, or t
atgaaaaaactcgtcgttgctttggccgtggtcgtgctcttgctgccgggccggcctgccctgtccgccggagagcaagaatcggattttgcggcaacgctcaaggcggccgagcagggagatgcaagggcgcaatacaatttgggcgtgatgtatgacaacgggcagggcatatcgcaagatgaagccaaggccgcgcattggtatcgcaaagcggccgagcagggagacgtcgatgcgcagttcaatttaggcgtgatgtatggcatggggcggggcgtggcgcaagatgacgccaaggccgtacagtggtggcaaaaagctgccgcacggggagacgttgatgcgcaatttaatttgggcgtggggtatgacatcgggcggggcgtaacgcaagatgacgtcaaggccgtacattggtatcaaaaagccgccggccggggatatgcaagggcgcaattctatttgggcgtgatgtatggcaaggggcggggcgtagcgaaagatgatgtcaaggccgcgcagtggtggcaaaaagctgccgcacagggagacgttgatgcgcaatttaatttgggcgtggggtatgacatcgggcggggcgtaacgcaagatgacgtcaaggccgtatattggtatcaaaaagcgccgatcaggggcatgcaagggcgcagcttactttgggcatga

SEQ ID NO: 33428 - protein, 229 aa, Unknown
  Obtained from environmental sample
  SIGNAL (1)...(22)
  DOMAIN (186)...(221): Sel1 repeat
  misc_feature (1)..(229): Xaa is any amino acid
MKKLVVALAVVVLLLPGRPALSAGEQESDFAATLKAAEQGDARAQYNLGVMYDNGQGISQDEAKAAHWYRKAAEQGDVDAQFNLGVMYGMGRGVAQDDAKAVQWWQKAAARGDVDAQFNLGVGYDIGRGVTQDDVKAVHWYQKAAGRGYARAQFYLGVMYGKGRGVAKDDVKAAQWWQKAAAQGDVDAQFNLGVGYDIGRGVTQDDVKAVYWYQKAPIRGMQGRSLLWA

SEQ ID NO: 33429 - DNA, 1779 bp, Unknown
  Obtained from environmental sample
  misc_feature (1)..(1779): n is a, c, g, or t
ttgcccgctttttattccattgaggcggtggaaaaattcaactcgtacatcagccgcaaccttattcttgtacaaaaagtatcccgctcaaaggcggtaacagactggttagccgacgagccaaatcaggcgaaaaaaaccgcggcctatcatgaaatgatggattccgccgttatgctgcagagcccggttctgtatatcggcatccagaaaacattgaacgagtatgcggtacaagacgggacgcggtttgaggattttgttccccatgaccggttcgacccgtcagtcgcccttaacgaatggtattataactgcctcaagtctccaaacgaatataccctgaatatagacgctgacaagttctcccgtatccgccttctctggatcaaccacaaggttatggaaggagggaacgtattaggcgtattttgcgccagccttccgtttgatgatgttattcgctccctgttcgccaggtatgataccgaaaatgtaaaaggctacgttatcgacaggaacggcattgtccaaatggacagcaccctgtctgttatctccgacgaagaccataaaaacatccccgaggcggattccgatcccgagttggcggccgcgatagaatcatatttggaaaatattgaaggctacttcgaatcggacaaagaaccgcagatcatcaagcttgcgggagggccgtatcaattcgtgtctatcgagccaatcgccggttccgactggtcagttgttactttctttagcaataaatcactgttcagcatatggcggcttcttccgctgctgattttcatgttgtccgcgtttgtgttgtattcgctgatagagaacatatctatccacccgtatgtattcgttccgntaaaacgcctgacaataagcatttcacagaccggaatggagcatggcagcatcctgggtcatgaccgcagcgatgaaataggcgaacttgcgcggactatacaggacatgcgtcttaaaattcacgaggcggacgagcgtgtaagacttatgctggacgcgatgcccctttgctgcagccttctggataaagaccttaatatcgtcgaatgtaacgaggcggccgttactttattcaagctgaaaaacaaacaggaatacctggacagatttttcgagttgtctcctgaacgccagcccaacggggagctttcctacgtcgaggtgggcaggcatatcaaaaaaacgtttgcggaaggcaggcacgtatttgaatggacacaccaattgcttgacggcacgcctatcccggcggaaatcacgctggtgcgaaccagctatggcggcgattacgttatcgccagttacacgcgggacctgcgcgaacataaaaagatgatgggggatatccgcgcaggcgccgaggaactgaaggccgcgcttgagaaggccaagtccgccaaccgcgccaaaagcaatttcctgtcaaacatgagccatgagatgcgtacccccatgaacgccattatcggaatgacgctgatcggcaaatcggcggacggtattgaaaaaaaggattacgcttttgaaaaaatagaagacgcctcgacccatcttttgggcgttatcaacgatgttcttgacatgtcaaaaattgaggcggagaaatttgaactgtccctggtggaattcaatattgaaaaaatgctgaataaagtgataaacgtcatcaatttccgggtggatgaaaaacatcagcgcctaacggttgagcttgacccccatattcccgtagcatga

SEQ ID NO: 33430 - protein, 592 aa, Unknown
  Obtained from environmental sample
  DOMAIN (483)...(548): His Kinase A (phosphoacceptor) domain
  misc_feature (1)..(592): Xaa is any amino acid
MPAFYSIEAVEKFNSYISRNLILVQKVSRSKAVTDWLADEPNQAKKTAAYHEMMDSAVMLQSPVLYIGIQKTLNEYAVQDGTRFEDFVPHDRFDPSVALNEWYYNCLKSPNEYTLNIDADKFSRIRLLWINHKVMEGGNVLGVFCASLPFDDVIRSLFARYDTENVKGYVIDRNGIVQMDSTLSVISDEDHKNIPEADSDPELAAAIESYLENIEGYFESDKEPQIIKLAGGPYQFVSIEPIAGSDWSVVTFFSNKSLFSIWRLLPLLIFMLSAFVLYSLIENISIHPYVFVPXKRLTISISQTGMEHGSILGHDRSDEIGELARTIQDMRLKIHEADERVRLMLDAMPLCCSLLDKDLNIVECNEAAVTLFKLKNKQEYLDRFFELSPERQPNGELSYVEVGRHIKKTFAEGRHVFEWTHQLLDGTPIPAEITLVRTSYGGDYVIASYTRDLREHKKMMGDIRAGAEELKAALEKAKSANRAKSNFLSNMSHEMRTPMNAIIGMTLIGKSADGIEKKDYAFEKIEDASTHLLGVINDVLDMSKIEAEKFELSLVEFNIEKMLNKVINVINFRVDEKHQRLTVELDPHIPVA

SEQ ID NO: 33431 - DNA, 1188 bp, Unknown
  Obtained from environmental sample
  misc_feature (1)..(1188): n is a, c, g, or t
atggtcaatgatctttcctatgtactggtaactccctatactatagtaaaaagcaggacaggcggggttttttcccggcttttatcaagaacggaccttgagctggttggggcccagatgttcactccggatgacgcgttcgcgcaagaatacgcgcgcaatctgaggcagcgctccccgcaaaaccagctcatgcttctggcagattatatcgaacagaatatagccccttccggcggacggccccacaggtcgctgctgctcttgttcagggggaaaaacccctgcgaacagcttaccgccacctgcggccatatgtatatgcaaaacgttgaaattgacgcgctgtccggggagaccgtgcgggacacttatgccgatatgattttttcaaaggacaatcccgaggaggtaagctattttgaaccggctgtaatgactccccgtaaccaggaagaagcgaatgaggatctcctgatgatggcaaaattccttgaaggcaaaggaaatatagtacagaacctcgtctactccgatccttccttaattgagcgtactcttgtaataataaaaccggataactggaagcatcatacgtcacgccccggagccgttattgatatgttttcacgcacgggtctgcggattgtaggcatcaaaattcaccggttctcgcttgccgaggctatggatttttacggccctgtggaagcggtgctaaaggaaaaactctcccctgttttcggcaaacgggcaaaggtcctgctggaaagggaattcaatttcaagctaagcgaagaatcggcaagaatacttaccgaaactttcggcaaggaatgcgcgaaagaccagtttgcgcagattatcgaattcatgtcaggcaagcggccgccatccaaagatgacggctatcgttacatggaagaagtaaaaaaactcgacgatcccaaatgcatgatccttatctacgagggcgaaaatgcggtaaggaaaatccgcgacgtgcttggccccacagaccccctcaaagcgccggagggcacggtacgtcgtgaattcggatcgaacgtgatggtcaataccgcccatgcgtctgactcggtagaaagctataaccgtgagaaagacattgtcaaagtaaacgaaaattcactaacaaaaataatcagggagcagttggggagctag

SEQ ID NO: 33432 - protein, 395 aa, Unknown
  Obtained from environmental sample
  DOMAIN (184)...(377): Nucleoside diphosphate kinase
  misc_feature (1)..(395): Xaa is any amino acid
MVNDLSYVLVTPYTIVKSRTGGVFSRLLSRTDLELVGAQMFTPDDAFAQEYARNLRQRSPQNQLMLLADYIEQNIAPSGGRPHRSLLLLFRGKNPCEQLTATCGHMYMQNVEIDALSGETVRDTYADMIFSKDNPEEVSYFEPAVMTPRNQEEANEDLLMMAKFLEGKGNIVQNLVYSDPSLIERTLVIIKPDNWKHHTSRPGAVIDMFSRTGLRIVGIKIHRFSLAEAMDFYGPVEAVLKEKLSPVFGKRAKVLLEREFNFKLSEESARILTETFGKECAKDQFAQIIEFMSGKRPPSKDDGYRYMEEVKKLDDPKCMILIYEGENAVRKIRDVLGPTDPLKAPEGTVRREFGSNVMVNTAHASDSVESYNREKDIVKVNENSLTKIIREQLGS

SEQ ID NO: 33433 - DNA, 636 bp, Unknown
  Obtained from environmental sample
  misc_feature (1)..(636): n is a, c, g, or t
atgataatagctcctagtgttttaaatgctaatttcctcaatttggaagcagatataaaagcaaccgaaaaaggtggcgcaaattggattcatttggatataatggatggaagttttgttccaaatatttcctttggtcccggcattgcacagcaaatacgcaaatgcacaaaacttcctctcgattgtcatttaatgataaataatccagagcttcatattgaggctttcgcacgtgcaggtgttcaatatataactgttcatgcagaagcaacaaatcacttagatagattgttaaaccaaataaaggaacttggttgcaaagctggcgttgcaataaatcctgccacgccactccatgcaataaccgaagttttagatttggcagatatggttttgattatgagtgtaaatcccggttttggcgggcaatcactaattccgtattgtttggaaaaagttcgtaatttgcgcgctatgaaaccaaatttgcaaatagagatagatggaggcataaatttggaaactttgcctcttgccagcaatgctggtgtaaatatttttgttataggttctgccatattcagtgcaaaaaatgtagaagaagaaacgaggagatttttttctatattataa

SEQ ID NO: 33434 - protein, 211 aa, Unknown
  Obtained from environmental sample
  DOMAIN (2)...(198): Ribulose-phosphate 3 epimerase family
  misc_feature (1)..(211): Xaa is any amino acid
MIIAPSVLNANFLNLEADIKATEKGGANWIHLDIMDGSFVPNISFGPGIAQQIRKCTKLPLDCHLMINNPELHIEAFARAGVQYITVHAEATNHLDRLLNQIKELGCKAGVAINPATPLHAITEVLDLADMVLIMSVNPGFGGQSLIPYCLEKVRNLRAMKPNLQIEIDGGINLETLPLASNAGVNIFVIGSAIFSAKNVEEETRRFFSIL

SEQ ID NO: 33435 - DNA, 399 bp, Unknown
  Obtained from environmental sample
  misc_feature (1)..(399): n is a, c, g, or t
atgccagagcctttgctggagagatggacaataggctttgatgtaaaatggcataattatatttttccttggcaaggctctgcccacagttttgaggagctcaaaaaaacaagcacggatatatgttttttaagccccgtttttgactccatctccaaattcggatacaaagccaaatacaacaaccaagagctaaaagagggcattgccgcttggagagactttcagaaaaaagaaaatcgctcgcaaaagttatttgcgcttggcggtgttgattcagaaaacatagcaaagcttgcaagtcttggatttgacggtgccgctgtactgggcgcggtatggcacagccccgaccccgtggaagcacttttggaaatgctcaatctccatcaggattaa

SEQ ID NO: 33436 - protein, 132 aa, Unknown
  Obtained from environmental sample
  misc_feature (1)..(132): Xaa is any amino acid
MPEPLLERWTIGFDVKWHNYIFPWQGSAHSFEELKKTSTDICFLSPVFDSISKFGYKAKYNNQELKEGIAAWRDFQKKENRSQKLFALGGVDSENIAKLASLGFDGAAVLGAVWHSPDPVEALLEMLNLHQD

SEQ ID NO: 33437 - DNA, 399 bp, Unknown
  Obtained from environmental sample
  misc_feature (1)..(399): n is a, c, g, or t
ttgctttgcatacctattttaggcgtgtgcgctatgattgtattttggagcaacataaccaatggcttttctgttctgtggaattattttagcttaacgaaccagaccatagctgttatatgccttgccatttcggtttgctatatgagagcgaagaaaaagcctgtgatttttttattgatacctcttgcgtttttgtcttttgtgatattcctctatttattctggattagccctcagcatataatgagtgctccggttggttttgggcttggatatcctgtttcgtgtcttatggcttttgtatgttccattcttgtttgcttttattgcctgaaacacggaaagtatttagccaaacgggtagaagaaaatcaatttaatcctgatggagattga

SEQ ID NO: 33438 - protein, 132 aa, Unknown
  Obtained from environmental sample
  misc_feature (1)..(132): Xaa is any amino acid
MLCIPILGVCAMIVFWSNITNGFSVLWNYFSLTNQTIAVICLAISVCYMRAKKKPVIFLLIPLAFLSFVIFLYLFWISPQHIMSAPVGFGLGYPVSCLMAFVCSILVCFYCLKHGKYLAKRVEENQFNPDGD

SEQ ID NO: 33439 - DNA, 987 bp, Unknown
  Obtained from environmental sample
  misc_feature (1)..(987): n is a, c, g, or t
ttgccnccattggaagtgcatgctcattcatttgttgcacatagcgggagtttggccagtagtggnggtatcctaggcgcaaagtcgggtccggtggtatttttgattattccactcggaaacattttnggcggcgcggttcacgactacttttttggaatgatttctntgcggaatggtgctggctcatacttggaagtttcaaagaaatttttgaacaagacttntgcggctctctctaccgtgtttatgataatagccctttttgcccttgctgcatcttttacgaatgtgggttctggcattctcaacacaaatcacgtgtttagcaaaacaacctcagataaggcatttatcctttgtatatgcttgattttttcttattatatattcagcacatttttccccataggttcttttgtttccaaattgagcaatatttttggacttattttaatagcttccgtggggcttgttcttttgtttatatctgagcatttgtctaatcttccagaatttgatatacataattttttgggcaatttcacgcagcatcctcttgggtatcccattttgccaatgctgtttgtaacaatagcttgtggaatgataagcggttttcacggctcgcaaaattcaattacggctggcatagaatcaagtgaaaaaaatggcaggcaaactttttatggcatgatggttgcagagggttttttggcaatgatgtgggctgcagttggggttataggttattctctttatcctgagcttgcgttagtggaaaatgggtctgttatattgtcgaagatagttcacaatttcataaagctagagtttatgtcggaaataattttgattagcgttgcagtgcttgcaataacaaccgcagatgccgcgcttcgtgttttgagaattttaatttctgatatttttcatttaaagcaaaaatcttctgaagaccgtttttgctttgcatacctattttag

SEQ ID NO: 33440 - protein, 328 aa, Unknown
  Obtained from environmental sample
  DOMAIN (6)...(275): Carbon starvation protein CstA
  misc_feature (1)..(328): Xaa is any amino acid
MPPLEVHAHSFVAHSGSLASSGGILGAKSGPVVFLIIPLGNIXGGAVHDYFFGMISXRNGAGSYLEVSKKFLNKTXAALSTVFMIIALFALAASFTNVGSGILNTNHVFSKTTSDKAFILCICLIFSYYIFSTFFPIGSFVSKLSNIFGLILIASVGLVLLFISEHLSNLPEFDIHNFLGNFTQHPLGYPILPMLFVTIACGMISGFHGSQNSITAGIESSEKNGRQTFYGMMVAEGFLAMMWAAVGVIGYSLYPELALVENGSVILSKIVHNFIKLEFMSEIILISVAVLAITTADAALRVLRILISDIFHLKQKSSEDRFCFAYLF

SEQ ID NO: 33441 - DNA, 411 bp, Unknown
  Obtained from environmental sample
  misc_feature (1)..(411): n is a, c, g, or t
atggcccctctgctgcacgatgtgggcaagcccatttccgcttccctcgccaaccatcgctttgaagcccatgcggagctgggcgcacaggcggctgcgcgttntatggaacgccttgaattccaccccgcccttattcaggacattttttaccttgtaagaaaccacatgctccccgccgcgcttaaacggctaccccttacaaaaaccgccgagatcatggcttccccgcttttccccacgctgatggagctttaccgctgcgatgaatcctcatcattcaaaggccttgaagggtactatgaaaacagcgccgcatatcaggcttaccttaaaaacgttaagaacccttacagatccagggatgggaaaaagattaagcgaagcaatgtgtatatgggaactcgctaa

SEQ ID NO: 33442 - protein, 136 aa, Unknown
  Obtained from environmental sample
  misc_feature (1)..(136): Xaa is any amino acid
MAPLLHDVGKPISASLANHRFEAHAELGAQAAARXMERLEFHPALIQDIFYLVRNHMLPAALKRLPLTKTAEIMASPLFPTLMELYRCDESSSFKGLEGYYENSAAYQAYLKNVKNPYRSRDGKKIKRSNVYMGTR

SEQ ID NO: 33443 - DNA, 882 bp, Unknown
  Obtained from environmental sample
  misc_feature (1)..(882): n is a, c, g, or t
gtgccgatcatgcacggctgtaacaatttctgctcctactgcatagtcccttatgtgcgcggcagggaaatttcccgcgatcctcagtcaattcttgaagaaatccgaattttgggaaggcaaggggtaaaggaaattacgcttttagggcaaaatgttaattcttatttatgggaaaaagcgcaggaaggaactcttgattttcccggccttttgcgccttatcgcttccgagcttgctacagaaaacggggttaagtgggtgaggtttttgtccagtcaccctaaggatctttccgatgaattaatcgaggtattggcggaaaactcatttttttgccgccatatccacctttgcgtccagcacggctcaaaccgcattctttcaaacatgaaccgccattacacccgcgagcaatacctggaattggtacgtcgccttcgttacgccatgccggatttgagcctttctacggatattttagtcggttttcccggggaaactgacgaagatcttgaagatactctggctttaatggaagaagtcaagtttctttacgcttatatgtaccattataatccaagggaaggaacagcggcgttttccctgcccggcaggattagcgccgaggtaaaaaaggagcggctttcanaggttattgcattgcaaaaacggcatacaaatgagcttttaaagagccgaattgggcaaaaagtgattatacttatagaagggatttcacggaaaaatgccgatgaattaataagcagaaccgaaagggatgaaatggtggctctgcctggcagcggctccttgctggggtcttttgctcaggtcaccctttcttccctccggggaaatacattcaggagtaaaatatga

SEQ ID NO: 33444 - protein, 293 aa, Unknown
  Obtained from environmental sample
  DOMAIN (1)...(179): Radical SAM superfamily
  misc_feature (1)..(293): Xaa is any amino acid
MPIMHGCNNFCSYCIVPYVRGREISRDPQSILEEIRILGRQGVKEITLLGQNVNSYLWEKAQEGTLDFPGLLRLIASELATENGVKWVRFLSSHPKDLSDELIEVLAENSFFCRHIHLCVQHGSNRILSNMNRHYTREQYLELVRRLRYAMPDLSLSTDILVGFPGETDEDLEDTLALMEEVKFLYAYMYHYNPREGTAAFSLPGRISAEVKKERLSXVIALQKRHTNELLKSRIGQKVIILIEGISRKNADELISRTERDEMVALPGSGSLLGSFAQVTLSSLRGNTFRSKI

SEQ ID NO: 33445 - DNA, 624 bp, Unknown
  Obtained from environmental sample
  misc_feature (1)..(624): n is a, c, g, or t
gtgttaggtgtaattgactacggcgcggggaatcttggctccgttatgaacgcgctcaagcggctttccgtcccggcgcggtttgcagaaggaccgcaggagctttcactttcatcttcgccatttgaaaaaataatttttcccggagacgggcattttgcgacagcaatggcgtcgttgactcaatcgggttatgcgcaagcgttatgtgaatggataaaagcggacaagccctttttagggatttgtatcggtttacagttgttatttgaaacttccgaagaagccccgcctgttgacggcagggaagtacgcggtctttccgtaattccgggaacagtaaggcgttttccaggacgaaaagttccacagattggctggaatcagactacagcgcggaaagagtcaaaaatattccgaggcttaaatgataacagttttttctactatatacattcgtactatgccgaccctgctgacgattcggtatgcgccgcccagacagagtactatgtccgctactgttgcgcagttgaacgcggcgcgttagcagcggtgcaatttcaccctgaaaaatcaggcgcggcagggcttgcgcttctgcaaaattgggtggggggataa

SEQ ID NO: 33446 - protein, 207 aa, Unknown
  Obtained from environmental sample
  DOMAIN (40)...(160): CobB/CobQ-like glutamine amidotransferase domain
  misc_feature (1)..(207): Xaa is any amino acid
MLGVIDYGAGNLGSVMNALKRLSVPARFAEGPQELSLSSSPFEKIIFPGDGHFATAMASLTQSGYAQALCEWIKADKPFLGICIGLQLLFETSEEAPPVDGREVRGLSVIPGTVRRFPGRKVPQIGWNQTTARKESKIFRGLNDNSFFYYIHSYYADPADDSVCAAQTEYYVRYCCAVERGALAAVQFHPEKSGAAGLALLQNWVGG

SEQ ID NO: 33447 - DNA, 828 bp, Unknown
  Obtained from environmental sample
  misc_feature (1)..(828): n is a, c, g, or t
ttgggtggggggataatgcaagcaaaacgtataattccttgtttggatgttgacgatggcagggtagtaaagggtattaaattcaagggtattcaagacgcgggtgacccaagagaattggctcgccgttacaacgatgaaggcgcggacgagttaacttttcttgacataggcgcttcttacaaaagcagagcgacattactggacgtggtacgtaaagtagccgccgaagtttttattcccctatgtgttggcggaggcatacgcgtcattgacgacatgcgcgatgcgatgaacgcgggcgcggacaaagtttcagtctgcacttccgccctttgccgccccgaattattacgcgaaatggcaaatgcctacggcagccagtgtgtcgtgctttcaatagacgcaaaacgcgtcgagggcggcggagacttgcgctggaatgcctattcccacggcggcaggactgacacgggaattgacgctattgaatgggcaatccgcgccgtagaacttggcgctggagaaatattactcaactcaattgacgctgacggcacaggcggcggctacgatttggaactgactcgccgaatactgaatgcggtccccgtcccggtaatcgcctcaggtggcgcgggtacgcttgagcaaatagcggaagttttacttggtactgcgtcagcggaaatgccaaagaacattacaccggacgaagcgccgggggcggacgcggcattggtggcgtcgcttttgcactttgggaagactagtattcaagagattaaaaagtgtgcggaagtaaagggcgtttgtgttagatggtaa

SEQ ID NO: 33448 - protein, 275 aa, Unknown
  Obtained from environmental sample
  DOMAIN (10)...(258): Histidine biosynthesis protein
  misc_feature (1)..(275): Xaa is any amino acid
MGGGIMQAKRIIPCLDVDDGRVVKGIKFKGIQDAGDPRELARRYNDEGADELTFLDIGASYKSRATLLDVVRKVAAEVFIPLCVGGGIRVIDDMRDAMNAGADKVSVCTSALCRPELLREMANAYGSQCVVLSIDAKRVEGGGDLRWNAYSHGGRTDTGIDAIEWAIRAVELGAGEILLNSIDADGTGGGYDLELTRRILNAVPVPVIASGGAGTLEQIAEVLLGTASAEMPKNITPDEAPGADAALVASLLHFGKTSIQEIKKCAEVKGVCVRW

SEQ ID NO: 33449 - DNA, 1224 bp, Unknown
  Obtained from environmental sample
  misc_feature (1)..(1224): n is a, c, g, or t
atgaatgatataaactcattattaaaacaaatatctctgggcgaggacagcgttctggaacttaaaaacatagaatatacgaatgacaatgtatccgggcctaacaggaattcaatggcggatgaaatggcagcgatgtcaaactcgcatggaggggtaattgttcttggagttaatgataaatcccatgaaataacaggcctgccatttgtaaaattggatattacggaaacatgggcgcgcgatattgccaatgatcttataaaaccgccattggaatgcaggattaaaaagttgtctcatggggaaaaaaacatcatacgcattgatattccgcggagtatttttgtacataaaagtcccaacggatacttttaccgcataggaagctcaaagagggagatgtccccggaagtattggcaagattatttcaacaaagaacgcaaaacaggcttattcgttttgatgaacagatggtaatggatgcgaaccttgacgatctggagcaaaggctctgggagcggtttaagacccccctctcccctcctgataataatgagttccttgaaaaattacagctaatatcccgcgacgaagacggtatgcttcatccgacggtaagcggcatattaatggcttctgaatccccggaacgttatattaaaaacgcctatattcaggctgtatgttataacggagaaaatcaaaattcgccgcagcttgacgcgcaggattttaccggccccctggatatacaaattaaggaagcgtgtaaatttgttaagcggaatatgaaggtaagagcaatcaaggatcccggaagaatagaaaccccccaatattctttgaatgccgtatttgaagccattgttaacgcggttgttcaccgtgattattcgatttacggctctaagatacgtctgcatattttttccgacaggctggaattgtattctcccggaagcgttccaaacacaatgagcatagaaagcatttccctgcggcaatcatcgcgaaacgaactgttaagttctctgcttgcgcgctgtcgcatgaattttgacgctgtaggaagcaagcgtgtgtttattatggataaacggggcgaaggagttcccattatactgtcggaaagcggagaactatccggtaagaaacccgaatatttgttgattgatgatacagagctgcggttaacaatatttgctgcgtttgatatgtaa

SEQ ID NO: 33450 - protein, 407 aa, Unknown
  Obtained from environmental sample
  DOMAIN (46)...(138): Divergent AAA domain
  misc_feature (1)..(407): Xaa is any amino acid
MNDINSLLKQISLGEDSVLELKNIEYTNDNVSGPNRNSMADEMAAMSNSHGGVIVLGVNDKSHEITGLPFVKLDITETWARDIANDLIKPPLECRIKKLSHGEKNIIRIDIPRSIFVHKSPNGYFYRIGSSKREMSPEVLARLFQQRTQNRLIRFDEQMVMDANLDDLEQRLWERFKTPLSPPDNNEFLEKLQLISRDEDGMLHPTVSGILMASESPERYIKNAYIQAVCYNGENQNSPQLDAQDFTGPLDIQIKEACKFVKRNMKVRAIKDPGRIETPQYSLNAVFEAIVNAVVHRDYSIYGSKIRLHIFSDRLELYSPGSVPNTMSIESISLRQSSRNELLSSLLARCRMNFDAVGSKRVFIMDKRGEGVPIILSESGELSGKKPEYLLIDDTELRLTIFAAFDM

SEQ ID NO: 33451 - DNA, 495 bp, Unknown
  Obtained from environmental sample
  misc_feature (1)..(495): n is a, c, g, or t
ttgaagagtcctttcttgggcgcgggtttcggcgttgtatcggcttttgatttttcaaaaatttcttcaagaccgggaagggcgaaatcatcgcctcctaaatccgcgtctctaaatccttcgctgcctaatcctgcatccggcgtacccaattcgttttcaagttcaattgactcggaagcgaaatcactgccaaaatccccaagctcttggctgtctgcgccgcctaaatcatcgtttgaatgtatgctgtcaggcgaaaaatccgtatcaggcaaaggactgtcaaaatcggagcctaaatctgtatcgggcagagaactgccgaaatccgtatccggcagaggactgccgaaatcagtatcgggcaggggactgtcaaaatctgtactagggaaatccgtatccggcagagggctttcaaaatcagaacctgcgcccggttccagagtttcgcctcccatgtcgatgctgtcctcgccggaatcttcatga

SEQ ID NO: 33452 - protein, 164 aa, Unknown
  Obtained from environmental sample
  SIGNAL (1)...(28)
  misc_feature (1)..(164): Xaa is any amino acid
MKSPFLGAGFGVVSAFDFSKISSRPGRAKSSPPKSASLNPSLPNPASGVPNSFSSSIDSEAKSLPKSPSSWLSAPPKSSFECMLSGEKSVSGKGLSKSEPKSVSGRELPKSVSGRGLPKSVSGRGLSKSVLGKSVSGRGLSKSEPAPGSRVSPPMSMLSSPESS

SEQ ID NO: 33453 - DNA, 408 bp, Unknown
  Obtained from environmental sample
  misc_feature (1)..(408): n is a, c, g, or t
ttgaatacaggctttgtcattaatgggttgtggactattgatcctgttaaccccaaagtccgcaaagaccctgtttccggcctatcaatgtctgtgttgtccatacctgcaagacctgcgaattataacccgttaaacggtttaccgcaggggcttaattttacatttttaggaccgccaggagaatctgttacagttgcgggtaattttaacgggtgggacccttttatgtatgaattaaaagaagggcctgccggtgtttactctatcataatcccgcttccgccaggagtatatcaatatgtatttttccatagaggccagcgtattgtagacccgcataatccgcgccgaatttattcacgggacggcaatgcagcttctgaaataattgtaccgcagttataa

SEQ ID NO: 33454 - protein, 135 aa, Unknown
  Obtained from environmental sample
  misc_feature (1)..(135): Xaa is any amino acid
MNTGFVINGLWTIDPVNPKVRKDPVSGLSMSVLSIPARPANYNPLNGLPQGLNFTFLGPPGESVTVAGNFNGWDPFMYELKEGPAGVYSIIIPLPPGVYQYVFFHRGQRIVDPHNPRRIYSRDGNAASEIIVPQL

SEQ ID NO: 33455 - DNA, 696 bp, Unknown
  Obtained from environmental sample
  misc_feature (1)..(696): n is a, c, g, or t
gtgctattcggtttaagctcatatcgctacgattgggcaggtctgttgatgcacgccgagcatttagaggctgtttttggtgttggtcctcataccattagcgttccgcgagttcgcgttgccgaagatgttaatccagatgattttggaaatggcataagcgatgctctgtttgcaaaaatagttgctgttatccgcattgccgttccctacacaggaatgattatttccaccagagaaagcgaacaatccagagggaatgttttagctcttggcgtatctcaaattagcggtgcatcttccacaagcgttggcggctatgcagaaaaagaaaaagccgaagacaactctgctcaatttgaagtgaacgatagccgctctttggatgaggttgtacactggctgttaaatttgggttatgtgccaagtttttgcaccgcctgctaccgccaaaatcgtactggcgatcgttttatgagtttggtgaaaagcgggcagattgcaaatatctgcccttcaaattccctgatgaccttaaaagaatatttggaagattatgcaagtgaagagaccaaagccattggcgagaagattattgccgagcaattggagcttattcctagcgagaagataagggagaaggttagggtgtggctggagaagatacacggcggcgagagggattttagggtttag

SEQ ID NO: 33456 - protein, 231 aa, Unknown
  Obtained from environmental sample
  DOMAIN (32)...(142): Biotin and Thiamin Synthesis associated domain
  misc_feature (1)..(231): Xaa is any amino acid
MLFGLSSYRYDWAGLLMHAEHLEAVFGVGPHTISVPRVRVAEDVNPDDFGNGISDALFAKIVAVIRIAVPYTGMIISTRESEQSRGNVLALGVSQISGASSTSVGGYAEKEKAEDNSAQFEVNDSRSLDEVVHWLLNLGYVPSFCTACYRQNRTGDRFMSLVKSGQIANICPSNSLMTLKEYLEDYASEETKAIGEKIIAEQLELIPSEKIREKVRVWLEKIHGGERDFRV

SEQ ID NO: 33457 - DNA, 672 bp, Unknown
  Obtained from environmental sample
  misc_feature (1)..(672): n is a, c, g, or t
atgaagctggacatagtttacgaggacgattcatgcatagtgatcaataagcccgccggccttgcggtgcagggaggaaagggcataagcgtgtcactggacagcctcctgacccaaagccggcccgtccggcctttactggtacacaggctggacagggatacctccggcctgatccttgttgcgaaaaacaagactgccgccgccgtttactcacgtctgcttggcggggaaaaggctggtggacatcgctccgttgttaagcgatatttggcaatatgcaagggcaggccggcgcaggccgaaggggtaatcagcctggatctggagattaggggcatgaaaaaaaaatccgaaacccgctaccgtttatttgagagcttcaaagacgatttctcccttctggaactggagttgggaacaggcagaatgcaccagatacgccgccatcttgccctgacagggaatcccgtccttggcgatgacaagcacggcgatttcaccctaaaccatctgctgcgaaagacaatgaagctgaacaagctcctcctgcacgcgtctcagttaatcatcccggaaactaaagacaacccacgccttgaacttgaagcgcctttgccggaatattttagcgagttccttaggcaattagcaatgagcaatgagaaatga

SEQ ID NO: 33458 - protein, 223 aa, Unknown
  Obtained from environmental sample
  DOMAIN (11)...(153): RNA pseudouridylate synthase
  misc_feature (1)..(223): Xaa is any amino acid
MKLDIVYEDDSCIVINKPAGLAVQGGKGISVSLDSLLTQSRPVRPLLVHRLDRDTSGLILVAKNKTAAAVYSRLLGGEKAGGHRSVVKRYLAICKGRPAQAEGVISLDLEIRGMKKKSETRYRLFESFKDDFSLLELELGTGRMHQIRRHLALTGNPVLGDDKHGDFTLNHLLRKTMKLNKLLLHASQLIIPETKDNPRLELEAPLPEYFSEFLRQLAMSNEK

SEQ ID NO: 33459 - DNA, 912 bp, Unknown
  Obtained from environmental sample
  misc_feature (1)..(912): n is a, c, g, or t
atgagtgaaaagaataaagacgggcgcggcggcctaaaagtgcgtttttccataggcgcgaaacttattaccattatttcgataattgtattgatttccctgggttccataaccgcgctggtgtcatggctggtacgggaagacctgaaattatccgcggaagtaaacaacttcgatgtgaacaggcgagcggcggcggaagcggagcaaaccctagaaaaaatacgcttgcttgcccttatgttttcgcgcactgcggccgcgcttgggaacaataacgacgcaatacagaatgaagccgattatttcttttcgcagaaccggcagattgcggctcttttttatacttcgcgccagtccgccgcttggacggaacgggtatttgtaaacgaaaattttttcctttcgcgcggaatagagacatctcttgcgaatgcttttcgcctgggcagcggaaaaatgctggaaaaagccgcgatggggcaaacgacgttgatcaacgcatcgccgagatttagcaaaacgcaaacctcaacgtatcttgccgctatgtttttcccgatacagagaggaagcggatgcgttttattctccggcgaaagcctaaacgaaagttttggcatgggcgtaaacgcttcgtatcttataaacgccgacggcgatattgtggcggatgccgaaccggagaatgtaaagaacgcggtaagtctggcggataaggaaattatccgccaaatttttaacagccccgaccgtaacaaacagatgttagtctatcttgacattgaaccggcttcgcgcagtacgacagttcccgccttcatcatccgcttgtgggaatatgtcagtttaaaaatgaatattcgacgggataatacaaagcgcgctattatcttgcctatacgcggctga

SEQ ID NO: 33460 - protein, 303 aa, Unknown
  Obtained from environmental sample
  misc_feature (1)..(303): Xaa is any amino acid
MSEKNKDGRGGLKVRFSIGAKLITIISIIVLISLGSITALVSWLVREDLKLSAEVNNFDVNRRAAAEAEQTLEKIRLLALMFSRTAAALGNNNDAIQNEADYFFSQNRQIAALFYTSRQSAAWTERVFVNENFFLSRGIETSLANAFRLGSGKMLEKAAMGQTTLINASPRFSKTQTSTYLAAMFFPIQRGSGCVLFSGESLNESFGMGVNASYLINADGDIVADAEPENVKNAVSLADKEIIRQIFNSPDRNKQMLVYLDIEPASRSTTVPAFIIRLWEYVSLKMNIRRDNTKRAIILPIRG

SEQ ID NO: 33461 - DNA, 921 bp, Unknown
  Obtained from environmental sample
  misc_feature (1)..(921): n is a, c, g, or t
atgatcagatcggccgaggatttttcgggaagcggcggaaggccgcccgaaaacattggctggaacggtttgtccgacaatggctcagtccgcgagggggtggtttaccccgagcttaccgtacactaccttgacggtcatgtcgcaaacgctaaatccgcgccgatactgattgactcatccggccccgccctggagctgtcatccggtcccgatctgttcagccccgacaatgacggcgtgaatgacgtgttgactatcaggatgaaagcggaagacgtttcccccatcgcccgctggtcattggacatttacgaaccggcaatggagagcgggacaaaccctgttcatattttcaaacattttgaaggcagcgccgcccctgtcgatgagctgatgtggaacggccgcggaaacaacggcgacctggtacagtccgccgttgattatccctatgtctacaccgccacagacgcccttggcaataccagcacaaaaatgggggctttcggcattgacgtactggtaatcagagagggggaccagttcagaatacaaataccctcaatcatgttcccccccgacagcgcggtctttgacggtttgagccagagcacattggataacaacaaccgtgttattaaacgcatcgcgcagatactcaacaagttcaagggctataaggtaaaggtcgagggccacgcgaatccgactacggcctcgggccctgaccgggaacaggaagagccgtcgctgaaggatctcagtgaaaagcgcgcgggatttgttcttgagcagcttgtccgcaacagcgtcgccagaaaccggctttcatataccggcgccggcggctccatgccggtagttccttttgaagatcattccggctgtggaaaaaccgccgtgtggattttattttga

SEQ ID NO: 33462 - protein, 306 aa, Unknown
  Obtained from environmental sample
  DOMAIN (191)...(301): OmpA family
  misc_feature (1)..(306): Xaa is any amino acid
MIRSAEDFSGSGGRPPENIGWNGLSDNGSVREGVVYPELTVHYLDGHVANAKSAPILIDSSGPALELSSGPDLFSPDNDGVNDVLTIRMKAEDVSPIARWSLDIYEPAMESGTNPVHIFKHFEGSAAPVDELMWNGRGNNGDLVQSAVDYPYVYTATDALGNTSTKMGAFGIDVLVIREGDQFRIQIPSIMFPPDSAVFDGLSQSTLDNNNRVIKRIAQILNKFKGYKVKVEGHANPTTASGPDREQEEPSLKDLSEKRAGFVLEQLVRNSVARNRLSYTGAGGSMPVVPFEDHSGCGKTAVWILF

SEQ ID NO: 33463 - DNA, 1206 bp, Unknown
  Obtained from environmental sample
  misc_feature (1)..(1206): n is a, c, g, or t
atgaaaggaacaggacatggacttagtacaacacggctaaagaatgtagacgcttatttgcaacgcatcgtggatcagggcaaggtggcaggagcaggcggaatgatcatacgccgtggcgaagaagcttattgttccagctttggcatgagggatctggaaaaaaaagagcgcctcgaaaacgacgccatataccgcatttggtccatgagcaagacttttaccattgcagcggccatgaccctttatgagaagggctttttcaggcttcacgaaccgattgcggattttctccccgcttttaaggatgtaaaagtcgcggaaactgacaagcgcggcataatcaggctggtaccagcaaaaaatcccattactattgaacatctttttactatgacttccggcttgccctatcccggggaggatagtttttcggcactggccatgggaaaaatttatgaaaaggccataaaggacgcgaaagcgggaaagccatggaacacagccagaatgatagacgaggcggctaaaacgcccctctgtttccatccgggagagcaatggatatacgggttttcccatgatgtgttgggtcggctcatagaagtgatctccggtaaaaccctgggcgaatatctggcggatacgattttcatacctcttggacttaaagatacggcgttttatgtncgcagggagaaacagaacagggtagtaacgccttacagccttgcttcaaacgggctggaaaagataaaagacgaagtcaatgataatgcgactcccaatccccctgcctntgagtcgggcggtggaggcctttgttccactatggaagactgcgccaagtatgcccaaatgctgcttaataacggcaagctggggaacgagcgcgtcctttcccgaaagaccatagagcttatcaggacaaaccattgtgaagaatcaatgctaaggccttcgttctttggccacatggccggttacgggtacggcctgggtgtaagaaccatgttaagcactgccgaatcgggactcaacggttctgttggcgaatgggcatgggatggcttaatgggcacttattactgcgtagatccggctgaggaaatggcagcccttttcttcattcagctcgtatcggggatcaacagcgatcttcagcgtggctttgttcagactgtttacggcgctatcgacgattaa

SEQ ID NO: 33464 - protein, 401 aa, Unknown
  Obtained from environmental sample
  DOMAIN (16)...(398): Beta-lactamase
  misc_feature (1)..(401): Xaa is any amino acid
MKGTGHGLSTTRLKNVDAYLQRIVDQGKVAGAGGMIIRRGEEAYCSSFGMRDLEKKERLENDAIYRIWSMSKTFTIAAAMTLYEKGFFRLHEPIADFLPAFKDVKVAETDKRGIIRLVPAKNPITIEHLFTMTSGLPYPGEDSFSALAMGKIYEKAIKDAKAGKPWNTARMIDEAAKTPLCFHPGEQWIYGFSHDVLGRLIEVISGKTLGEYLADTIFIPLGLKDTAFYVRREKQNRVVTPYSLASNGLEKIKDEVNDNATPNPPAXESGGGGLCSTMEDCAKYAQMLLNNGKLGNERVLSRKTIELIRTNHCEESMLRPSFFGHMAGYGYGLGVRTMLSTAESGLNGSVGEWAWDGLMGTYYCVDPAEEMAALFFIQLVSGINSDLQRGFVQTVYGAIDD

SEQ ID NO: 33465 - DNA, 840 bp, Unknown
  Obtained from environmental sample
  misc_feature (1)..(840): n is a, c, g, or t
atgcgggtcaacgcagtattcagcgaagatgtaacaggaatcgagctgccttttaagccacagagaaggaccgggattcgttataccgggaacagccaattcatcgtaagcgtaggcaaaattgattacacttttggcaattccccgataaacgacgagcgaagggtattgttgattgaggagggaggaaggcaggtcagttacagggctattccggaaagcaaaaccatgactaccgaagactacatccttccccaggcggaaaccgcggaagcttacaacgaagcgatcaaatggtggagggatcagaattactccctgtggaaccgtataatttctacccagaataacgaagaccttgtgattgccctgattaccgaagcctttaacaggggaaattattcctctgcggtcgcggcaattcctcaaacctttttaacgggaagcgccaggacttacgaatcgtcgtcataccttggcaatctggaccaagcgtaccgctcgctcagtgcaagcgaaagggaaaggcaatcccgccttgcgtggcttattagcgaaaaatccctggagttccttttagagccaaaggtatttgagtatttggcaattcggggagatacaaatttatttaattcagctttggagcttgtacgtacaatagacacttccattctggcgatagatatcataccgggaatttttgaagggtattccgcctggatagctttccgtcccggcaccgaaaacccctttgaaagccttattgaccattgttgccagcttatttccgaatcattgaggaaaacgaccgagggtgggtggggtttttgtctacaatga

SEQ ID NO: 33466 - protein, 279 aa, Unknown
  Obtained from environmental sample
  misc_feature (1)..(279): Xaa is any amino acid
MRVNAVFSEDVTGIELPFKPQRRTGIRYTGNSQFIVSVGKIDYTFGNSPINDERRVLLIEEGGRQVSYRAIPESKTMTTEDYILPQAETAEAYNEAIKWWRDQNYSLWNRIISTQNNEDLVIALITEAFNRGNYSSAVAAIPQTFLTGSARTYESSSYLGNLDQAYRSLSASERERQSRLAWLISEKSLEFLLEPKVFEYLAIRGDTNLFNSALELVRTIDTSILAIDIIPGIFEGYSAWIAFRPGTENPFESLIDHCCQLISESLRKTTEGGWGFCLQ

SEQ ID NO: 33467 - DNA, 909 bp, Unknown
  Obtained from environmental sample
  misc_feature (1)..(909): n is a, c, g, or t
atggaaactgtcgtcatagcggatagcggcgaggggcataaggtacggatagacaaaaacgcggcggaagcggacgggattattgtggcgggacggattaagcctcacacagattttcacggcacttatgaaagcgggattatgaaaatgatggcgataggccttggcaaacgggaaggcgcggatatttgccatcaaaacgggtttgggcatatgcctcatatggttcccctttttggaaaaaccattttaaggaacgctccgattatccttggttttggcataatggaaaacgcgtacagcgagacgtgtaaattcatcgctcttaagcctgacgaggttgaagaagaagagccgaagttgcttaacgaagccagaacacatcttccgttaattaattttaaaacgactgatgttttggttgtggaacggataggaaagaatatcgcgggcaccggcatggaccccaatgtaacgggaaccggcccatgcacgccttttattaccgaaggcggtattaccgctttaaggacggcgatccttgatttgacgcaggaaacgcacggcgtcgcctttggcatgggcgctgctcatgttataaccaggcggcttttcaacaagattgactatgacgcgacgtatgtaaacgcggtgacatcgcgcggtgtggaactggtgcggattccttttattgtggacagcgacagggaagcggttcagatggctttgcggacctgtataggcaatgacaaggaacgcccaaagatcataagggtggcggacagtttccataccgagtatctttgggtttctgaatatatgcgtgaggaagcacaggcaaacaagcgcgttgaaatattaagcgaacctgaggaatgggcgtttgataaagacggcaatttgtggtaa

SEQ ID NO: 33468 - protein, 302 aa, Unknown
  Obtained from environmental sample
  misc_feature (1)..(302): Xaa is any amino acid
METVVIADSGEGHKVRIDKNAAEADGIIVAGRIKPHTDFHGTYESGIMKMMAIGLGKREGADICHQNGFGHMPHMVPLFGKTILRNAPIILGFGIMENAYSETCKFIALKPDEVEEEEPKLLNEARTHLPLINFKTTDVLVVERIGKNIAGTGMDPNVTGTGPCTPFITEGGITALRTAILDLTQETHGVAFGMGAAHVITRRLFNKIDYDATYVNAVTSRGVELVRIPFIVDSDREAVQMALRTCIGNDKERPKIIRVADSFHTEYLWVSEYMREEAQANKRVEILSEPEEWAFDKDGNLW

SEQ ID NO: 33469 - DNA, 786 bp, Unknown
  Obtained from environmental sample
  misc_feature (1)..(786): n is a, c, g, or t
atgccctgcgttagcgctgagaaactccgcttctcgtatggcggtaaaagcgtcatagatgatataacgttcactgtcggcaccggcgagacgtgggcggttgtgggccgcaacggggtagggaagtccacgctcataaaatgtctctgcggcttattatcgcctgtacaaggccgtgtgtcgattgacggcatagatatatcaaaaataccgcccaaagagttggccaagaaaatcgcctacgtcccacaaggcacgaccagacccgcccccccgtttacagtgcgtgaatatgtagggatggccctattcccatacggcacaggatttatgggacgattgtcaaccgatagccaaaagcgcgttgacgacgccctaacgctaaccgacacctatcacctatccgaccgggcaatgaacacgctgagcggcggagagttccaaaccgccctgatagccggcgccgtggcgcaatccaccccctttttgctgttggacgaacctacaactcacctagacccgttccataaagaaaatatacggcaagcgatagaacgcatacacaaagagcgaggaacagcggtagtaacagtaacgcacgacgtaaacttcgccctgtctacccataaaaacattctcgcgattattgacggtaaagtattttttaacggaacgaaaaatgaattttgtatagatgccgttaataatttagagaagatattttcgataagattcaatacggtagatatacccggtgacaccggtaaaaaaaattatttttattaa

SEQ ID NO: 33470 - protein, 261 aa, Unknown
  Obtained from environmental sample
  DOMAIN (29)...(218): ABC transporter
  misc_feature (1)..(261): Xaa is any amino acid
MPCVSAEKLRFSYGGKSVIDDITFTVGTGETWAVVGRNGVGKSTLIKCLCGLLSPVQGRVSIDGIDISKIPPKELAKKIAYVPQGTTRPAPPFTVREYVGMALFPYGTGFMGRLSTDSQKRVDDALTLTDTYHLSDRAMNTLSGGEFQTALIAGAVAQSTPFLLLDEPTTHLDPFHKENIRQAIERIHKERGTAVVTVTHDVNFALSTHKNILAIIDGKVFFNGTKNEFCIDAVNNLEKIFSIRFNTVDIPGDTGKKNYFY

SEQ ID NO: 33471 - DNA, 798 bp, Unknown
  Obtained from environmental sample
  misc_feature (1)..(798): n is a, c, g, or t
atgacagattggccgagcccggtcccgggaacgccttctattgaaatgattatttcatccgatcagcacggccatattgtcgcggatgcctgcgatcttgatgccggcgcggatggccagcatcaaatactgcgtgttacgcataaaactgaggattccttcaaccaggaaagcgattttgttgattttaaccttgaaagtataccgcaatcttccgccggccagcgcaactgggccgaaacattcgctaaaacagaaacagaagaagaaaaacgaagatcgccctggcttatcatggtttttgccctgatttttgttattatcgcgattggtttgctgtggtttttcttctttggcgacaagaacgcgaatccattcaaggatatagcttctgctttcaaagataaaccggcttatgaacaacccgctccgcctcctcctccggcagaaaaagttcagccggttgagcctccaccgccgccgccacccccgccgccggagcccgctcctgtggaagcggcgccggttattgaggcgccgaccgctccgcctccggcccgtacgcaaacagccgcgcggaagcgtccgcccgctccggtttcctcatacaaggttccggcagtcataccgaaaaacggcgtcgcgtaccagatacgctggggcgatactctgtgggatatttccgcggccttctaccggaatccctggctgtatccccgtatcgcgcggcacaacaatatccgtaatccggatttgattatttcgggcaaaacgatcaggattcccccgaagaattaa

SEQ ID NO: 33472 - protein, 265 aa, Unknown
  Obtained from environmental sample
  DOMAIN (216)...(262): LysM domain
  misc_feature (1)..(265): Xaa is any amino acid
MTDWPSPVPGTPSIEMIISSDQHGHIVADACDLDAGADGQHQILRVTHKTEDSFNQESDFVDFNLESIPQSSAGQRNWAETFAKTETEEEKRRSPWLIMVFALIFVIIAIGLLWFFFFGDKNANPFKDIASAFKDKPAYEQPAPPPPPAEKVQPVEPPPPPPPPPPEPAPVEAAPVIEAPTAPPPARTQTAARKRPPAPVSSYKVPAVIPKNGVAYQIRWGDTLWDISAAFYRNPWLYPRIARHNNIRNPDLIISGKTIRIPPKN

SEQ ID NO: 33473 - DNA, 768 bp, Unknown
  Obtained from environmental sample
  misc_feature (1)..(768): n is a, c, g, or t
atgcgtacgatgacaaataaaattaccgcgtacgcgccgcagggcgattccgagtacatagacagcatatataaagacgcagtatcggcctatgagcaggcaatcaatactatacatgaatttaaagcccttttaaaaataaaccctcttttgaatgaagaagagaggagtacccgcctttataacgctgacatgctcgagacgtatgtgcggcagtataaaaatgaaatttgcgaccccattacggaagccgcccgcgccggcgattatgaaaaagccatagagatactcagcagtatgggagaactcgtaaatgaaacaagatcgcatgtcgccgccctgcgcgagttagcgaccgccgtggcggaaagatcaagtaacagagcgcataataccgcaagccaatccaaaataatgttggggataacttccgtcattgctatcgttgtttcaataattttggctatgttgatagcctcactcatcgcaagaccgataaaaaaaatgaccgatgtggcgaatgacgtggcgaaaggaaacttgagtgtaaatatcgacacgtctacaaaagacgaaacaggcgaattggcaaagagtttcacggatatcgttaacgtcatcaatctacttacaacggaactgaaaaatttaagcaaggacataaatactgacagcgacgcggacgtgaaattggatgccgcccgtttctcgggcgcttacagcgaagttgtcgaaagcataaatacattcaccgacgccctcccttga

SEQ ID NO: 33474 - protein, 255 aa, Unknown
  Obtained from environmental sample
  DOMAIN (140)...(209): HAMP domain
  misc_feature (1)..(255): Xaa is any amino acid
MRTMTNKITAYAPQGDSEYIDSIYKDAVSAYEQAINTIHEFKALLKINPLLNEEERSTRLYNADMLETYVRQYKNEICDPITEAARAGDYEKAIEILSSMGELVNETRSHVAALRELATAVAERSSNRAHNTASQSKIMLGITSVIAIVVSIILAMLIASLIARPIKKMTDVANDVAKGNLSVNIDTSTKDETGELAKSFTDIVNVINLLTTELKNLSKDINTDSDADVKLDAARFSGAYSEVVESINTFTDALP

SEQ ID NO: 33475 - DNA, 1167 bp, Unknown
  Obtained from environmental sample
  misc_feature (1)..(1167): n is a, c, g, or t
ttggcgctggcccgttcccaggaaggtgaagaccggagactggtgctgcaatccctggaacaggctataggaaccaaacgctggaaatattataccgaagcccaggcgcggcttttacaggcggatcagcttatcattatgcgccgttatgcgtcagcgctgagcacgcttgccgtgtataaaaccattgccggagaaaatgccgatctgacgctgctgcgccttgccgctcttaaaggtcttaccctgaatgggcaggtcaacagcgggagaccggcccccggcgcaatgcctccgcctgttccggcggaattccgccggcgtatgcttgaagccctggaacgttatccccgtgatcctcgtcctctgcgtatgtttcttaattacgcaaaggggcgcgaacttgatcgggatgatagagcccttatggaaaccgccctgcggcggctgtcctttctccttgaagcggatccggaactcgcatggatggcggctcctttcatcagtgatgacgaccaggcgcggcggatggtggcggcttatcgcgccggctccctgaagtcccgcgctgacattggtttcaggcccaatcccgcttcgttaatacccgcgctgaatctggggcttgtcgatgactttaacgcggcggatgaattgtttgctgaaactactctggaaaaagaaattattgttgatattggcgatctgctgcgcagcggggaggggagggattacttcgtccgtaaactccattcgtttaccggcgcgctaaccgcggatgaagacggcgacggctatgcggaaagccgcgctatgtaccggcagggaaatttgcaggagtattactgcgacaccgatcagaacggcattaccgatttgtttgttttatttaacgcgggtacgcccatgcgggcggaaattacaaccctgccgtcacagggaggcggcaggacggaagcgttaattctgtgggaacgttatcccgcggtacagagggtagttctgggaaacgaaaactatttgcccgcgccggcgggatttcagtttgttccggttaatcttatagaattgggcgcgtcagacaattatgccggcctcatgtttcccctgcgtaattcccgcagtccggacataagccggcatatgctctcggccaatctgtcatga

SEQ ID NO: 33476 - protein, 388 aa, Unknown
  Obtained from environmental sample
  misc_feature (1)..(388): Xaa is any amino acid
MALARSQEGEDRRLVLQSLEQAIGTKRWKYYTEAQARLLQADQLIIMRRYASALSTLAVYKTIAGENADLTLLRLAALKGLTLNGQVNSGRPAPGAMPPPVPAEFRRRMLEALERYPRDPRPLRMFLNYAKGRELDRDDRALMETALRRLSFLLEADPELAWMAAPFISDDDQARRMVAAYRAGSLKSRADIGFRPNPASLIPALNLGLVDDFNAADELFAETTLEKEIIVDIGDLLRSGEGRDYFVRKLHSFTGALTADEDGDGYAESRAMYRQGNLQEYYCDTDQNGITDLFVLFNAGTPMRAEITTLPSQGGGRTEALILWERYPAVQRVVLGNENYLPAPAGFQFVPVNLIELGASDNYAGLMFPLRNSRSPDISRHMLSANLS

SEQ ID NO: 33477 - DNA, 849 bp, Unknown
  Obtained from environmental sample
  misc_feature (1)..(849): n is a, c, g, or t
ttgagaatccccgctgtggaaaatctttctatagacgatattgatacaaatgttgaactgaacgcggaagaaaatattagctttgccggcagctttaccgacgacctcgtaactgatgctgccgagacaagcatcgagattgatacgggagacagcggccctgccggcggcctggacgatggctttgaccttgccggtgacctcgccctggacgatgctgaaccgagtgtcgaacttgacacaggagacagcgatcctgccgatgctctcgctctggacaatgcagaaccgagcgtcgaacttgatacgggagacagcggccctgccggcggcctggacgacggccttgaccttgctgatgacctcgctctggacaatgcagaaccgagcgtcgagcttgatacaggagacagcggttctgccgatggccttaccgatgatcttaccagtgatcttgctctggatgactttgacgcgggtatcgatcttgcggcgctgccggatgcacaaaaagacaacggttctgtcagcagtcttgccgatgacgaccttaccggagtcattcccgaagcttttgaagtaaacgcgggagaagcccctgttgatgacgatctggaagtttttgacgaaggggaaataagcctgcctgaaacctccgcggccaaaaccgccggcgctgatgccgaagatgttgatattccggcaaatttcaagagtgaacttaaaagcgtgttgtcatacatggatcgtcttctggaatctctccctgaagataagatcgaagaattcgcaaaatccgaatactttgattcgtacaagaagatattcaaggaactgggactggtgtag

SEQ ID NO: 33478 - protein, 282 aa, Unknown
  Obtained from environmental sample
  misc_feature (1)..(282): Xaa is any amino acid
MRIPAVENLSIDDIDTNVELNAEENISFAGSFTDDLVTDAAETSIEIDTGDSGPAGGLDDGFDLAGDLALDDAEPSVELDTGDSDPADALALDNAEPSVELDTGDSGPAGGLDDGLDLADDLALDNAEPSVELDTGDSGSADGLTDDLTSDLALDDFDAGIDLAALPDAQKDNGSVSSLADDDLTGVIPEAFEVNAGEAPVDDDLEVFDEGEISLPETSAAKTAGADAEDVDIPANFKSELKSVLSYMDRLLESLPEDKIEEFAKSEYFDSYKKIFKELGLV

SEQ ID NO: 33479 - DNA, 846 bp, Unknown
  Obtained from environmental sample
  misc_feature (1)..(846): n is a, c, g, or t
atgacagattggccgagttgtaatgggaaatttatacgttggcacaatctctttaaaaataaaaataatgatgaagacttaatttctttttatccggatgaaataaaaagagattataaggaattgttttgttattggctggttgaatatgtgcctaaaaacaagaattcttcttatgacgcaaaattagaggtaagaagtcttagcactcttaaggaaataaggtttttaacaaaacgatttaacgaagaatatcaagataaaatttacgagctaacagattcagacagaaataatattgaagaattacctgaaatagttgaagagacgaaaataattaaagaaccacagagtattttatctgattttgaaaatttggggatttgggaaacaaaacaacgatttatcgaagctcttggcagtgtaaaggaaaaaattctgatagaaagtccatggattaaacaggcaacgcgagagtatgttccgttttttgaaaaattattaagccaaagaaaacgcttgataattttatatggtatggttgataaagacgagcatgatattgggattgtagaaaaacttaaaaacttgcaaaaacagtatagtaattatttcaacttgatccatctaccaacacattttgaaaatattaatttaagattaaaaggcacacaccgtaaattaatgatcaaagataatgaatattatatttcaggcagttttaatttcctttcctttggaaagcaggaaaatcaaaaagtctcaaatgaagaatcgcacctaataagaaaaaaagtaaaagaaaaatgggaatcagttatgaaagaatatttaatcaaactttga

SEQ ID NO: 33480 - protein, 281 aa, Unknown
  Obtained from environmental sample
  misc_feature (1)..(281): Xaa is any amino acid
MTDWPSCNGKFIRWHNLFKNKNNDEDLISFYPDEIKRDYKELFCYWLVEYVPKNKNSSYDAKLEVRSLSTLKEIRFLTKRFNEEYQDKIYELTDSDRNNIEELPEIVEETKIIKEPQSILSDFENLGIWETKQRFIEALGSVKEKILIESPWIKQATREYVPFFEKLLSQRKRLIILYGMVDKDEHDIGIVEKLKNLQKQYSNYFNLIHLPTHFENINLRLKGTHRKLMIKDNEYYISGSFNFLSFGKQENQKVSNEESHLIRKKVKEKWESVMKEYLIKL

SEQ ID NO: 33481 - DNA, 384 bp, Unknown
  Obtained from environmental sample
  misc_feature (1)..(384): n is a, c, g, or t
gtgccccaggaaaatacaattgaaggttccgtgccgccggtttcaacacagccgcccgcgacagcggacaatatcattcctgaaatgccgcaggacacgccgcctgaggtttttctgcaaaaggccaaagaattattcgacgagggcaaatttccttcggcaatcgcaatgcttgatctgttccgtgaacgctacccttcggaaagcgacgaagcgtattggcagtacggccagttctacgaagccaataccccagaccgggacattcttaccgcgctggattactaccgccgccttgtgcgggaatatccccaaagcaatcgctttaatgacgcccgcagaagaattgcgtatctggaaaggtattacattaatattcaataa

SEQ ID NO: 33482 - protein, 127 aa, Unknown
  Obtained from environmental sample
  misc_feature (1)..(127): Xaa is any amino acid
MPQENTIEGSVPPVSTQPPATADNIIPEMPQDTPPEVFLQKAKELFDEGKFPSAIAMLDLFRERYPSESDEAYWQYGQFYEANTPDRDILTALDYYRRLVREYPQSNRFNDARRRIAYLERYYINIQ

SEQ ID NO: 33483 - DNA, 1266 bp, Unknown
  Obtained from environmental sample
  misc_feature (1)..(1266): n is a, c, g, or t
ttgatgaagaacacgacgcgctcctataaatccggtaacacgccgcgttaccatgcaaggcaggtcgctcttcgccgctgttcactggagggagcgcgtcttgtaatgggctccgctactccttcggctgaagcgtggaaacttatatcggaaggcgaaattaaacgtcttgatctgtcgcgccgtctttcaggcggtaaaatgccggaaataaaacttgtaagtctctcaaaaacagaaggctgccttacaaaagaattgaaagatgaaatccgcataacagcgcatatgggaagacagacaatcctttttttaaaccgcaggggtttcgcctatttttaccagtgtcctgactgcggctgggaacaaacctgccgccgctgctcggtttcattaacatggcacaaaagccgaaaccgctgtgtctgtcattactgcggctacagcgaacctccgcctgtgtcctgtccaaaatgcggctcggtagaagcgggttaccggggttttggaaccgaaatgatcgaggatgaggttaaccgcgcttttcctgatttgcgagttcgccgtgttgataccgataccataaaaaaaagcggaggacgctccgtaaacaaccttgaagaaacacttactctttttaagacaggaatgattgatatccttttgggaacccaaatggttgccaagggattaaattttccgggtgtgcgacttgtcggagttgtctttgctgatacagggcttcatttgccggatttccgcgccgccgagcggactttttccctagttgtacaggtggcgggccgggccgggcgttattttcccgacggcaaagttattgtgcagactttgcgcatgggagacccggttatcacccgttcctgcgccgttgacgttgaaggctttttcaacgcggaactcgcccagcgcaaggcattgcaattccctccctatacccgccttatccgcatgaacatccgcggcagggacgcttcccgcgctgatatggcaattaaacggttagctgacattgcaaccggaggcggcgcctccggctccctcatgccgccggacgccgatatgctcggtccggcggaatgtcccatcggcatcatcaacgggaaccaccgccgtcagcttatcctgcggggccgctctatgggcacgctgcacgccgcggcgcgactcatactggaacgctacgagcagggccgcgacagccgggtgtatctggaagttgacgttgatccggtgagtttgctgtaa

SEQ ID NO: 33484 - protein, 421 aa, Unknown
  Obtained from environmental sample
  DOMAIN (179)...(274): Helicase conserved C-terminal domain
  misc_feature (1)..(421): Xaa is any amino acid
MMKNTTRSYKSGNTPRYHARQVALRRCSLEGARLVMGSATPSAEAWKLISEGEIKRLDLSRRLSGGKMPEIKLVSLSKTEGCLTKELKDEIRITAHMGRQTILFLNRRGFAYFYQCPDCGWEQTCRRCSVSLTWHKSRNRCVCHYCGYSEPPPVSCPKCGSVEAGYRGFGTEMIEDEVNRAFPDLRVRRVDTDTIKKSGGRSVNNLEETLTLFKTGMIDILLGTQMVAKGLNFPGVRLVGVVFADTGLHLPDFRAAERTFSLVVQVAGRAGRYFPDGKVIVQTLRMGDPVITRSCAVDVEGFFNAELAQRKALQFPPYTRLIRMNIRGRDASRADMAIKRLADIATGGGASGSLMPPDADMLGPAECPIGIINGNHRRQLILRGRSMGTLHAAARLILERYEQGRDSRVYLEVDVDPVSLL

SEQ ID NO: 33485 - DNA, 1350 bp, Unknown
  Obtained from environmental sample
  misc_feature (1)..(1350): n is a, c, g, or t
atggaaatcgtaccgttccgctacgatattccgagcctgataaatgatacagcgcagatgaattatatgcgctgtgactcaaggcctattgaatttatcgttgcggtagatcccaatacccctctggatctgataggcgacgggcttcgtgttaaacaggttttgaacaatctgctttccaacgcgtttaaatacaccaaagagggcgaagttgagctgtcggtctgctttgaacctgccggcagcgatgaagacgtaattatcgtttttaagatacgcgataccgggcagggcataccgcaggatcatgtcggcagactgtttcaggattatatgcggatcaacagtgatttaaaccgttccgtttcgggaaccggtttagggcttagcattaccaaacgtctcctcaatttaatgaaaggcgaaattaccgtcgagagccagccgggcaagggctcggtgtttaccgtgcgtcttccccagaggcgctacggggacgccgtatgcggagaggataatgtgcggcggctgcgggatttcagttttagcagcaacgcaattgctaaaaagacgaagattgtacgtgaatatatgccttacggcaaagtcctgattgttgacgacgttaaatcaaatctgtttgtcgccagaggcttgctgacgccctacggtttacatatcgactccattgacaacggggttgaggccgttgaaaaaatcaagaacggcaatgtatacgacattatcttcatggatcacatgatgcctgtaatggacggcattgaagcggtaaaaataatacgcgaaatgggctatacccgcccaattgtagcgttgaccgccaacgccatatccggacaagcgcagatgtttttggaaaacggctttgacgccttcatttcaaagccgattgactcacgtaagctgaactccatattgaaagattttatccgcgacaaacaaccgccggaagtcattgaggcggcgcggcgggagcagcagcaaaaaagcgctagagtaaaagaaagccctgcggacaagaaaaaagaattatccgaactggaagaaatttttttgattgacgccggaaatgccgtgaatttattggaaggattatacgctaaaataaacgagcttggcgaaaaggatatggaattgtacagagttaccgtccacggctcgaaaaacgcccttaacaacatcggcgaaacaaagctttccgaaacagcgcgtaaattggagatggcggcaaaagaaaatgatgtcgcggtattgtcaaatgaaaccccggcgtttatagacgcgcttaaatctgtaatagacaaattatcaattaacagtgagcaatga

SEQ ID NO: 33486 - protein, 449 aa, Unknown
  Obtained from environmental sample
  DOMAIN (201)...(314): Response regulator receiver domain
  misc_feature (1)..(449): Xaa is any amino acid
MEIVPFRYDIPSLINDTAQMNYMRCDSRPIEFIVAVDPNTPLDLIGDGLRVKQVLNNLLSNAFKYTKEGEVELSVCFEPAGSDEDVIIVFKIRDTGQGIPQDHVGRLFQDYMRINSDLNRSVSGTGLGLSITKRLLNLMKGEITVESQPGKGSVFTVRLPQRRYGDAVCGEDNVRRLRDFSFSSNAIAKKTKIVREYMPYGKVLIVDDVKSNLFVARGLLTPYGLHIDSIDNGVEAVEKIKNGNVYDIIFMDHMMPVMDGIEAVKIIREMGYTRPIVALTANAISGQAQMFLENGFDAFISKPIDSRKLNSILKDFIRDKQPPEVIEAARREQQQKSARVKESPADKKKELSELEEIFLIDAGNAVNLLEGLYAKINELGEKDMELYRVTVHGSKNALNNIGETKLSETARKLEMAAKENDVAVLSNETPAFIDALKSVIDKLSINSEQ

SEQ ID NO: 33487 - DNA, 561 bp, Unknown
  Obtained from environmental sample
  misc_feature (1)..(561): n is a, c, g, or t
atggcaattaaaacatataggccaataacgcctggaatgcgtcagtggacaagcctggattattcagacctgacaccgggcgtaaaacctgaaaaaagccttaccaaaggcaaacccgcgaacgcggggcgggattccaacggcaggatcagcgtgcgccaccagggcggcggacacaagcgccgttaccgcgtaattgattttaagcgggacaaaaccgggattcccggcaaggtcgcttccattgaatacgatccgaaccgcaacgccaacatcgcccttatcttttataaagacggcgagaaacgttacattatcgcgcccaagggcctggttgtgggcaataccgttatcagcgggccgaacgcccccatcgaaacaggcaacgcgcttccccttgagaacattcccctgggctttaccatttgcaatatcgaactgactctgggcaaaggcgcgcagatggcccgctcggccggagccggcgcgttaatagtagccaaggaaggcgactacgtgaccgtcaaactgcctttcgggcgaagtccgcatggtgtttaa

SEQ ID NO: 33488 - protein, 186 aa, Unknown
  Obtained from environmental sample
  DOMAIN (125)...(186): Ribosomal Proteins L2, C-terminal domain
  misc_feature (1)..(186): Xaa is any amino acid
MAIKTYRPITPGMRQWTSLDYSDLTPGVKPEKSLTKGKPANAGRDSNGRISVRHQGGGHKRRYRVIDFKRDKTGIPGKVASIEYDPNRNANIALIFYKDGEKRYIIAPKGLVVGNTVISGPNAPIETGNALPLENIPLGFTICNIELTLGKGAQMARSAGAGALIVAKEGDYVTVKLPFGRSPHGV

SEQ ID NO: 33489 - DNA, 510 bp, Unknown
  Obtained from environmental sample
  misc_feature (1)..(510): n is a, c, g, or t
atggccgagcggcacgagatgcgcaacagaatgaaaaaaatgtacgactatctgtacccgatcgaaagacgcgtaatgacagaaagacttgaatggcttgaaagagaatattacaggtttgattacatgatcaacccgtaccacctccagccgggactcctcttggacgtagatattacatccattaagaggaaaaaagtcactctggacgcaatggcgaacgtactcaatgagttcctccacggcgtatccaagggcttctctgacgccgcgtttgcgtcattcagccgcagaagatcaaccgttcgcgaagatatcaatcagtcatttgccactgtttccgaagaagaagaagaaccagccgttgcggcagccgctcctaaaccaagacaggctgcgattgcggcgcctaaatcgtccgcgaagaaacccgcgcccaagaagaaaggcgttgttgattcaaaagcgaanaggaaaaagtcttcacgcggtggaattgctgaactttaa

SEQ ID NO: 33490 - protein, 169 aa, Unknown
  Obtained from environmental sample
  misc_feature (1)..(169): Xaa is any amino acid
MAERHEMRNRMKKMYDYLYPIERRVMTERLEWLEREYYRFDYMINPYHLQPGLLLDVDITSIKRKKVTLDAMANVLNEFLHGVSKGFSDAAFASFSRRRSTVREDINQSFATVSEEEEEPAVAAAAPKPRQAAIAAPKSSAKKPAPKKKGVVDSKAXRKKSSRGGIAEL

SEQ ID NO: 33491 - DNA, 972 bp, Unknown
  Obtained from environmental sample
  misc_feature (1)..(972): n is a, c, g, or t
atgaactcgcgcgttttggataacgatcacattgcacttgaatcgcgtgaaattgaatctctctctgatgaagaactgtcgagacagttattaaaaatcagggtaatcgcgcgaagtacgccgtctgttaaaatgcgtgttgttaatctgcttaaggcgatgggaaatgttgttgcggtaacaggagacggcattaacgacgcgcctgcgctcaaaaacgccgatgtcggcattgccatgggaatttgcggcactgaagtttccaaagaagcgggcgatatcgttcttctggatgattcattttctacaattgtcaacgctgtccgctgggggcgcggaatttatgaaaatttcaagcggtttatcagttttcagcttacagtcaatgtatccgcagttactgtcgtacttgtatcaatactgatggggttaaaagctccgtttacggcccttgaacttttgtggataaatatcatcatggacggtccgcctgcgcttactttaggactcgagccgatttacagcgatcttatgaaaagaccgcccgtaaaacgaagcgaagatattctgtcgcgtccgctgcttacgcgtatcggattaacagggctatttatttcaatagtgtttttgcttcagtatatacttaattttttggatgcggaaccaaatcagacaaacacagtcctttttacaatgttcaccctattccagttattcaacgcgtttaattgccgtcaactgcaaaatgacagcattatcagaaacttttttaagaaccgcataatgcttgtagttacagggatcacttttattatacaaattttgataattcaatacgcgggagccgtattcggtacaactccgctgcctgtttccatgtggctgaaactgtttgcggtaactttctgtgtaattatagtatctgaaattgctaaaaattctaataaatgcctcacacacaggaagcaataa

SEQ ID NO: 33492 - protein, 323 aa, Unknown
  Obtained from environmental sample
  DOMAIN (180)...(318): Cation transporting ATPase, C-terminus
  misc_feature (1)..(323): Xaa is any amino acid
MNSRVLDNDHIALESREIESLSDEELSRQLLKIRVIARSTPSVKMRVVNLLKAMGNVVAVTGDGINDAPALKNADVGIAMGICGTEVSKEAGDIVLLDDSFSTIVNAVRWGRGIYENFKRFISFQLTVNVSAVTVVLVSILMGLKAPFTALELLWINIIMDGPPALTLGLEPIYSDLMKRPPVKRSEDILSRPLLTRIGLTGLFISIVFLLQYILNFLDAEPNQTNTVLFTMFTLFQLFNAFNCRQLQNDSIIRNFFKNRIMLVVTGITFIIQILIIQYAGAVFGTTPLPVSMWLKLFAVTFCVIIVSEIAKNSNKCLTHRKQ

SEQ ID NO: 33493 - DNA, 720 bp, Unknown
  Obtained from environmental sample
  misc_feature (1)..(720): n is a, c, g, or t
atgcagaaaatattcggtataaccgcccccgctcttttttttgataccatgctgcacgcaggaacattgattgcagtttttattgttctcaggcgcgatatttgggatattttacggaatttaatccagccgcttacaggtttcctaataatagctacaattccggctgtcattgccgcgcttgtttttggagacattatcgaacatttttttgaatcgggacaatttctcggcgtttgttttctcgcgacatcatttatattgtttgctgctgaacggctttcaaaaagaggagacaaaaaagaccgcgaaaaaatgaactggcttgacgcattaatcacaggcatcatgcaggcaatcgctattattcccggtatatcgcgttcaggcgcaacaatatccggcgctctttcccgcaaacttgacagagactttgcggcgcgtttttcatttttactttccattccggcaatactcggcgctgttgtcattcaatcaaaaaatttattaaaaaacggagctgcgcaaacagcaggtgaaaacatcggaacggctgccgtaatcgcgggaacaataagcgccgcaatcgtcggtttttttgcagtgaaatttatgttaaaaataatcagggaaaaatcactttacggatttgccgtttataccgccgtacttggaatactggttttaaccgatcaatttatcacaaggtttattttttaa

SEQ ID NO: 33494 - protein, 239 aa, Unknown
  Obtained from environmental sample
  SIGNAL (1)...(20)
  DOMAIN (1)...(228): Bacitracin resistance protein BacA
  misc_feature (1)..(239): Xaa is any amino acid
MQKIFGITAPALFFDTMLHAGTLIAVFIVLRRDIWDILRNLIQPLTGFLIIATIPAVIAALVFGDIIEHFFESGQFLGVCFLATSFILFAAERLSKRGDKKDREKMNWLDALITGIMQAIAIIPGISRSGATISGALSRKLDRDFAARFSFLLSIPAILGAVVIQSKNLLKNGAAQTAGENIGTAAVIAGTISAAIVGFFAVKFMLKIIREKSLYGFAVYTAVLGILVLTDQFITRFIF

SEQ ID NO: 33495 - DNA, 861 bp, Unknown
  Obtained from environmental sample
  misc_feature (1)..(861): n is a, c, g, or t
atgtgggaattgcataaccccttaacaaagcgcatataccgaaacaccagccgttttatggaatggtccgacggaagaacagtccatattcaaaattcaatcgatgtaaccgagttaattatggcaaaagaaaaggcaattcacgctaacaacgcgaaaagcaatttcctagctaagatgagccatgagatacgcaccccgatgaacgccattctgggcattaccgagattcaactgcaaaataaaaatatccccgattacattcaggaagccttggggaaaattaacaattcaggctatttactgctcggcatcataaacaacatactggacatgtcaaagatagagtcgggcaaactggaactgtcggtcgccggttacgacgtgccaagcctgataaacgacacggtccacattaacgtcgtattgtacgacaacaaacaaatcgacttaacccttgacgttgacgggaatatcccgtcaagactgctgggtgacgaactgcgcatcaagcaaattattaacaacctgctttcaaacgcgtataaatacacggatgaaggcgaaatatcaatgtcaatttccgccgaatatcaggaagatccgtcgatggtgacgcttgttttccgcatagcggacaccgggcagggaatgaccggggaacaactggacaaattatttgatgagttcacccgctttaacacggacgttaacagcaaggtggaaggcaccggtcttggaatgagcattacgaaacaacttgtcgttttaatgggcggtaaaatcgacgttgagagcgaatccggcaaaggctcagtgtttaccgtgcgcctgcccgcaaaaaatagacagcgaagataa

SEQ ID NO: 33496 - protein, 286 aa, Unknown
  Obtained from environmental sample
  DOMAIN (52)...(118): His Kinase A (phosphoacceptor) domain
  misc_feature (1)..(286): Xaa is any amino acid
MWELHNPLTKRIYRNTSRFMEWSDGRTVHIQNSIDVTELIMAKEKAIHANNAKSNFLAKMSHEIRTPMNAILGITEIQLQNKNIPDYIQEALGKINNSGYLLLGIINNILDMSKIESGKLELSVAGYDVPSLINDTVHINVVLYDNKQIDLTLDVDGNIPSRLLGDELRIKQIINNLLSNAYKYTDEGEISMSISAEYQEDPSMVTLVFRIADTGQGMTGEQLDKLFDEFTRFNTDVNSKVEGTGLGMSITKQLVVLMGGKIDVESESGKGSVFTVRLPAKNRQRR

SEQ ID NO: 33497 - DNA, 1515 bp, Unknown
  Obtained from environmental sample
  misc_feature (1)..(1515): n is a, c, g, or t
ttgcaaaataaagtcattgagattgaaacaaaccataaacaaatattaattgaatacttaattttaaaagaacagtacgacctactggtatacaaacggtttgtgcgaagcgccgagcaattgcttgccgacgaaaagcagcagcctttatttaccgaggaagccgaacagcctgaaacaaacgaagaaaagcctttagagcttcaaacggttaaatcgtttacacgcaagaagaacggcgggcgcaagccgattagcgcaaaccttgagcgaaggccaagggtcatagacataccggaaagtgaaaaaacatgcgcttgcggggcgaatttgacccggattggcgaagaaaccagcgaaaaactggttataacacccccgcagatttatgttgaccaaatagtcaggccgaaatacgcctgcaggcaatgcgaagggacggaagacgaagacaagcctgcggtgcgcatcgcgcctgtggagcctgcaattattccaaagagcatagcgagccccagcttgctggcaaccgtcttcacgcaaaagtttgaaatgcaccttccctattacaggcaggaaaaacagtttgagcagataggggctgcgataagccgccaggatatgagcaactggcagcagcaggcgtatggaaaacttaaaccgttattcgccatgctcaaagaaacggtaaaaagcggccctgtgctgcagatggatgagaccgaggtacaggtaataggggaagaagaccgaagcgatcttcagaaaagctatatgtggcttgcccgcggcggccctgtcggcaaaaaagtaatttggtatgagtaccatcagactcgcgctgcatataacgccattgaattccttcaagggtattgcgggtatctacaaacagatgggtacgatgggtatgacagcgcggccaaagaattgcccggaataatacaggtgggatgtttcgcacacgcaaggcggaagttttttgaggctgccaaaataagctctaaaggccggtctgccgaggaaggcataaaatatatccgcaggctctaccagcttgaggatacgctgcggagcaaatggaaagacgaccttgaaaaattccatgaagaccggaaaaaagaagcggcccccatattagctgaatttgagcagtggcttttaaaacgggtggatgaagtgccgcctaaggtactgttgggagaagcgatacgctatacccttaaccaatgggacaaattgataaagtacattgaaagcccctatttgactcccgacaacaatgcctgcgaaaacgcgatacggccttttgtcatcgggagaaaaaactggctgttctgtcagagcgtagacggggccaaaagttcatgcggtatgtttacccttatagagactgcaaagcagaatggccttgttccgtttaaatatctgatggctgtttttgagaaagccccgtttgccttaactcctgaagactgggaaaaactgcttccctggaacatttttaccgcttaa

SEQ ID NO: 33498 - protein, 504 aa, Unknown
  Obtained from environmental sample
  DOMAIN (111)...(313): Transposase IS66 family
  misc_feature (1)..(504): Xaa is any amino acid
MQNKVIEIETNHKQILIEYLILKEQYDLLVYKRFVRSAEQLLADEKQQPLFTEEAEQPETNEEKPLELQTVKSFTRKKNGGRKPISANLERRPRVIDIPESEKTCACGANLTRIGEETSEKLVITPPQIYVDQIVRPKYACRQCEGTEDEDKPAVRIAPVEPAIIPKSIASPSLLATVFTQKFEMHLPYYRQEKQFEQIGAAISRQDMSNWQQQAYGKLKPLFAMLKETVKSGPVLQMDETEVQVIGEEDRSDLQKSYMWLARGGPVGKKVIWYEYHQTRAAYNAIEFLQGYCGYLQTDGYDGYDSAAKELPGIIQVGCFAHARRKFFEAAKISSKGRSAEEGIKYIRRLYQLEDTLRSKWKDDLEKFHEDRKKEAAPILAEFEQWLLKRVDEVPPKVLLGEAIRYTLNQWDKLIKYIESPYLTPDNNACENAIRPFVIGRKNWLFCQSVDGAKSSCGMFTLIETAKQNGLVPFKYLMAVFEKAPFALTPEDWEKLLPWNIFTA

SEQ ID NO: 33499 - DNA, 1284 bp, Unknown
  Obtained from environmental sample
  misc_feature (1)..(1284): n is a, c, g, or t
ttgtctgggagaagcaaaatgaaaaataaaagcccgcgaatattcattaagatatttgcttacaccgtgtttttcgttatgtttatttgtttgacagcggcattgctcttttcgcgccaattcctttcgttttaccgtacggagcaggagcgtcagctttccgagtcttttcagccaataataattacaataacagagaaggacagaacgcctgaagaaactgcggacatcgcgcgcgcattcgcggatagcaaccagtcgttcaggtttcagattcaggaaaaaggcggcgatgttctttttgcaaccggcaatttaaagggcggggggcttccgtattcctctaatgaaatagtgatagggacttacactgttatgagcgatctatttgtagcagaacaaagaggaaacgcaagaaacgatttagtgtttatcggctacgggccgcaaattgattacagcgcccttgccttgcgatcattgctgggcgtttcagttatgcttgcgattgcggttcttggagcgttcatttttgcccggaaaataacaaagcccctccaggacgaaataataagggaaagagcgatagaagaaaaccaaaggctgtttttttccgccgcgtcccatgagctaaagactccaattgcggcggccagggcattggtggaaagcatgattgccggagtgggggattataaggatcatcccaaatacctgcgtgaatgtttaaaaaccctggattcccaggcccatctggtttcggaaattctggaaatcgtaaaactttctgatgcaaacgcggggacagcgtccgatggattggcggacgccgattcgcaggcggcttccctggacttggcggacttgggcaacacggttcttaccgaataccgccctctggcagaacaacggggcctttctattcagggagattttcctgccgtgtccgttaaagctaaccgaaatcttttacagcgtgttttttccaatgtgatagccaacgctgttcaaaacactcaggaaggcggaaccattcgcattgaggccgtgaaagaaaaaaacatgcgtctttcaattataaacaccggagcgcatatccctgaagaagttatatcgcggctctttgagccttttttcaggctggataccgcacggactcggcatggtactcaaagtggtttgggccttgtcattgtgaagaaggcattggatcgtatgggctttcctttcgctctggagaactcaagcgagggggtggtcttttggatggagctgccggtttag

SEQ ID NO: 33500 - protein, 427 aa, Unknown
  Obtained from environmental sample
  DOMAIN (199)...(265): His Kinase A (phosphoacceptor) domain
  misc_feature (1)..(427): Xaa is any amino acid
MSGRSKMKNKSPRIFIKIFAYTVFFVMFICLTAALLFSRQFLSFYRTEQERQLSESFQPIIITITEKDRTPEETADIARAFADSNQSFRFQIQEKGGDVLFATGNLKGGGLPYSSNEIVIGTYTVMSDLFVAEQRGNARNDLVFIGYGPQIDYSALALRSLLGVSVMLAIAVLGAFIFARKITKPLQDEIIRERAIEENQRLFFSAASHELKTPIAAARALVESMIAGVGDYKDHPKYLRECLKTLDSQAHLVSEILEIVKLSDANAGTASDGLADADSQAASLDLADLGNTVLTEYRPLAEQRGLSIQGDFPAVSVKANRNLLQRVFSNVIANAVQNTQEGGTIRIEAVKEKNMRLSIINTGAHIPEEVISRLFEPFFRLDTARTRHGTQSGLGLVIVKKALDRMGFPFALENSSEGVVFWMELPV

SEQ ID NO: 33501 - DNA, 1362 bp, Unknown
  Obtained from environmental sample
  misc_feature (1)..(1362): n is a, c, g, or t
atggccgagaatcttgtcagggttgggaatgaaggttcagaagattactggaagcttacctattccataaatgaaatagccaaaatttttgacatcgcctacatttattatgtcaggcccagcggagacacttttgaattcgtgctttcttccgaatacacgcccgctatgagccttgaggaagtgttttcaaaatacgaacagcgcgacattccaaaaccgatgaatgacgcgtataaaacaggaactttgcagataagccctgccccttttactaacgtatggggaacgtttgtatcggcatatatccccataatgaagggtggcgcgataataggtgtattaggggctgattacgagatttccaaaattaagttttttgaattagaagctcaaatatcgttaatagtttcggttattattgccgcagtgatggcgttattactctccatttccctcattaaacccattgtcaggcttttcggcgtattaaagaccatagccgaaggggatttaacccaacgcattgaaacaaaaggtaaagatgaaattgccaccatgaccgtaatgataaaagagactcaggaaagcatcagaaatctggtaataaacatcaagggggaagcggtagccttattcgacatcggcagtgaccttgccagcaacatgaacgagacagcatcggcagtgaacgagattacctccaatattcagagtatcaaaggccgcatcataagccagagcgcaagcgtaaccgaaacccacgccacaatggaacaagttgttaccaatatcaacaaacttgacgaactggtggaaaagcagggtacaagcgtttctcaggtttcgtccgctatagaggaaatggcggcaaacattcagtcggttatttcaacgtttgccaataacgccgcaaatgtaaagaccttgcaggaagtatccgaagcgggacgctcgggtttgcaggaagtggcaacggacatacaggaaatctcaagagagtccgaagggcttttggaaataaattcggtaatggaaaatatcgccagccagaccaatttgctctcaatgaacgcggcgatagaggcggctcacgcgggagaagcaggcaaaggtttcgctgttgtcgccgatgaaatccgcaaacttgccgagagttccagcgaacagtccaagactatcagtaacgttttgaagaagattaaaggttcaatcgacaaaataatccaatcaacaggaaacgtactaaccggcttcgaggcgatagactccagcgtcaaggtggtatcggagcaagaggaacatattcgcaatgcaatggaagtacagggaacgggaagccggcaaatagtgacagtgtaa

SEQ ID NO: 33502 - protein, 453 aa, Unknown
  Obtained from environmental sample
  DOMAIN (273)...(452): Methyl-accepting chemotaxis protein (MCP) signaling domain
  misc_feature (1)..(453): Xaa is any amino acid
MAENLVRVGNEGSEDYWKLTYSINEIAKIFDIAYIYYVRPSGDTFEFVLSSEYTPAMSLEEVFSKYEQRDIPKPMNDAYKTGTLQISPAPFTNVWGTFVSAYIPIMKGGAIIGVLGADYEISKIKFFELEAQISLIVSVIIAAVMALLLSISLIKPIVRLFGVLKTIAEGDLTQRIETKGKDEIATMTVMIKETQESIRNLVINIKGEAVALFDIGSDLASNMNETASAVNEITSNIQSIKGRIISQSASVTETHATMEQVVTNINKLDELVEKQGTSVSQVSSAIEEMAANIQSVISTFANNAANVKTLQEVSEAGRSGLQEVATDIQEISRESEGLLEINSVMENIASQTNLLSMNAAIEAAHAGEAGKGFAVVADEIRKLAESSSEQSKTISNVLKKIKGSIDKIIQSTGNVLTGFEAIDSSVKVVSEQEEHIRNAMEVQGTGSRQIVTV

SEQ ID NO: 33503 - DNA, 597 bp, Unknown
  Obtained from environmental sample
  misc_feature (1)..(597): n is a, c, g, or t
atgccggagtctaatacaatggaagaaattgacgacattacgctggaacaggcgaaacgcggcaacgatacggctttccggcgtctatatgagcactactccccctttgtttggaggctgtgctataggtcgtcaaacggggacgccgcctgcgccgaggagataatgcagaacaccttcgtcaaggtgcaccggtatttgggcggttttttgaggggttccacgttttccacgtggctatacagcgtgacttaccactgtataaacgagtatttcgcgaaggcgtccaagtaccgagcgcgaaaccagcagttcgacgacgaggtggggctacccggagtaaacttaggcgggcgggtgccgtacgaggacaagcagttggtggcgaagatattggcgccccttagcgaggacgaccgcttcatgctcgtggcgcgggaggtggagggggttccatacgaggagctggcgggtataatgggcgtgaaggtgggcgctttgcggacgcggatggcgcgtctgaaggcggatatacgggagcggctggaaaagcagttctgggcgaacagtagcgcggcgcgggctcggccaatctga

SEQ ID NO: 33504 - protein, 198 aa, Unknown
  Obtained from environmental sample
  DOMAIN (131)...(180): Sigma-70, region 4
  misc_feature (1)..(198): Xaa is any amino acid
MPESNTMEEIDDITLEQAKRGNDTAFRRLYEHYSPFVWRLCYRSSNGDAACAEEIMQNTFVKVHRYLGGFLRGSTFSTWLYSVTYHCINEYFAKASKYRARNQQFDDEVGLPGVNLGGRVPYEDKQLVAKILAPLSEDDRFMLVAREVEGVPYEELAGIMGVKVGALRTRMARLKADIRERLEKQFWANSSAARARPI

SEQ ID NO: 33505 - DNA, 564 bp, Unknown
  Obtained from environmental sample
  misc_feature (1)..(564): n is a, c, g, or t
ttgttacacagtatttttatgtttaagatatccgcaaatgttatatttactagctgtaatgcaaaaccgaaacaaccaccgaaacaaaataatatatcgcgggagggctttatgggaaataggcaaaaaatatgcgtggccggcgaccacgccggatttgaactcaaggaaaccgtcaaacgatacctgaccgaaaagggtttcgacgtcagcgactgcggcgccttagcctacgacaaggacgacgactaccctaccttcgccaaggccctatcggcaaagatagccggcggcgagtacgtccgcggcgtcctcttctgcggcaccggcgttggcgcttccatcgccgcgaaccgccgcaaaggcgtaagggccgccctctgcttcaccccggagatgggtancctgagccgcgcccacaacgacgcgaacgtcctggtcctgggcgcccgaaccacccccgtcgacacatccctcaaaatcctagacgcgtggctgaacggccccttcgagggggggaggcaccaaaaacggatcgacatgctcgacgaggaggatcgctga

SEQ ID NO: 33506 - protein, 187 aa, Unknown
  Obtained from environmental sample
  DOMAIN (103)...(183): Ribose/Galactose Isomerase
  misc_feature (1)..(187): Xaa is any amino acid
MLHSIFMFKISANVIFTSCNAKPKQPPKQNNISREGFMGNRQKICVAGDHAGFELKETVKRYLTEKGFDVSDCGALAYDKDDDYPTFAKALSAKIAGGEYVRGVLFCGTGVGASIAANRRKGVRAALCFTPEMGXLSRAHNDANVLVLGARTTPVDTSLKILDAWLNGPFEGGRHQKRIDMLDEEDR

SEQ ID NO: 33507 - DNA, 483 bp, Unknown
  Obtained from environmental sample
  misc_feature (1)..(483): n is a, c, g, or t
atgagctccgacgccggcgacaacgccgctaccgacaagcccgcgacaggcgtctacgcaaaacgcctgccgtgggaccagtacttcatgcagattgccgtccaagtcgccacccgctccacctgcgacagaaagcacgtgggcgccgtgatcgtccgcgacaagaccatcctctccaccggttacaacggcagcgtgcgcggaatgccccactgcgacgacgtcggccacatgatggaggattctcactgcatagccaccgtccacgccgaggccaacgccatcatacaagcggccaaaaacgggacaaggatagacggcgccgacatttacgtgacggcctcgccctgctggaactgcttcaaactcatcgcgaacagcgggataaagcgcgtcttctacttagaattctacagggacgagcgggtgctggaggtcgccgagatggcgggtatcgagatgaagcaggtggcctcggcttaa

SEQ ID NO: 33508 - protein, 160 aa, Unknown
  Obtained from environmental sample
  DOMAIN (23)...(136): Cytidine and deoxycytidylate deaminase zinc-binding region
  misc_feature (1)..(160): Xaa is any amino acid
MSSDAGDNAATDKPATGVYAKRLPWDQYFMQIAVQVATRSTCDRKHVGAVIVRDKTILSTGYNGSVRGMPHCDDVGHMMEDSHCIATVHAEANAIIQAAKNGTRIDGADIYVTASPCWNCFKLIANSGIKRVFYLEFYRDERVLEVAEMAGIEMKQVASA

SEQ ID NO: 33509 - DNA, 1338 bp, Unknown
  Obtained from environmental sample
  misc_feature (1)..(1338): n is a, c, g, or t
gtgctcacgagatgcggcgaggagggcttgtacaacccgctggaggagttctgcacgagcaaagaggaaatatattacctctgcggcggcaggcagtatgacccgcccgatgtattctgcgacgagggggatgtcataaaaggaaagtgcggcgaagatgagtcaatgaattacgatacccatttctgctacggcggggaatcttacgccctgtgcggcggcaaggactacaaccccgacaggcagttctgctccggcagcgcgatttacgacaaatgcggcggcaaggattacaatccttctaccgaatactgccacacggacggaaaaacatattcctgcggcaacaagccatacgacccgtcggcgcagttctgctccggcaccaccatttacgagaaatgcggcggcgagcagtacaatccatcaacgcagttctgctcaggcgtaaccttttacgacaaatgcggcgggacggtggcattcaatcccctgacggagaaatgctgcggaaacatcaagtatgctctcgcaacgcatttctgctacgcaaatagcagcaagataggcagtttctgcggcatcaacccgcagaaatactacgaccccgatgtgtatgaatgcaagccaagcctaaaccccaacggcatatacctgaaaggcggaattacagacgtaagagagggcaagacttacaattacaacgcggtgctgatgggcaatcaggtttggatggcggagaatttgaaatacaggccctctgatggcaggagtcgttgcacctatgccgatacatcaaggggcacaacaaaagcaattgataaatcaactgaagatgaaatcgccgagtgcgcctacggcaggcgttacgagtgggtaaaggctatgaatattgacagctcgttcatttatgctaataaattcaatgcacccgagaagcatcaaggcatctgccccaacggctggcatttgcctagcggtgcggagttggatgctttgaaaacattcgccgagccggaaggaggacttaagttgagggctaataacggttggtgcgattataatgggagttcgggcaacggcacggacaattacggctttgcagctctgaatagtagttatagttatagcggtggcttctatgacccgtcaactagtacggcctattatacttatgttgcttgtagtgttaatggtagctggttgagtaccaaggaacacgctactacttcaggttatgtttttttattagctgtaaataatagcagtaatagcataataaatgacgctagcaccaataagaatgccactttttttgtccgctgcgtaaagaactaa

SEQ ID NO: 33510 - protein, 445 aa, Unknown
  Obtained from environmental sample
  misc_feature (1)..(445): Xaa is any amino acid
MLTRCGEEGLYNPLEEFCTSKEEIYYLCGGRQYDPPDVFCDEGDVIKGKCGEDESMNYDTHFCYGGESYALCGGKDYNPDRQFCSGSAIYDKCGGKDYNPSTEYCHTDGKTYSCGNKPYDPSAQFCSGTTIYEKCGGEQYNPSTQFCSGVTFYDKCGGTVAFNPLTEKCCGNIKYALATHFCYANSSKIGSFCGINPQKYYDPDVYECKPSLNPNGIYLKGGITDVREGKTYNYNAVLMGNQVWMAENLKYRPSDGRSRCTYADTSRGTTKAIDKSTEDEIAECAYGRRYEWVKAMNIDSSFIYANKFNAPEKHQGICPNGWHLPSGAELDALKTFAEPEGGLKLRANNGWCDYNGSSGNGTDNYGFAALNSSYSYSGGFYDPSTSTAYYTYVACSVNGSWLSTKEHATTSGYVFLLAVNNSSNSIINDASTNKNATFFVRCVKN

SEQ ID NO: 33511 - DNA, 468 bp, Unknown
  Obtained from environmental sample
  misc_feature (1)..(468): n is a, c, g, or t
ttgatatgcaggctatgctcaggcagccngctctttctcccagaatccataaatgctttagacgctttgcacaaaatgcaaaaattagaagaccctatggtgcttgttatagaccaatacggagtttgtagcggcatagccaccatagaagacataacctcagtgctggttgcagaaaccgagctcaccgagttgcctgcctgcaatttgaaaatgcagaataacgcttgggtagcagatggattaacagatattcattccataatggaaatgttttcttttacggaactacccggagaaaaccccgattcttaccacactcttggcggaatggctatgtgcgttctaaacaaagttccacagcaaggagatatttttgagtggaaaaatttgcagtttgaaattttgagcatgaacggtcaaagagtggataaggttaagataagcaaaatgcacagcgaaaaatga

SEQ ID NO: 33512 - protein, 155 aa, Unknown
  Obtained from environmental sample
  SIGNAL (1)...(19)
  DOMAIN (70)...(152): Transporter associated domain
  misc_feature (1)..(155): Xaa is any amino acid
MICRLCSGSXLFLPESINALDALHKMQKLEDPMVLVIDQYGVCSGIATIEDITSVLVAETELTELPACNLKMQNNAWVADGLTDIHSIMEMFSFTELPGENPDSYHTLGGMAMCVLNKVPQQGDIFEWKNLQFEILSMNGQRVDKVKISKMHSEK

SEQ ID NO: 33513 - DNA, 1461 bp, Unknown
  Obtained from environmental sample
  misc_feature (1)..(1461): n is a, c, g, or t
gtgttattcgtggtaaaaaaacggagaatacctatgcctaaaatgattgaccagcttattatcaattccccttatgaagaaccaaaagaatattgggattataatgaaaacagccagtcatttgaccgtaaatcaggcagacgctccgcagggtattatatcgcaaatcagggaagcaaccagtttaacgaaaaaggtaattttatacctttacctctcgtcaacgaaatacgcaaacgggtaaaagcatggaaggaaaataattaccccggcattaccagcgttacccgaaaactgattgaacactggtacgcaaaagaagtccgcagatacgcctttttcttttgccaactggacgctatcgaaaccatcatctggcttgttgaagctcccgaaacagaaaagacaggtattgacattcaaggcgatggaggcgattttaagcgtatctgtacaaaactctgcacaggtggcggaaaaactaccgttatggcaatgcttattgcatggcaaatttgcaacaaggtttcatatccgcatgataaacgattttctaaaaatgtttttatcgttgccccaggaataaccgtaagagaccgattagaagtattactccccggcggaggatcaaattattatattgattttagtgttgtcccgacatcgttaatcgacaaactctataaaggaaaagtcatcatcaacaactggcaagctcttgcgtgggaagacgaagaagcgttaaagaaaaagaaatccgtagacaaacgaggacccaaaagcgatgaagcctatgcccgtcaggttttagattctatggctgacagccaaaatattttagtcatcaatgacgaagcccatcacgcatggcggaaaaaccctgaaataaaagtcaaatacgcaggtctggacaaaaaagaagaacaggaagctacaatatggattagcggacttgatcgcattcacaaaacaagaaaaattttaacctgttacgacttttcagcaaccccctttgcgccgtcaggcaagaaaaatgaaagcgaagcccttttcccgtggatagtcagcgattttggcttgaatgacggcatagaatccggccttgttaaaacaccccgtatggtagtccgtgatgataacactcccgatgcccggacattccgttcaaaattaaatcatatctacgctgatgaaactgtaagagacaatatcaatcaacctgctgaatccaccgttccgcttcctgatctggttatacaggcgtacaatcttttaggttccgattggcttgaaacatataaagaatggaaagaaaacggtacagatgttcctcctgttatgataacagtcgccaatcgtaccgaaacttcaagccgtattgaatatgcgtttaagtctcaaaaaataattattaaagaattatgtgatcctgaatatttacggcgtattgactcaaaataa

SEQ ID NO: 33514 - protein, 486 aa, Unknown
  Obtained from environmental sample
  DOMAIN (110)...(339): Type III restriction enzyme, res subunit
  misc_feature (1)..(486): Xaa is any amino acid
MLFVVKKRRIPMPKMIDQLIINSPYEEPKEYWDYNENSQSFDRKSGRRSAGYYIANQGSNQFNEKGNFIPLPLVNEIRKRVKAWKENNYPGITSVTRKLIEHWYAKEVRRYAFFFCQLDAIETIIWLVEAPETEKTGIDIQGDGGDFKRICTKLCTGGGKTTVMAMLIAWQICNKVSYPHDKRFSKNVFIVAPGITVRDRLEVLLPGGGSNYYIDFSVVPTSLIDKLYKGKVIINNWQALAWEDEEALKKKKSVDKRGPKSDEAYARQVLDSMADSQNILVINDEAHHAWRKNPEIKVKYAGLDKKEEQEATIWISGLDRIHKTRKILTCYDFSATPFAPSGKKNESEALFPWIVSDFGLNDGIESGLVKTPRMVVRDDNTPDARTFRSKLNHIYADETVRDNINQPAESTVPLPDLVIQAYNLLGSDWLETYKEWKENGTDVPPVMITVANRTETSSRIEYAFKSQKIIIKELCDPEYLRRIDSK

SEQ ID NO: 33515 - DNA, 531 bp, Unknown
  Obtained from environmental sample
  misc_feature (1)..(531): n is a, c, g, or t
atgaactactttaataccttgccattgcgcatacaactggaagaactcggcaaatgccgttttatggacgcatctgaatttgctcgcggcgtagaggcgcttaaaggcaaaaaaatcgtaatcattggtgcaggtgcgcagggcttgcatcagggcttgaatttgcgagatagcgggttagatgtttcttatgcgcttaggcaagccgccattgacgaaaagcgagcgagctttacaaacgcaaccgaaaacggattcaaggttggagtgtataaagatttaattcccaacagcagatttggtttgcaacctcacgccagacaaacagcactccaaagttgttacagaaattatgcccttgatgaaaaaaggctcggcacttctttacagccacggtttcaacattgtggaagagggaatgcaaataagagaagacataaccgttataatggttgccccaaagggaccaggttccgaggttcgcgcagaatatgtgcgcggttttggaatgccctctctggttgcagttaa

SEQ ID NO: 33516 - protein, 176 aa, Unknown
  Obtained from environmental sample
  DOMAIN (33)...(165): Acetohydroxy acid isomeroreductase, catalytic domain
  misc_feature (1)..(176): Xaa is any amino acid
MNYFNTLPLRIQLEELGKCRFMDASEFARGVEALKGKKIVIIGAGAQGLHQGLNLRDSGLDVSYALRQAAIDEKRASFTNATENGFKVGVYKDLIPNSRFGLQPHARQTALQSCYRNYALDEKRLGTSLQPRFQHCGRGNANKRRHNRYNGCPKGTRFRGSRRICARFWNALSGCS

SEQ ID NO: 33517 - DNA, 621 bp, Unknown
  Obtained from environmental sample
  misc_feature (1)..(621): n is a, c, g, or t
ttgggctgccaccacgtttttcgcgacataacgggcagcgtaggccgcggaacggtccaccttggaggggtccttgccggaaaaagcgccgcccccgtgacggcccatgccgccataggtatcaacgatgattttgcggccggtcagtccggaatcgccaaaaggcccgccgaccacaaaacggcccgtgggattgatatagtatttggtttttttgtccagaagaccggtcggttcaagaacaggtttaatgatcttttcaataaccgtctcttctatttctttgtatgctacttcaggagcatgctggtgcgatacaacaaccgcgtcaatgcggatcggcttgaagccttcgtattccaccgttacctggcttttggaatcgggccgcagccatttgattgtttgatttttgcggagcttcgtggcgtgaatcaaaagctcatgggccagtgtaatgggcaggggcatcaatcccttggtctcattgcaggcaaaaccgaacatcataccctggtcgcccgcgccctgctggcctttgtattttttaaggcctttgccggaaacgccctggttgatgtcgggggactggttgtggatcatgctcaggacagccattga

SEQ ID NO: 33518 - protein, 206 aa, Unknown
  Obtained from environmental sample
  misc_feature (1)..(206): Xaa is any amino acid
MGCHHVFRDITGSVGRGTVHLGGVLAGKSAAPVTAHAAIGINDDFAAGQSGIAKRPADHKTARGIDIVFGFFVQKTGRFKNRFNDLFNNRLFYFFVCYFRSMLVRYNNRVNADRLEAFVFHRYLAFGIGPQPFDCLIFAELRGVNQKLMGQCNGQGHQSLGLIAGKTEHHTLVARALLAFVFFKAFAGNALVDVGGLVVDHAQDSH

SEQ ID NO: 33519 - DNA, 522 bp, Unknown
  Obtained from environmental sample
  misc_feature (1)..(522): n is a, c, g, or t
atgacaaattggccgagaattcttttggaagtgggaagtggtttttcagcgctttcaacccttttcccgcacagaactgctttggaaaatgtaatgcttgccccgcacaatgtacgcaaactgccactcgcgacggcgcgggcaaaatccgagcagatacttgagcgggttggtttaagcgataaaattaacgcatacccttcgcagctttcaggcggtcaacaacagcgtgtcgcgattgcccgtgcgcttgccatggagccaagaattatgctctttgatgagccgacatccgcccttgatcccgaacttgtcggcgaagtactggcggtcatgaaacagcttgcctcaggcggcatgacaatgcttgttgtttctcatgaaatgggctttgcccgcgaagtggcaaatagggtagtgttcatgtttgaaggctccattttggaaattggcactcccgaacagttatttacaaacccttcaaatgaccgtacaaggcaatttttacaaagtgtgttataa

SEQ ID NO: 33520 - protein, 173 aa, Unknown
  Obtained from environmental sample
  DOMAIN (12)...(145): ABC transporter
  misc_feature (1)..(173): Xaa is any amino acid
MTNWPRILLEVGSGFSALSTLFPHRTALENVMLAPHNVRKLPLATARAKSEQILERVGLSDKINAYPSQLSGGQQQRVAIARALAMEPRIMLFDEPTSALDPELVGEVLAVMKQLASGGMTMLVVSHEMGFAREVANRVVFMFEGSILEIGTPEQLFTNPSNDRTRQFLQSVL

SEQ ID NO: 33521 - DNA, 426 bp, Unknown
  Obtained from environmental sample
  misc_feature (1)..(426): n is a, c, g, or t
atggaaaaaaagagcacccgcacgttggcgatcataaagcccgacgccgtccgcgccaaacacgccggaaagatactcgccatgatcgaggagagcggactcaccgtagacgcggcgagaatgttccgactgacgcgcgagcttgccggcgagttctacgccgttcacaagggcaagcccttctacgatgggcttatagacttcatgtcgtcggggccgtgcatcgttctggcgcttggcggcgaagacgccgtgacgcggtggcgcaatctcatgggggcgaccaacccgcaggcggcggcagacggaaccatccgcaaactctacggaacctcggtgcaattcaacgcctgccacggctccgacgcgccggagacggcggcaagcgagacggccttcttcttctccggcgcggagctgccttga

SEQ ID NO: 33522 - protein, 141 aa, Unknown
  Obtained from environmental sample
  DOMAIN (7)...(140): Nucleoside diphosphate kinase
  misc_feature (1)..(141): Xaa is any amino acid
MEKKSTRTLAIIKPDAVRAKHAGKILAMIEESGLTVDAARMFRLTRELAGEFYAVHKGKPFYDGLIDFMSSGPCIVLALGGEDAVTRWRNLMGATNPQAAADGTIRKLYGTSVQFNACHGSDAPETAASETAFFFSGAELP

SEQ ID NO: 33523 - DNA, 963 bp, Unknown
  Obtained from environmental sample
  misc_feature (1)..(963): n is a, c, g, or t
gtggtaatgaacccggggaattacaactccgatatcgggctgcccctttcagttttcaatgtcaggccctgtcacgaggcttgcgtgtttgaaatgggcatgaaccgcgtgggggaaatcgccgaacttgcttccgtgcttcttcctgacgtcgctcttattacaaatatcggttccgcccatatcggaattctcggcagcatggacgctatcgctaaagagaaaaaaaatattttttcgaaattcaacgggaaaggcgccgcgctgatcccggcggattctccttaccgcgatttcctcgcgcagggggtgcaaggcagggtttctttttacgggcagaaatcttttgcggaacttggcggcgtaaaagacctcgggcttgacggcagcgaaattatctgggacgggaaacaggcgcgttttggcctgcccggcaagtacaacctcgccaacgcctttgccgcaatcgccattgcgcgggaaataccggtcagcgccggcgcggtcaggcagggccttgaatcggtcaagcccctgttcgggcggggcgaaataatccgcggcaaagcgactgttattcaggactgctataactccaacccggaatcgcttgccggcgctctggaattctgcgaaagcctggactggccgggccgccgcgtatacgtaatcggggaaatgctggagttaggcgaggattccgaaaaggcccacgagaacatggggcgccttttggcggacagcaaagcggacatggtgttcctctacgggaaagaggccgccgccgccgtcaaagcgcttgggacgggcaggttcttccatacctgcggcataaacgaactgagttccgccgttaacgcttatgtccgggacggggatctggttcttctgaaaggctcgcgcggctgcgccctggaaagggttttcggcgcttcacgccagccgcaggaagggggcgcctga

SEQ ID NO: 33524 - protein, 320 aa, Unknown
  Obtained from environmental sample
  DOMAIN (179)...(264): Mur ligase family, glutamate ligase domain
  misc_feature (1)..(320): Xaa is any amino acid
MVMNPGNYNSDIGLPLSVFNVRPCHEACVFEMGMNRVGEIAELASVLLPDVALITNIGSAHIGILGSMDAIAKEKKNIFSKFNGKGAALIPADSPYRDFLAQGVQGRVSFYGQKSFAELGGVKDLGLDGSEIIWDGKQARFGLPGKYNLANAFAAIAIAREIPVSAGAVRQGLESVKPLFGRGEIIRGKATVIQDCYNSNPESLAGALEFCESLDWPGRRVYVIGEMLELGEDSEKAHENMGRLLADSKADMVFLYGKEAAAAVKALGTGRFFHTCGINELSSAVNAYVRDGDLVLLKGSRGCALERVFGASRQPQEGGA

SEQ ID NO: 33525 - DNA, 762 bp, Unknown
  Obtained from environmental sample
  misc_feature (1)..(762): n is a, c, g, or t
atgacaagggaaagggcattcaggtacgacttctttatgatggccgcaatcctgctgctgcttatgctcggcctggtgattctttattccgcgtcatttttattcgctgaaaaccagccttcccgttttggcagcggatgggcccccatgatcagcaacatcatcgccgttttgattatggttctcctgttcccgatactctccatggttaatcttgaattgttgaagaaaggttgggcggttttcttaattttatttcttaccgtgataattaatttattgcccttcttcccgtttttccagaaagcgaaccacaggccgggcattgacgcgatgcggtggatattcctgaaaattcccggtcagacgcctttgagcttccagccctcggaattaatcaaagtggcgctgccgctgtaccttgcctatatccttgacaagaacaaggacaggctggataactttttctacggccccctgccccccgtagtggtaaccgggatcttctgtttattggttctgcgccagagtaatttctccgaagccgcccttatcgcccttgtaagcatggtaatttgctttgtctcaggcatccgcctgcgctggttcgccctggcgcttgcgctgatgggcctggtcggctaccagctgatttttggcgacaccggggggagatggtacgagcgcgtgcagaattttatcagcaagactccggatgaatacggcgaaaaataccagagcgacctcagtcggaagcggtaa

SEQ ID NO: 33526 - protein, 253 aa, Unknown
  Obtained from environmental sample
  SIGNAL (1)...(28)
  DOMAIN (11)...(248): Cell cycle protein
  misc_feature (1)..(253): Xaa is any amino acid
MTRERAFRYDFFMMAAILLLLMLGLVILYSASFLFAENQPSRFGSGWAPMISNIIAVLIMVLLFPILSMVNLELLKKGWAVFLILFLTVIINLLPFFPFFQKANHRPGIDAMRWIFLKIPGQTPLSFQPSELIKVALPLYLAYILDKNKDRLDNFFYGPLPPVVVTGIFCLLVLRQSNFSEAALIALVSMVICFVSGIRLRWFALALALMGLVGYQLIFGDTGGRWYERVQNFISKTPDEYGEKYQSDLSRKR

SEQ ID NO: 33527 - DNA, 960 bp, Unknown
  Obtained from environmental sample
  misc_feature (1)..(960): n is a, c, g, or t
atgagaaaaatattgggcgcaatgaaattgctgggcgagggggacatctcggctagggccaatttgcggggccaaggggagcttgagcaaattgcgaggcatttcgacgaaatggccgcagaactgcaaaaaaatggcgatgagcgcgaggctctcctgaacgaaatcaggggtttcaacgcaaccttgcaacagcggatcgagtccgctctttctgaattgcggacaaagaatgacgaactggaacgcctgatggaaggcatctctttgctaagagaggaattgagccagcaggagagactggctgtagcgggccaactgacggccgcctttgcccatgaggttggcaccccgcttaacttggtcagcggccacatacagattcttcaaggcgaacccggaatcggcgtccagcagaaggagaggctggatacagtcatggcccaaatagggcgggtgagcgagattgtcaggaagctcacaggcttggcgcgaccaatggaacccaagaaggaacgcgtggaattcaaatcagtgctgaacgagcttcagcggctgtgggctcccgcgctgtccatgcgcggcgtccagcttcaggcgcacgttcccagctcttgcacattgtttgttgaccgaaagcagttagagcagctcttaataaatttggtcaacaactccttggacgccatgcccggcggcggcgatattgtcctgagggctgatcttgcggagtccaatggattctatgaattcgagctctccgacaacggctccggcgtccctgccgacatcataggcaaggttttcaagcccttagtcacgacaaagccagagggaatgggtactggcttgggcctttcgatatgccgcgagatagtgaggacacacgggggggaaatcagcctcaaaagcgaagaggggcgagggactacagtaaagctctccttgcctgctgggtga

SEQ ID NO: 33528 - protein, 319 aa, Unknown
  Obtained from environmental sample
  DOMAIN (103)...(169): His Kinase A (phosphoacceptor) domain
  misc_feature (1)..(319): Xaa is any amino acid
MRKILGAMKLLGEGDISARANLRGQGELEQIARHFDEMAAELQKNGDEREALLNEIRGFNATLQQRIESALSELRTKNDELERLMEGISLLREELSQQERLAVAGQLTAAFAHEVGTPLNLVSGHIQILQGEPGIGVQQKERLDTVMAQIGRVSEIVRKLTGLARPMEPKKERVEFKSVLNELQRLWAPALSMRGVQLQAHVPSSCTLFVDRKQLEQLLINLVNNSLDAMPGGGDIVLRADLAESNGFYEFELSDNGSGVPADIIGKVFKPLVTTKPEGMGTGLGLSICREIVRTHGGEISLKSEEGRGTTVKLSLPAG

SEQ ID NO: 33529 - DNA, 1335 bp, Unknown
  Obtained from environmental sample
  misc_feature (1)..(1335): n is a, c, g, or t
ttgggttacatagataatattattagcggtatcgaaaaaagagatgccgggcagcctgaatttttacaggcggcaaaggaagttttggactcgctcaggatcattgtcgacagagacaatacctatgaaaaagccgggcttcttgagaggcttgtggaacctgaacgcgcgattatgttcagagtcccctggattgacgatgccggaaaggtacaggtgaaccgcggtttccgcgttcaattcagttccgcaatcggtccgtacaagggcggtttgcgtttccatccttcggttactttgagcattatcaagttccttggatttgaacaaattttcaagaactcgcttacaggccttcccatgggcggcggcaagggcggttcggattttgaccccaaaggcaagagcgacagcgaagttatgcatttctgccagtcattcatgacggagttgtaccgccatatcggtcaggacacagacgttcccgccggcgacataggcgtaggcggcagggaaatcggttttatgtacggccagtataaacgcattgtaaaccgctttgagggcgtgcttaccggaaaggggctgggctggggcggaagccttgccagaaccgaagccacgggatacggccttgtttatttagtggaagaatacctgaataaaaagggagacagttttaaaggcaagaaagtcgccatatcgggcagcggcaatgtcgcgatctttgcggcgcagaaagcaatggctcttggggcgacagtcgtcagcatgtcggacagcaacggttttatctgtcatgaaaaaggcattaaccttgatacaataaaagacctcaagattgtaaaaagagaaaggcttaccaagtacggcgagatccacaaagacgcggtttacaccgatgtctcaggcggcagagtatggaacattaaatgtgatatcgcgctgccttgcgccacccagaacgagcttctgcttgacgacgccaagaaactcgccgacaacggctgtaaggtcgtcgccgaaggcgcgaatatgcccacatctttggacgccacggaatacctgctcagcaagggcattgcgttcttccctggcaaagccgccaacgccggcggtgtcgcgacatcggggcttgaaatgtcccagaacagcgcgcgcctttcctggtcattcgaagaagtagacgccaagctgaaaaacatcatggtcaacattttccacagcatagacgatgccgctaaagaatacggaaaaccgaacaactttgtagtaggcgccaacatcgccggcttcctcaaagtcgccggagccatgctggatcagggagtttaa

SEQ ID NO: 33530 - protein, 444 aa, Unknown
  Obtained from environmental sample
  DOMAIN (54)...(184): Glu/Leu/Phe/Val dehydrogenase, dimerisation domain
  misc_feature (1)..(444): Xaa is any amino acid
MGYIDNIISGIEKRDAGQPEFLQAAKEVLDSLRIIVDRDNTYEKAGLLERLVEPERAIMFRVPWIDDAGKVQVNRGFRVQFSSAIGPYKGGLRFHPSVTLSIIKFLGFEQIFKNSLTGLPMGGGKGGSDFDPKGKSDSEVMHFCQSFMTELYRHIGQDTDVPAGDIGVGGREIGFMYGQYKRIVNRFEGVLTGKGLGWGGSLARTEATGYGLVYLVEEYLNKKGDSFKGKKVAISGSGNVAIFAAQKAMALGATVVSMSDSNGFICHEKGINLDTIKDLKIVKRERLTKYGEIHKDAVYTDVSGGRVWNIKCDIALPCATQNELLLDDAKKLADNGCKVVAEGANMPTSLDATEYLLSKGIAFFPGKAANAGGVATSGLEMSQNSARLSWSFEEVDAKLKNIMVNIFHSIDDAAKEYGKPNNFVVGANIAGFLKVAGAMLDQGV

SEQ ID NO: 33531 - DNA, 1362 bp, Unknown
  Obtained from environmental sample
  misc_feature (1)..(1362): n is a, c, g, or t
gtgatcggtcaggctgcggaatttgattacgccggcacacaggcttgccgcgtcctgcgcgaggatggcattgagatcgtactggtcaattccaatccggccaccattatgactgacaaaaatatcgcggacaaaatttacatcgaaccgctgacactggcgaccgtgaaacgcattatcgaaaaagaacgccccgacagcatcttgtcgggactcggcggtcagaccggactgacgttgtgtatgcagctggcccgcagcggtttcttagccaaaatgaatgtgcgtctgctcggttcctcgcccgaaaccatcgacaaggctgaggacaggaaattattcaaagaaaccatgcagagtatcggccaaccggtgatcccctcggtcatagccacggatgtccaaaccggggtcgactttgccaaagagctgggctatccggttattgtgcgtcccgcatttacgctgggcggcagcggcggcggcattgcggccaacgaaacacagctgcgtgaaattgcggccaacggtctggcgctttcgcctattcagcagatactcgtggagaaatccgtggccggctggaaagaaatcgaatttgaagttatgcgcgaccgcgccggcaacgtaattaccgtttgctcaatggaaaactttgacccggtgggcgtgcatacgggcgacagtattgtaattgcgcccgccgtcacactggcggacaaggaatatcaaatgctgcgttccgcggccctgaacatcattaaggcgctcggcgtcgagggcggctgtaactgccagtttgccctgcatcccgatagttttgagtacgcggtcatcgaggtaaatccgcgcgtttcgcgttcttcggcactggcgagcaaggcaacaggctaccctatcgccaaagtcgcgacaaagatcgccatcggctatacccttgacgaaataataaacgccgtcacgggcaatactttcgcggcgtttgagcctacgattgactatgtggctgtgaaattcccaaaatggccttttgacaaattcgtatacgccaacaaggaattgggcacgcagatgaaagcgacaggcgaggtcatggcgcttgcggacacctttgaggaagcgctcttaaaagccgtacgcggcgcggaaatcggccttaacagccttgacctgccccgcctggcggcaaagacagacgaagagatacgcgcccttcttcataccgtaaccgacgagcgcctgtttgtgctgtacgaggcaataaaacgcggcgtcagcgttgatgaactataccagacgaccagggtagaccgatggttcttgcacgggcttgtcaatatcgctttcgggcggtattcataa

SEQ ID NO: 33532 - protein, 453 aa, Unknown
  Obtained from environmental sample
  DOMAIN (110)...(309): D-ala D-ala ligase C-terminus
  misc_feature (1)..(453): Xaa is any amino acid
MIGQAAEFDYAGTQACRVLREDGIEIVLVNSNPATIMTDKNIADKIYIEPLTLATVKRIIEKERPDSILSGLGGQTGLTLCMQLARSGFLAKMNVRLLGSSPETIDKAEDRKLFKETMQSIGQPVIPSVIATDVQTGVDFAKELGYPVIVRPAFTLGGSGGGIAANETQLREIAANGLALSPIQQILVEKSVAGWKEIEFEVMRDRAGNVITVCSMENFDPVGVHTGDSIVIAPAVTLADKEYQMLRSAALNIIKALGVEGGCNCQFALHPDSFEYAVIEVNPRVSRSSALASKATGYPIAKVATKIAIGYTLDEIINAVTGNTFAAFEPTIDYVAVKFPKWPFDKFVYANKELGTQMKATGEVMALADTFEEALLKAVRGAEIGLNSLDLPRLAAKTDEEIRALLHTVTDERLFVLYEAIKRGVSVDELYQTTRVDRWFLHGLVNIAFGRYS

SEQ ID NO: 33533 - DNA, 1575 bp, Unknown
  Obtained from environmental sample
  misc_feature (1)..(1575): n is a, c, g, or t
ttgatatacaaaatggtcgatacctgcggcggcgaatttgaggcaaaaacgccgtatttctactccattcagaacggaacggaaaacgaggccttgccgttcatccggaaaagcgtgaaacagcggatcgtcgtgctgggatcagggccgatacggatagggcagggcattgagtttgactacgcctgcgtgcattgcgtgtggacgctgaaaagcctgggctacgaagttatcgtgattaacaacaacccagaaaccgtatccaccgactttgacaccgcggacaggctttattttgagccgctgtgcattgacgacgtgatgagcataatcgaaattgagaagccgttaggtgtcatcgtggcgtttgggggcggcacggctatcaagctgacaaaaaaactgcgcgagcgcggcgttaacattatcggcacttcggcggacagcatagacatctgcgaggacaggcagcgttttgacgcgctgctggagaatctgcagataaagcgcccaaagggttacggcgttatgacggaagcggaggcgctggacgccgccgaaaaactcgggtttccggtgcttatgcgcccgtcctacgtgctgggcgggcagaatatgatcatcgcgttctcgccggacgatatccgcgagtatatggaaataattctccgatcaaaacaggaaaacccggtgctgatcgacaagtatctggagggaatggagatagaggttgacgcgttatgcgacggacaagatgtgttaatcccgggcattatggaacatatcgagcgcacgggtattcactcgggcgacagcatagccgtatatccggccttgaatatagacgatgctttatccgaaaagatttttgaggttacacggaaactttgtttggctctggcggtcaaaggtctggtgaatattcagtatgtctggtatgaaaacgatatctatgttatcgaggtcaatccgcgcgcctcgcgcaccgttccttacatcagcaaggtgaccggcgtgcccatgtgcgaattggccactaaggtcagcgtaggcgaaactctggctgcggccggttactcctccggtattgccaggataccgccgtatgtcgcggctaaggtgccggttttttcttttgaaaaattggccggcctggatacgcatctggggccggagatgaaatccaccggagaagttctaggcgtaggcaaaaatctggaggaagcgctctacaaaggcctggtggctgcgggctacaagatgcagaaacgcggcggcgtgctgattaccgtccgggacaatgacaaagcggaaattgccggcatggccaagaagtttgtcgactgtggtttttctctttacgcgacacagggcaccgcccaattactggcgggcaaaggtttggccgtgcaaactgtgggtaagatacatgaatctccgcacaataacaccgcaactgttttggagagcggtcagataagttatgtcatctccacttccgaaaaaggccgggatcccgcgtttgacgatgtgaaaatccgccgcaaggcctgtgtgctgggattccctgcctga

SEQ ID NO: 33534 - protein, 524 aa, Unknown
  Obtained from environmental sample
  DOMAIN (155)...(350): D-ala D-ala ligase C-terminus
  misc_feature (1)..(524): Xaa is any amino acid
MIYKMVDTCGGEFEAKTPYFYSIQNGTENEALPFIRKSVKQRIVVLGSGPIRIGQGIEFDYACVHCVWTLKSLGYEVIVINNNPETVSTDFDTADRLYFEPLCIDDVMSIIEIEKPLGVIVAFGGGTAIKLTKKLRERGVNIIGTSADSIDICEDRQRFDALLENLQIKRPKGYGVMTEAEALDAAEKLGFPVLMRPSYVLGGQNMIIAFSPDDIREYMEIILRSKQENPVLIDKYLEGMEIEVDALCDGQDVLIPGIMEHIERTGIHSGDSIAVYPALNIDDALSEKIFEVTRKLCLALAVKGLVNIQYVWYENDIYVIEVNPRASRTVPYISKVTGVPMCELATKVSVGETLAAAGYSSGIARIPPYVAAKVPVFSFEKLAGLDTHLGPEMKSTGEVLGVGKNLEEALYKGLVAAGYKMQKRGGVLITVRDNDKAEIAGMAKKFVDCGFSLYATQGTAQLLAGKGLAVQTVGKIHESPHNNTATVLESGQISYVISTSEKGRDPAFDDVKIRRKACVLGFPA

SEQ ID NO: 33535 - DNA, 813 bp, Unknown
  Obtained from environmental sample
  misc_feature (1)..(813): n is a, c, g, or t
atgttaaaccaaaaaaaagatcccatactaatcgtaaaagtttgtttgcttattttgattggcgcgtttgcgttttcttttatcagttctttatttaacgcaagggctatggctcaaaccaagtcatccgaagaactgaacgccataataccaaacagcagcgatctgccccgtgtaaatttaaaggagtttataattgacttggggaaaaccacgggtatttacgcttttatcactgatgtgttagagaaaaccactccctctaacgaaacattcacagtaaaaggatggtatgagcttataatggttttggtcggcttccttgtcatctatcttggcgcggccagaggctttgagcccttattgcttgttcctataggcttcggcattgtgttcgcgaatattccttttgccggaatgggggaacagggcgtatggaacgattcgtttaaattatgggatcatcagggctttttgaatgtaatttacaatgccggaataggcaatgaattttttccattgataatttttatcggcataggcgcgatgacggacttcggtccgcttatcgcaaatccgaaaaccgcgcttttgggagcggcggcgcagttcggcgttttcggcacattgttccttatcagtgtcgccaactaccttcccactgtcgccttcaatcttaaagaagcctgcggcgttgcgataatcggcggagcggacgggcccacaacaatttacatcgcggcaaaacttgcccctcaccttttagcgactgtagcggtagcggcatattcctacatggcccttggcctatga

SEQ ID NO: 33536 - protein, 270 aa, Unknown
  Obtained from environmental sample
  SIGNAL (1)...(29)
  DOMAIN (96)...(269): Na+-transporting methylmalonyl-CoA/oxaloacetate decarboxylase, beta subunit
  misc_feature (1)..(270): Xaa is any amino acid
MLNQKKDPILIVKVCLLILIGAFAFSFISSLFNARAMAQTKSSEELNAIIPNSSDLPRVNLKEFIIDLGKTTGIYAFITDVLEKTTPSNETFTVKGWYELIMVLVGFLVIYLGAARGFEPLLLVPIGFGIVFANIPFAGMGEQGVWNDSFKLWDHQGFLNVIYNAGIGNEFFPLIIFIGIGAMTDFGPLIANPKTALLGAAAQFGVFGTLFLISVANYLPTVAFNLKEACGVAIIGGADGPTTIYIAAKLAPHLLATVAVAAYSYMALGL

SEQ ID NO: 33537 - DNA, 393 bp, Unknown
  Obtained from environmental sample
  misc_feature (1)..(393): n is a, c, g, or t
atgaaaatggaactggaaataaaagcgacttcgtcaggccccattcacttccttgttccaacgggaacgcaagttgcggcccagcagcctgtcgcgcaaatcggcggcggagctccggcggctgctccagcgccggcggcagcggctccggccccggcggccgcaccggctccatccggcggcggagttacaattcccgcgcctgttgccggaacaattctgcgttactcggtaaacgaaggcacaactgtctccgccggcgataatgtcgtcataattgagtccatgaaaatggaactggaaataaaagcgacttcgtcaggaaaagttcacttccttgttcccgcgggaacacaggtcgcctcacaacagcccattgccgaaataatgtaa

SEQ ID NO: 33538 - protein, 130 aa, Unknown
  Obtained from environmental sample
  DOMAIN (63)...(129): Biotin-requiring enzyme
  misc_feature (1)..(130): Xaa is any amino acid
MKMELEIKATSSGPIHFLVPTGTQVAAQQPVAQIGGGAPAAAPAPAAAAPAPAAAPAPSGGGVTIPAPVAGTILRYSVNEGTTVSAGDNVVIIESMKMELEIKATSSGKVHFLVPAGTQVASQQPIAEIM

SEQ ID NO: 33539 - DNA, 429 bp, Unknown
  Obtained from environmental sample
  misc_feature (1)..(429): n is a, c, g, or t
ttgatgaaaactgatgatttaaaaaaatttattatatatgtatttgccagcacgggagcagtattgtttcttttatctctttttatcatgtttaaggataataaatttatctccgcaaatactattatgcaaataatcggagtgaacatcgttattgctataggcttgcgtctgtctcaaaagatagagagccgttatgcagttttagaattcctgcttgatattggttttatgtcagcagttattgttgtatcaggaatattatttaaatggtattatcatgtgccaatatggattcttcttgtcattgtgcttttaatttacatactattctatttacttgatattgtcagagtccgcagagatataaaagaaataaacaaattactgcaaaaactcaaggaaaaagaagacaacactgcatcttag

SEQ ID NO: 33540 - protein, 142 aa, Unknown
  Obtained from environmental sample
  misc_feature (1)..(142): Xaa is any amino acid
MMKTDDLKKFIIYVFASTGAVLFLLSLFIMFKDNKFISANTIMQIIGVNIVIAIGLRLSQKIESRYAVLEFLLDIGFMSAVIVVSGILFKWYYHVPIWILLVIVLLIYILFYLLDIVRVRRDIKEINKLLQKLKEKEDNTAS

SEQ ID NO: 33541 - DNA, 318 bp, Unknown
  Obtained from environmental sample
  misc_feature (1)..(318): n is a, c, g, or t
atgtggcttgcttttcccgctgattggagtaccccagccgcttttgcaattttgtatatgggtttacattacggaaatttcaaaaaacaaatgctttctcttgttatttgcgtggcagtttacgcgataatatacgcaatttttctaaatgttgttcatggcttaattcaaatgttaattgtattggctattcctttattataccaatataacggtcaaagagggacatggaaaggaatgaaatggtttttttatatttattatccggcacatttggcattattagggcttattaggatatatgtgttacataaataa

SEQ ID NO: 33542 - protein, 105 aa, Unknown
  Obtained from environmental sample
  misc_feature (1)..(105): Xaa is any amino acid
MWLAFPADWSTPAAFAILYMGLHYGNFKKQMLSLVICVAVYAIIYAIFLNVVHGLIQMLIVLAIPLLYQYNGQRGTWKGMKWFFYIYYPAHLALLGLIRIYVLHK

SEQ ID NO: 33543 - DNA, 1041 bp, Unknown
  Obtained from environmental sample
  misc_feature (1)..(1041): n is a, c, g, or t
atgatttttaatcccgaatacgaatgtatggatccccaagcgttaagaaaactgcagcttgccgcgcttaaaaaccttgtggaaactttatattcaaaagtgccgttttaccgcgaaagattagacgcggcgggggtttctcccagggatattcacactattgcggatatcgagaaattgcccttcactacaaaagatcacttgcggataaattatcctcacggtcttcgcgcctgtcctcaggacagaatcgtggaagtgcacatgagttccggcactaccggaaaacctgtcgttaacgagtacacaattaaagacattgatatttggcggcagtccatggcgagaactatggctggagccggctgtacgcgcgacgatattgttcaaaactgttacggttacgggcttttcaccggcggcgcgggcgcgcattacggcgcgctcactatcggcgcggaagttctgccaatgtccagcggcaataccgaacgccaactgatggttctgcgcgactttggctcgaccatgctcacctgcactccttcttacgccctctacctcgccgaagaagcggctgaatccggcatcaatcttaaagaactgccaatcagcaagggctgtttcggcgcggaaccgtggagtgaaaatatgcgcgtcgagatcgaagaacgctacaacatgaaagcctacgacatttacggcttaacggaaattatcggaccgggtgtcgcttttgaatgcgaagctcaggacggacttcatgtgaacgaagattttttctaccctgaaattatcgatccgaacacgggaaaagttctgcccgccggagaaaaaggcgagcttgtttttaccacgataacaagagaaggaactccgcttctgcgctaccgcacaagggacatcacatttataattgaagaaccctgctcatgcggacgcacgacaaggcgcatacacagactctttggcagaaccgacgacatgttgatcatccgcggcgtaaatgtgtttccnagccagattgacaggcgctcatga

SEQ ID NO: 33544 - protein, 346 aa, Unknown
  Obtained from environmental sample
  DOMAIN (14)...(343): AMP-binding enzyme
  misc_feature (1)..(346): Xaa is any amino acid
MIFNPEYECMDPQALRKLQLAALKNLVETLYSKVPFYRERLDAAGVSPRDIHTIADIEKLPFTTKDHLRINYPHGLRACPQDRIVEVHMSSGTTGKPVVNEYTIKDIDIWRQSMARTMAGAGCTRDDIVQNCYGYGLFTGGAGAHYGALTIGAEVLPMSSGNTERQLMVLRDFGSTMLTCTPSYALYLAEEAAESGINLKELPISKGCFGAEPWSENMRVEIEERYNMKAYDIYGLTEIIGPGVAFECEAQDGLHVNEDFFYPEIIDPNTGKVLPAGEKGELVFTTITREGTPLLRYRTRDITFIIEEPCSCGRTTRRIHRLFGRTDDMLIIRGVNVFPSQIDRRS

SEQ ID NO: 33545 - DNA, 855 bp, Unknown
  Obtained from environmental sample
  misc_feature (1)..(855): n is a, c, g, or t
gtgagctttgccgatgtcgccggacagaaagacgccaagttcgagcttgaggaagtggtggctttcctgaaaaacccccagaaatttacaaaaatgggggcaagaatccccaagggcgtcctgcttgtgggcatgccgggaacaggcaagacgctgatggcccgctcggtagccggggaagcgggggttgccttcttccacatgtccggctccgattttgtcgagatgtttgtcggcgtgggcgcgagccgcgtcagggatctttttgaacagggcaggcgcagcgccccctgcatcatttttattgacgagctggacgccgttggccgcacccgcggcgcgggttacggaggcgggcatgacgagcgcgaacaaaccctgaatcagctgttagttgaaatggacggattcgattcaaaagacggggttataattctcgcggcgacaaaccgccccgacgttctggaccctgccctgctgcggcccggccgcttcgacaggcaggtagtagtcgcgatgccggacatcaaggagcgcgaggcgattctgcagatacactccgcgaagatacccatgggaaaggatgttgatcttagccgtgtcgcaagggcgactccgggaatgagcggcgccgacattgccaacctggtaaatgaagctgccctgcacgcggcacgcaaagacaagccggatgtggaaatgcatgactttgaagaggcgcgggacaaggtgctgatgggcgttgcgcgcagcacccttgttgtgtccgagaaggaacgccggatgaccgcgattcacgaggcggggtcacgcgctgctgcattacttcctgaaaaacgccgaccccctgcataa

SEQ ID NO: 33546 - protein, 284 aa, Unknown
  Obtained from environmental sample
  DOMAIN (39)...(173): ATPase family associated with various cellular activities (AAA)
  misc_feature (1)..(284): Xaa is any amino acid
MSFADVAGQKDAKFELEEVVAFLKNPQKFTKMGARIPKGVLLVGMPGTGKTLMARSVAGEAGVAFFHMSGSDFVEMFVGVGASRVRDLFEQGRRSAPCIIFIDELDAVGRTRGAGYGGGHDEREQTLNQLLVEMDGFDSKDGVIILAATNRPDVLDPALLRPGRFDRQVVVAMPDIKEREAILQIHSAKIPMGKDVDLSRVARATPGMSGADIANLVNEAALHAARKDKPDVEMHDFEEARDKVLMGVARSTLVVSEKERRMTAIHEAGSRAAALLPEKRRPPA

SEQ ID NO: 33547 - DNA, 372 bp, Unknown
  Obtained from environmental sample
  misc_feature (1)..(372): n is a, c, g, or t
gtgctgcgcgcaacgcccatcagcaccttgtcccgcgcctcttcaaagtcatgcatttccacatccggcttgtctttgcgtgccgcgtgcagggcagcttcatttaccaggttggcaatgtcggcgccgctcattcccggagtcgcccttgcgacacggctaagatcaacatcctttcccatgggtatcttcgcggagtgtatctgcagaatcgcctcgcgctccttgatgtccggcatcgcgactactacctgcctgtcgaagcggccgggccgcagcagggcagggtccagaacgtcggggcggtttgtcgccgcgagaattataaccccgtcttttgaatcgaatccgtccatttcaactaacagctga

SEQ ID NO: 33548 - protein, 123 aa, Unknown
  Obtained from environmental sample
  misc_feature (1)..(123): Xaa is any amino acid
MLRATPISTLSRASSKSCISTSGLSLRAACRAASFTRLAMSAPLIPGVALATRLRSTSFPMGIFAECICRIASRSLMSGIATTTCLSKRPGRSRAGSRTSGRFVAARIITPSFESNPSISTNS

SEQ ID NO: 33549 - DNA, 384 bp, Unknown
  Obtained from environmental sample
  misc_feature (1)..(384): n is a, c, g, or t
gtgaatcgcggtcatccggcgttccttctcggacacaacaagggtgctgcgcgcaacgcccatcagcaccttgtcccgcgcctcttcaaagtcatgcatttccacatccggcttgtctttgcgtgccgcgtgcagggcagcttcatttaccaggttggcaatgtcggcgccgctcattcccggagtcgcccttgcgacacggctaagatcaacatcctttcccatgggtatcttcgcggagtgtatctgcagaatcgcctcgcgctccttgatgtccggcatcgcgactactacctgcctgtcgaagcggccgggccgcagcagggcagggtccagaacgtcggggcggtttgtcgccgcgagaattataaccccgtcttttga

SEQ ID NO: 33550 - protein, 127 aa, Unknown
  Obtained from environmental sample
  misc_feature (1)..(127): Xaa is any amino acid
MNRGHPAFLLGHNKGAARNAHQHLVPRLFKVMHFHIRLVFACRVQGSFIYQVGNVGAAHSRSRPCDTAKINILSHGYLRGVYLQNRLALLDVRHRDYYLPVEAAGPQQGRVQNVGAVCRRENYNPVF

SEQ ID NO: 33551 - DNA, 1029 bp, Unknown
  Obtained from environmental sample
  misc_feature (1)..(1029): n is a, c, g, or t
atgtttggcagtatttcaacagatttaggtattgatttaggaacctgtaatacgcttatttatataaagggcaagggtatagtattgaacgagccttctgttgtcgcggttgaaagaggcacaaaaagactcgttgctgtcggagcagaagctaaacggatgctttggaaaacacctgaaaatataattgcaataagacccatgcgcgacggagttattgcggatatagaatccaccgaaaaaatgattcggttttttatatatcgtgtttttccgcgttatcgatttataaaaccaaggatggttatcggcgttccgtcatgtattaccgaagttgaaagacgtgcagtagaagaaagcgcatataaatcaggcgcaaaagatgtacatgttatcgaagaaagccttgccgccgcaatcggcgctgatattccgatacgcgagcccgccggtcacatgatttgcgacattggcggcggcacaacagaaatctccgttatttcacttggaggcatggttgttacaagcgccatacgcattggcggtgatgaattcgacgaagcaataataaagcatattaaaggcgttcataatcttgtaatcggcgaacaaatggcggagaaacttaaaatggaaatcgggaatgcttctcctgaaaaaataatagaaaaaatggaagtaaagggtaatgacgcaattacaggacttccgcgcagacttgaaattgattctgtagaagtacgcgaagcgctaaaagatcctattacttcaataattgacgaaataaaagctacgcttggcaagactcctccggagctggcggcggatattgtggacagaggcattgtaatgacaggaggcggttctctgttaaaaggactggacaaactgatcgcaaaagaaacaggagtacccgcgattattgccgatcagcctgaaaattgcgtcgcattaggcgcgggaaaatattttgattacttaaaaagcgccgatttaataaagaatatctatgacagattgaacggttag

SEQ ID NO: 33552 - protein, 342 aa, Unknown
  Obtained from environmental sample
  DOMAIN (6)...(332): MreB/Mbl protein
  misc_feature (1)..(342): Xaa is any amino acid
MFGSISTDLGIDLGTCNTLIYIKGKGIVLNEPSVVAVERGTKRLVAVGAEAKRMLWKTPENIIAIRPMRDGVIADIESTEKMIRFFIYRVFPRYRFIKPRMVIGVPSCITEVERRAVEESAYKSGAKDVHVIEESLAAAIGADIPIREPAGHMICDIGGGTTEISVISLGGMVVTSAIRIGGDEFDEAIIKHIKGVHNLVIGEQMAEKLKMEIGNASPEKIIEKMEVKGNDAITGLPRRLEIDSVEVREALKDPITSIIDEIKATLGKTPPELAADIVDRGIVMTGGGSLLKGLDKLIAKETGVPAIIADQPENCVALGAGKYFDYLKSADLIKNIYDRLNG

SEQ ID NO: 33553 - DNA, 300 bp, Unknown
  Obtained from environmental sample
  misc_feature (1)..(300): n is a, c, g, or t
ttgtccagtccttttaacagagaaccgcctcctgtcattacaatgcctctgtccacaatatccgccgccagctccggaggagtcttgccaagcgtagcttttatttcgtcaattattgaagtaataggatcttttagcgcttcgcgtacttctacagaatcaatttcaagtctgcgcggaagtcctgtaattgcgtcattaccctttacttccattttttctattattttttcaggagaagcattcccgatttccattttaagtttctccgccatttgttcgccgattacaagattatga

SEQ ID NO: 33554 - protein, 99 aa, Unknown
  Obtained from environmental sample
  misc_feature (1)..(99): Xaa is any amino acid
MSSPFNREPPPVITMPLSTISAASSGGVLPSVAFISSIIEVIGSFSASRTSTESISSLRGSPVIASLPFTSIFSIIFSGEAFPISILSFSAICSPITRL

SEQ ID NO: 33555 - DNA, 336 bp, Unknown
  Obtained from environmental sample
  misc_feature (1)..(336): n is a, c, g, or t
ttgctgtcaatagcgcgttcttatattgcgatggaagaatataatatggcggctgggtatttaaaaaggtgcattgaaatatcgccggatgcaaaatccgttgtaattgcacgttttttgttagctgaaatcttcagactgaccggagattataacagcgcggaagaacaatatttaagaatattaaatgactcaggcgaaaatgccgaagttcattatcagttaggtgaattgtataacctgaaaggcgatacaaccagagcaagagcggaatggagactggcatacagacaggatccggcacacgcaagaacaagagcgcggcttaatatatag

SEQ ID NO: 33556 - protein, 111 aa, Unknown
  Obtained from environmental sample
  DOMAIN (69)...(102): Tetratricopeptide repeat
  misc_feature (1)..(111): Xaa is any amino acid
MLSIARSYIAMEEYNMAAGYLKRCIEISPDAKSVVIARFLLAEIFRLTGDYNSAEEQYLRILNDSGENAEVHYQLGELYNLKGDTTRARAEWRLAYRQDPAHARTRARLNI

SEQ ID NO: 33557 - DNA, 1650 bp, Unknown
  Obtained from environmental sample
  misc_feature (1)..(1650): n is a, c, g, or t
atggtgagttttcataacggttatgtaaaaaacaaggcgatggaatttatcggggacggagtcgataaattgacggttgatttccggaacgggattgacgtaatgacaaccgagacagcctgctggtcttcgatatggaaaaccgacgcgcaggttaaaaagtatcttgaagagcggggcaggggatgcgattacaaggagttaaagcccgccgccgccgcatactacgacggattcattaaagttgatctttctaaaattgagccctgtatcgcgcttccttttcatccaagtaatgtttacacgataaaaaacctgcaaaataacgcaaaagatattttcgccaaaattgaaaaagaaaataaagacgcgggtattaacctgaacctcggcgttaaatgccataatggcggaatatgggcggatcaggcggttattgccggctgttccggcggcattttttcaaacatcatggcggcgtccgacatattaaagggacactcaacgggaaacagtaatttttctttaagcgtgtatcccgaaagccagcctacttatcttgaactggtaaaaaacggcgcggtagaaacatttatgaaagccggcgcccttgtccgcgaagctttctgcggcccgtgtttcggcgcgggagacacgcccgcgaacaacgagctttccatccgccacgttacgcgcaatttccagaaccgcgaaggctcaaagccgggagacgggcagattgcctcggtagcgctcatggacgcgcgttcaatcgccgccncgcgctntacaggggggaggataacagccgcgacggaactgcaggttccctttggcaagtacaagtttttctttgacaagggagtgtacgaaaagcgggtttataacggaacttcaaagcccctgccacaaaccgatcttgtccttggccccaacatcagggactggccggcaatgcccgcccttgcggaaaacatccttgtcaatgtctgttgtttcatcactgatccggtgacaaccaccgacgagttaattccttccggcgaaacttcctcgtaccgatcaaaccccctcaggcttgcggaattcaccctgtctcgcaaagaccccgattatgtgcggagggctaaagacatacagacaatagaacaggcgcgccgaaataataagcaagatccggaaaccgccgcgcttctcaaggaaatccatggcatccccggctgcgccaatatcagtctttcggagatcggcgttggcagcgcgatttttgcccgcaagcccggcgacggttcggcccgcgagcaggccgtttcctgccagcgcgtattgggcgcgtcggcgaatttcgccctggaatacgcgaccaagcgctaccgctccaacctgattaactggggcatactgccttttattatcaacgatgaaacagcccttggccttaacagatgggttttcattccgctggttcaaaaacagctgcgggaaaaagcccggacgctcaaggcttatgtgttaagcgaaaaatcatcggaaatagccgtcacccttggcgaacttaccgataccgaacggcagatactgctggacggctgtctgataaatcattatagggaatggggagtagggagaagggagtcgggtttttgttag

SEQ ID NO: 33558 - protein, 549 aa, Unknown
  Obtained from environmental sample
  misc_feature (1)..(549): Xaa is any amino acid
MVSFHNGYVKNKAMEFIGDGVDKLTVDFRNGIDVMTTETACWSSIWKTDAQVKKYLEERGRGCDYKELKPAAAAYYDGFIKVDLSKIEPCIALPFHPSNVYTIKNLQNNAKDIFAKIEKENKDAGINLNLGVKCHNGGIWADQAVIAGCSGGIFSNIMAASDILKGHSTGNSNFSLSVYPESQPTYLELVKNGAVETFMKAGALVREAFCGPCFGAGDTPANNELSIRHVTRNFQNREGSKPGDGQIASVALMDARSIAAXRXTGGRITAATELQVPFGKYKFFFDKGVYEKRVYNGTSKPLPQTDLVLGPNIRDWPAMPALAENILVNVCCFITDPVTTTDELIPSGETSSYRSNPLRLAEFTLSRKDPDYVRRAKDIQTIEQARRNNKQDPETAALLKEIHGIPGCANISLSEIGVGSAIFARKPGDGSAREQAVSCQRVLGASANFALEYATKRYRSNLINWGILPFIINDETALGLNRWVFIPLVQKQLREKARTLKAYVLSEKSSEIAVTLGELTDTERQILLDGCLINHYREWGVGRRESGFC

SEQ ID NO: 33559 - DNA, 612 bp, Unknown
  Obtained from environmental sample
  misc_feature (1)..(612): n is a, c, g, or t
gtgcgctgcgtccttgacgacgcgccgcccgccccaagcaataccggcgccggtgtgaatgaagtcggggccgcggcggagccgacggatttgttcaccgacagcagagacgaccaaacctacagaacggtgaagatcggacggcagacatggatggcgaagaacctgaattatcagataggcggttctcggtgttataaaaacagcgcggatagttgcgagaaatacgggcgcttgtacaactgggacgcggcgaaaacggcgtgccccgccggatggaagctgcccgccaatcaggattgggataaattggcggctacggcgggcggtcctaaggtcgccggcaagaagttgaaatctgagatcggctggaacgacgacggcgacggaacggatgatttcggattttcggccctccccggcggatactatttcttcggcgacgagttcgaggaggccggaaacatcggtttctggtggtcggccacggagaacgtaggctcttaccccagcgccaagtccatacgcaacgccgccgacgatatggacgggaacaaccggctcagagccttgggtctatccgtgcgctgcctgcaagacgcgcgcaaataa

SEQ ID NO: 33560 - protein, 203 aa, Unknown
  Obtained from environmental sample
  misc_feature (1)..(203): Xaa is any amino acid
MRCVLDDAPPAPSNTGAGVNEVGAAAEPTDLFTDSRDDQTYRTVKIGRQTWMAKNLNYQIGGSRCYKNSADSCEKYGRLYNWDAAKTACPAGWKLPANQDWDKLAATAGGPKVAGKKLKSEIGWNDDGDGTDDFGFSALPGGYYFFGDEFEEAGNIGFWWSATENVGSYPSAKSIRNAADDMDGNNRLRALGLSVRCLQDARK

SEQ ID NO: 33561 - DNA, 534 bp, Unknown
  Obtained from environmental sample
  misc_feature (1)..(534): n is a, c, g, or t
gtgatgcttccagaaccggggcaattcggaaaacagcgaggaactgtgnaggcaaacactcgttatgtgaagcgaattgaagattcaaaaaccgttgatgaaattaccggaaatatgcgtttgattctggatcaaatggcggggaaactgttttcctttcagggtgtccgccacgcatccgcgctgcggaaagcggaacgctttatctgggaaaatttcagcagaaaaatcagcctgaaagaaattgccgatgtgtcgggactttcagcgccgtatttcagcactattttcaaggaagaaatgggtgaaaatctttcaacctatcttaaccggctcagggtggaaaaggcgtcatcaatgcttcgggaaacggaatatcccattaacggaatatccgcggcctgcggttttgaggatcaaagctggttttcaaaaattttcaaacattataccggttacagtccctgtcaataccgggaacaaggaggaatcattatggcagacaaaattttaacaccggggaggagtagttag

SEQ ID NO: 33562 - protein, 177 aa, Unknown
  Obtained from environmental sample
  DOMAIN (64)...(110): Bacterial regulatory helix-turn-helix proteins, AraC family
  misc_feature (1)..(177): Xaa is any amino acid
MMLPEPGQFGKQRGTVXANTRYVKRIEDSKTVDEITGNMRLILDQMAGKLFSFQGVRHASALRKAERFIWENFSRKISLKEIADVSGLSAPYFSTIFKEEMGENLSTYLNRLRVEKASSMLRETEYPINGISAACGFEDQSWFSKIFKHYTGYSPCQYREQGGIIMADKILTPGRSS

SEQ ID NO: 33563 - DNA, 1101 bp, Unknown
  Obtained from environmental sample
  misc_feature (1)..(1101): n is a, c, g, or t
ttgacacatactattagcgtcaattccaaagacgagataggcgaccttgccatgtacttcaacaaaacgctggaaaaaatcaggaatatgatcatccatatcaaggatgaggcggatggtctgtcagggataggcaacgatcttgccagcaacatgaccgagacggccgccgcggtgaaccaaatcaccgccaacatccagagcatcaagggccgcgttattaaccagagcgcaagcgttacccagaccaacgccaccatggaacaggttatctccaatatcaacaaactcaatagccatgtggaagaccagagcagcaatatttccaaggcttcgtccgccattgaggaaatggtagccaatgtcggttcggtaacccaaacgctggttagaaacgttgataatgtaaacacgttaaaagaagcttccgaagtgggccgcagcggattacagggagttgtggcagatattaagggaatagcccttgaatccgaagacctgttgaaaattaacgcggtaatgaaaaacatagccagccagaccaacctgctttcgatgaacgcagcgatagaagcggctcacgccggggaagcgggcagaggcttcgccgttgtcgccgatgaaatccgcaaactggcggaaaactcaagcgagcagtccaaaaccatcggtaccgtacttaaaaaaataaaggcttcaatcgacaagataaccaattccacagaaaacgtgcttaacgagtttgaagcgattgactcaagcgttaaaacggtagtggaacaggaggataatatccggaacgcgatggaggaacagggcgagggcagcaggcagatactggacggcattagcaatgtaaatgaagttacccggcaggtaaagggcggttccgagcaaatgcttgagggcagcaaagaagtaataaatgaaagccacaaccttgaaacggtaacgcaggaaataaccggcggcatgaacgagatggcctccggcgcggagcaggtaaacgtagcggtacaccacgtcaacgagatatgcgtaaagaaccgcgagagaattggggctttgatacaggaagtatcacggttcaaagtagcctaa

SEQ ID NO: 33564 - protein, 366 aa, Unknown
  Obtained from environmental sample
  DOMAIN (88)...(322): Methyl-accepting chemotaxis protein (MCP) signaling domain
  misc_feature (1)..(366): Xaa is any amino acid
MTHTISVNSKDEIGDLAMYFNKTLEKIRNMIIHIKDEADGLSGIGNDLASNMTETAAAVNQITANIQSIKGRVINQSASVTQTNATMEQVISNINKLNSHVEDQSSNISKASSAIEEMVANVGSVTQTLVRNVDNVNTLKEASEVGRSGLQGVVADIKGIALESEDLLKINAVMKNIASQTNLLSMNAAIEAAHAGEAGRGFAVVADEIRKLAENSSEQSKTIGTVLKKIKASIDKITNSTENVLNEFEAIDSSVKTVVEQEDNIRNAMEEQGEGSRQILDGISNVNEVTRQVKGGSEQMLEGSKEVINESHNLETVTQEITGGMNEMASGAEQVNVAVHHVNEICVKNRERIGALIQEVSRFKVA

SEQ ID NO: 33565 - DNA, 1203 bp, Unknown
  Obtained from environmental sample
  misc_feature (1)..(1203): n is a, c, g, or t
atgcagacgaagttcggcataatagactggaatcactatataaaagaatcaaaaaaatatctggatattgtgggcttaaaagagccgcccgaaaccattgtaagcaaaatgggagtaggcaaacaacagttagtagaaatagcccgcgccctttcaaaaaagacggaactgcttattctggacgagcctacgtcttcgcttaacgatgatgaaagcgagaaattgctaaaccttattcttgaattcaagaagcagggaataacctgtgtgatgatttcccataagttaagcgaagtgctgaaggtggcggataccgtaaccgttttacgggacgggaagtccatccgtacgtttgatgtaaaaggcgacaatcttaccgaagaaatgatcattaaagacatggtaggcagggatttgacacaccgctttccggagcgtaagtcaacgcctggtgaaacggtaatggaagtaaaaaactggacggtttaccaccccgattaccatgacattaaagtagttgatgatgtttcgttcttcctccgcagaggcgagattctggcgttctgcgggccaatgggagcggggcgcacggaactgatgatgagccttttcggcaggtcttacggttcccgtagtacaggggaacttcgcattgacggtaaaacacgcacgttcaacagcgcccgcacagcaatcaattcggggcttggttatatttccgaggatcgtaaaagcctgggacttgtgttgattcaggatataaaaaccaatattactcactccagtctaaataagatttcgcagttcggaataattgacaaccaaaaggaaataaaacaggcggaacgctaccgaaaagatctaaatataagaacgccttccataaaccagcttgtgcgtaacctttccggcggcaaccagcagaaggttgtggtaagcaaaagccttctggcggatccggaaatttttatcgttgacgagccgaccaggggcattgacgttggggcaaaaacagaaatttacgggattctgaacaacatgatcgccgccggcaagagcgttattatgatcagttccgagcttcccgaagcgttgggcatggcggatcgtatttatgtaatgaacgaaggcaagataaaaggggtgcttaacaaggaagaggcgacccaggaaaaaataatgcatctggcgctggtcggatga

SEQ ID NO: 33566 - protein, 400 aa, Unknown
  Obtained from environmental sample
  DOMAIN (1)...(112): ABC transporter
  misc_feature (1)..(400): Xaa is any amino acid
MQTKFGIIDWNHYIKESKKYLDIVGLKEPPETIVSKMGVGKQQLVEIARALSKKTELLILDEPTSSLNDDESEKLLNLILEFKKQGITCVMISHKLSEVLKVADTVTVLRDGKSIRTFDVKGDNLTEEMIIKDMVGRDLTHRFPERKSTPGETVMEVKNWTVYHPDYHDIKVVDDVSFFLRRGEILAFCGPMGAGRTELMMSLFGRSYGSRSTGELRIDGKTRTFNSARTAINSGLGYISEDRKSLGLVLIQDIKTNITHSSLNKISQFGIIDNQKEIKQAERYRKDLNIRTPSINQLVRNLSGGNQQKVVVSKSLLADPEIFIVDEPTRGIDVGAKTEIYGILNNMIAAGKSVIMISSELPEALGMADRIYVMNEGKIKGVLNKEEATQEKIMHLALVG

SEQ ID NO: 33567 - DNA, 408 bp, Unknown
  Obtained from environmental sample
  misc_feature (1)..(408): n is a, c, g, or t
atgttgttttttatcagggttttagtatcggaagtatggatgactctatcgctcattgtttcctcctcatccgaccagcgccagatgcattattttttcctgggtcgcctcttccttgttaagcaccccttttatcttgccttcgttcattacataaatacgatccgccatgcccaacgcttcgggaagctcggaactgatcataataacgctcttgccggcggcgatcatgttgttcagaatcccgtaaatttctgtttttgccccaacgtcaatgcccctggtcggctcgtcaacgataaaaatttccggatccgccagaaggcttttgcttaccacaaccttctgctggttgccgccggaaaggttacgcacaagctggtttatggaaggcgttcttatatttag

SEQ ID NO: 33568 - protein, 135 aa, Unknown
  Obtained from environmental sample
  misc_feature (1)..(135): Xaa is any amino acid
MLFFIRVLVSEVWMTLSLIVSSSSDQRQMHYFFLGRLFLVKHPFYLAFVHYINTIRHAQRFGKLGTDHNNALAGGDHVVQNPVNFCFCPNVNAPGRLVNDKNFRIRQKAFAYHNLLLVAAGKVTHKLVYGRRSYI

SEQ ID NO: 33569 - DNA, 894 bp, Unknown
  Obtained from environmental sample
  misc_feature (1)..(894): n is a, c, g, or t
gtggacaagacagcccgcgcttacgatcttattaccggttcagggaaggcgttcttcctctcgcgtccgaggcgcttggggaagtcgctgctctgttcgacgcttggggcgatcttcgaggggcggcgcgagcttttcggggagatcgccggaagaccggcgttggccatcgacggcctcgactgggagtggaagaagcatccggtgattaggatcgacctgagcgccgggaactacggtaagggggtggcggcattactctcaaccatacacgcagagatgcggagcgaggcggaaaagtacggcatcacgctttaccgcgatgatcaaccggccagccaattcaagtatcttatagaaaaggcctctcaaaatgtcggcgaaaaggctgtagtaattattgacgaatacgacagtccgatgacgggtacactgaccaagcgggatgttcatattgaactgcgggaggagctcagggcgttctacagcgtccttaaatcttgcgacgcctacctgcgcttcatattcctaaccggcatcagcaagttctcccaagtaagcgtcttttccgctctgaaccagctttcagacatgacgcttgacccgcgctatgcggacatctgcgggatgacccaagaggagatagaggcgaattttgggccggagattgatggtgttttggaaagtacggagagtagccgcgaagaatacctggacaaactgcgccagttctacaacggctaccgcttctctagaaaaccgctcacagtctacaatcctttcggtctgctcaatcatttcgataacggcgggtattttcagccgtattggtacagaaccggcacgcccgcgctcctgaccgaccttattaacgaccgcgacatcgacatctga

SEQ ID NO: 33570 - protein, 297 aa, Unknown
  Obtained from environmental sample
  DOMAIN (1)...(297): Protein of unknown function (DUF1703)
  misc_feature (1)..(297): Xaa is any amino acid
MDKTARAYDLITGSGKAFFLSRPRRLGKSLLCSTLGAIFEGRRELFGEIAGRPALAIDGLDWEWKKHPVIRIDLSAGNYGKGVAALLSTIHAEMRSEAEKYGITLYRDDQPASQFKYLIEKASQNVGEKAVVIIDEYDSPMTGTLTKRDVHIELREELRAFYSVLKSCDAYLRFIFLTGISKFSQVSVFSALNQLSDMTLDPRYADICGMTQEEIEANFGPEIDGVLESTESSREEYLDKLRQFYNGYRFSRKPLTVYNPFGLLNHFDNGGYFQPYWYRTGTPALLTDLINDRDIDI

SEQ ID NO: 33571 - DNA, 1626 bp, Unknown
  Obtained from environmental sample
  misc_feature (1)..(1626): n is a, c, g, or t
atggggagaagacagggaataatcaacaaaaaacccgcgaacgcgcttcttgcgaaatacggaacccctgagtcggcggacaaagcgttagccgcgcttaacgagtactggaataaccttcttgggcgctttaccgtggacgcggaagacaagaaaatggcgcgtatggcgggcgtttggaaccagtatcagtgcatggtcacatttaacatgtcgcgcagcgcttcctattttgaatcggggatagggcgcggcatgggtttccgcgattcaaatcaggacttattgggctttgtccaccttgttcccgagcgggcccgttcccgtattttggacattgcggcgacgcagttcccggacggaagcgcgtaccatcagtaccagccgcttacaaagcgcggcaacaacgagattggctcgggctttaacgacgatccactgtggctcatctgcggggtcgcggcgtacatcaaggagacaggcgactacggcatccttgacgagaaagtgcctttcgacaacgacgaatcattagccgacacgctctttatccacttaaagcgttcgtttgattatacagtaacccataaaggcccgcacggccttcccttaatcggacgcgccgactggaacgactgcctgaaccttaactgcttttcaaaaactcccggcgaatcttttcagaccacggccaactttgaaagcggcgtcgcggaatcggtgttaatcgcggcgattttcgcgtttaccggccccgattatgccgagatatgccgccgcaccaaacgcgcagaagaagccgaatacgcggaaaaagccatcgccgcgatgatagaggcgattaatcaacacggctgggacggcgactggtttgtccgcgcctatgacgcgtacggtaaaaaaatcggcagccgcgagtgtgaagacggaaaaatatatattgaatccaacggtttcgccgtgatggcgggcataggtcttaatgacggacgcgcccagaaagcgcttgattccgtaaaagatcaacttgatacaaagtacggcattgtgctgttgcagccggcgtacaaggactatcatcttgagttaggtgaagtttcctcatatccgccgggatacaaggaaaacgccgggattttctgccacaacaacccgtgggttacgataggggagactgtgcttggcaggggaaaccgcgcgtttgaaacctacacaaaaatctgccccgcctaccgcgaagacgacagcaatcttcgcagaatggaaccgtatgtgtatgcgcagatggtagcgggtaaagacgcggttaatcacggcgaggcgaaaaattcatggcttacggggacagcggcgtggacatttgtcagtatttcgcagtacattctgggagtgcgccccgtctttgacggcctcatgctcgacccgtgcattccctcaggcatgaaaggctataccgttacacgccggttccggggcgcggattatcatatcacggtagacaacagcgcgggcgtcgaaaagggagtaaaatccataacggtagacggtaatccgcatgacggagttgtactgccggtattcggcgacaatagggtgcacaatattattgtaacgatggggaaataa

SEQ ID NO: 33572 - protein, 541 aa, Unknown
  Obtained from environmental sample
  misc_feature (1)..(541): Xaa is any amino acid
MGRRQGIINKKPANALLAKYGTPESADKALAALNEYWNNLLGRFTVDAEDKKMARMAGVWNQYQCMVTFNMSRSASYFESGIGRGMGFRDSNQDLLGFVHLVPERARSRILDIAATQFPDGSAYHQYQPLTKRGNNEIGSGFNDDPLWLICGVAAYIKETGDYGILDEKVPFDNDESLADTLFIHLKRSFDYTVTHKGPHGLPLIGRADWNDCLNLNCFSKTPGESFQTTANFESGVAESVLIAAIFAFTGPDYAEICRRTKRAEEAEYAEKAIAAMIEAINQHGWDGDWFVRAYDAYGKKIGSRECEDGKIYIESNGFAVMAGIGLNDGRAQKALDSVKDQLDTKYGIVLLQPAYKDYHLELGEVSSYPPGYKENAGIFCHNNPWVTIGETVLGRGNRAFETYTKICPAYREDDSNLRRMEPYVYAQMVAGKDAVNHGEAKNSWLTGTAAWTFVSISQYILGVRPVFDGLMLDPCIPSGMKGYTVTRRFRGADYHITVDNSAGVEKGVKSITVDGNPHDGVVLPVFGDNRVHNIIVTMGK

SEQ ID NO: 33573 - DNA, 849 bp, Unknown
  Obtained from environmental sample
  misc_feature (1)..(849): n is a, c, g, or t
ttgatggcacgagggtttattcattatcgtcgccattctggcatcagggttgttaccctgcccggcgccggcgcgggacttgaattctacctcaaaccaaatcttagcgcgataaaggaacagggccttttcactgttttatttgccgctctgggtcaggctttcttcaccttgagccttggtataggcagtatggccattttcggcagttatattaacaaagaaaaacgccttgctggcgaagcgataaccgttaccattctggataccggcgccgccctactcgccggccttgtcgttatccccgcctgttttgcctttggtttaagtcccaccggcggccccggcttgatatttatgactctgcccaatgtattcaacggcatgggtatgggccagctttggggagccctgtttttcctgttcatgacctttgccgccatgtcgacggttatcgctgtttttgagaacatcattgccttcgcgatggatatcaccggctgcagcaggataaaatccacccttataaacctcgttgttgtgattgtcctttctttaccttgcgccctcggattcaacgtgcttagtgataagttcacactcatgggaggcgtcctcgactttgaagattttattctttccaataaccttctgcctctgggcgcgctggtttacgcgctattctgcgtgtccaaaattggctggggctttgatagattcatcaaggaagcaaataccggaacaggccttggtttatccgagaaactgaaaccttacctggtttggggccttccgttgttgcttgccttattctacattttcggctacatcaatatgtttgcgggttaa

SEQ ID NO: 33574 - protein, 282 aa, Unknown
  Obtained from environmental sample
  DOMAIN (1)...(258): Sodium:neurotransmitter symporter family
  misc_feature (1)..(282): Xaa is any amino acid
MMARGFIHYRRHSGIRVVTLPGAGAGLEFYLKPNLSAIKEQGLFTVLFAALGQAFFTLSLGIGSMAIFGSYINKEKRLAGEAITVTILDTGAALLAGLVVIPACFAFGLSPTGGPGLIFMTLPNVFNGMGMGQLWGALFFLFMTFAAMSTVIAVFENIIAFAMDITGCSRIKSTLINLVVVIVLSLPCALGFNVLSDKFTLMGGVLDFEDFILSNNLLPLGALVYALFCVSKIGWGFDRFIKEANTGTGLGLSEKLKPYLVWGLPLLLALFYIFGYINMFAG

SEQ ID NO: 33575 - DNA, 552 bp, Unknown
  Obtained from environmental sample
  misc_feature (1)..(552): n is a, c, g, or t
atgaccacggaggaaatgcttcgcctcaaaggtacattcatggctccctatatgcagcttgccaccgctcttatcggtaaaaccagagaggggggcggcaatatgttccggcatcagtttgataccatggctactcttattgactacggctacatagattcagtcctgcttaaagcctcgatagtgcatgacctttttgaggatgtgccggatttcaaccgcaacctccttttgcaggtggactttgaaagcgccgccgtttatgaattggtgatggaggtaacccgccgcggtgaagaatccaaagcgcaattccttacccgtattctggaaacaggttccaggcaggccaaggtattaaaggtggcggatagaatttccaacatgattgacattggttttgtgataaataccgagttcatccaccgttacaccgaggagactgtgcagtttattttccccatggcagagcaggtggacaaatccatgctttcggagcttaaaactctggtggaatcccgccggaagtatctttcggctattattcaataa

SEQ ID NO: 33576 - protein, 183 aa, Unknown
  Obtained from environmental sample
  misc_feature (1)..(183): Xaa is any amino acid
MTTEEMLRLKGTFMAPYMQLATALIGKTREGGGNMFRHQFDTMATLIDYGYIDSVLLKASIVHDLFEDVPDFNRNLLLQVDFESAAVYELVMEVTRRGEESKAQFLTRILETGSRQAKVLKVADRISNMIDIGFVINTEFIHRYTEETVQFIFPMAEQVDKSMLSELKTLVESRRKYLSAIIQ

SEQ ID NO: 33577 - DNA, 1284 bp, Unknown
  Obtained from environmental sample
  misc_feature (1)..(1284): n is a, c, g, or t
atgggctgggaaaatgacaagtgcgataccgatgatttccaccgctattatcctactaccgcccttgtgacagcctatgacattatctttttctgggtagccaggatgatcatggcgggccttgagttcaccggcaaagccccttacagggatgtttatattacacagcttatccgcgacaaacagggccgcaaaatgtccaagacccttgataacggaattgacccgctggaaattattgataagtttggcgctgacgctttaaggttcacccttgcttacctctgtgcccagggtcaggacattttaatggataaggagtcatttaagctgggctccaaattcgctaacaaggtctggaacgcaagccgctatattcttatgaatctggaaggaaggaacctcgtagagaaaccggccctgcttcctgttgacaagtggatatacgccagacttaacagtaccgcgcgcgcaatggaagaagcttttctgtcttaccgtttcaatgacgctgccgggtctgtctacgaatacttttggaatgatttttgcgactggtatgttgaagccacaaaactttccattaaaggcgagagtaacggggagaaagacagggcaagcacggtgctgcttgatgtgctggcaaaatctttaaggctgcttcatcctctcctcccgtttgtgaccgaggaaatttacggtaagcttccgaacatcaaaaatgagcttctcattaccgctccttatccggtttatcaaaaagaacttgccaatgaaaaagcggaaaaagactttgtctttctgcaagagctggttcgtcaggtgcgtacattgcgtagcgaatgtacaatcccgccggatgaaaaacttaaagcccgtcttcgggtttccacacctgaaagcgaagatatcctgaatgaaaacgcggctcttgtaaagctcctggcgggaattggcgacctggaaatcgcgccaaattcctggctggaagcctctccttccaatcaggaagccaggccgcaaggctccatagggatcgccggaaacgggtttgaggcttttgtgtttatcgccgaggcggtggacataaaactgttgaaacaaaaatttgataaagagctggagaaggacaggaaatttgtcgcgaacctgaaagctcgtctggcaaatgaggatttcctgaaaaacgctccgcctgaacttgtggaaggcgaaaagcggaaattggaagagggcctgaaaaaaaccggcaaacttgaatcttatatcagggacatggcttag

SEQ ID NO: 33578 - protein, 427 aa, Unknown
  Obtained from environmental sample
  DOMAIN (145)...(295): Anticodon-binding domain
  misc_feature (1)..(427): Xaa is any amino acid
MGWENDKCDTDDFHRYYPTTALVTAYDIIFFWVARMIMAGLEFTGKAPYRDVYITQLIRDKQGRKMSKTLDNGIDPLEIIDKFGADALRFTLAYLCAQGQDILMDKESFKLGSKFANKVWNASRYILMNLEGRNLVEKPALLPVDKWIYARLNSTARAMEEAFLSYRFNDAAGSVYEYFWNDFCDWYVEATKLSIKGESNGEKDRASTVLLDVLAKSLRLLHPLLPFVTEEIYGKLPNIKNELLITAPYPVYQKELANEKAEKDFVFLQELVRQVRTLRSECTIPPDEKLKARLRVSTPESEDILNENAALVKLLAGIGDLEIAPNSWLEASPSNQEARPQGSIGIAGNGFEAFVFIAEAVDIKLLKQKFDKELEKDRKFVANLKARLANEDFLKNAPPELVEGEKRKLEEGLKKTGKLESYIRDMA

SEQ ID NO: 33579 - DNA, 1536 bp, Unknown
  Obtained from environmental sample
  misc_feature (1)..(1536): n is a, c, g, or t
atgatcatacagcgtgatgttttttttccggtttggagcaaagaaaaactttctattacattcgcggaaaaaaaatacgaatcgcaaaaagttaacggaaaatggcttttaacgcttgatcctgtaaaagccggcgggccttttacaatggacatttcaagcgaaaaaggctcctataccgtatcggatatttacgcgggcgacttatggatgtgcgcgggacagtccaacatggaaatgatgatggagcgcctgcgcgacgattatgccggggaatgggaaaacaaagacttcccccttgtcaggcttttcaatgcgccgcaggaatttgatttttcctcaccctgcgaagaattaaccggcggaagctggatttccccttcaaaggaaacccttcacgaatttacagccgccggctggttctttgcgggggaaatgtacaaaaaatacggcgtccccataggactggtaaggactgcatggggcggcactccggttgaatcatggatgagcgcggacgcccttaaagattttcccgggaaaatcgccgagggtaaaaaatacgccgacagcgccaaaagggagcaaatcgcaaaagaaacggcggacgctttaaataaatgggaaaaaaatttaagaatcgaagacttagggcttgcccaagaatgggaaaaagagcaaacggatatatcaaactggaatgacattgccctgcccggcgatttttactcatcggggcttaccgatttttgcggagtaatctggcttgccagggatattgaagcaagcgaatgttttgcctttaaaaaagtttttgtctggcttggcactattacggacgccgacacggtctatataaacggagttgaaataggaaacacgggctaccgttatccgccgcgcaaatacgcgtgtaaaggaatattaaaaaaagggaaaaaccgtattgtaataagggttatctgcaataacggcgaaggcggctttacgaaaaacaaacctttccgtatatttacagataacgaaacggtagaacttgccggaaaatggaaatataaagtgggagtttcagcttccgtacgccccgatgactttttccctcagcgctttccgacaggcaattataacgccatgatcgccccattattaaaatatccgttaaagggcgttatctggtatcagggcgaatcaaacgattcaagtccgaatgattacgaaaaattattccgtcttatgattcaggactggcgtaaaaaaagcgccaataaagagcttccgttcatctttgtccagcttcctgtctggaaacctccttcagataacaatgaagactcgtcctgggctattatcagggaagcgcaggcggcggctttgtcccttccggcgacaggcatggcctgcgcccttgacttaggcgaatggaacgacttgcatccgctgaataaaaaagatgtaggccatcggctttttctggcggcggaaaaaaccttatttaatattgataactcttctcccgggcctgtnttcatcgcttga

SEQ ID NO: 33580 - protein, 511 aa, Unknown
  Obtained from environmental sample
  DOMAIN (193)...(332): Glycosyl hydrolases family 2, sugar binding domain
  misc_feature (1)..(511): Xaa is any amino acid
MIIQRDVFFPVWSKEKLSITFAEKKYESQKVNGKWLLTLDPVKAGGPFTMDISSEKGSYTVSDIYAGDLWMCAGQSNMEMMMERLRDDYAGEWENKDFPLVRLFNAPQEFDFSSPCEELTGGSWISPSKETLHEFTAAGWFFAGEMYKKYGVPIGLVRTAWGGTPVESWMSADALKDFPGKIAEGKKYADSAKREQIAKETADALNKWEKNLRIEDLGLAQEWEKEQTDISNWNDIALPGDFYSSGLTDFCGVIWLARDIEASECFAFKKVFVWLGTITDADTVYINGVEIGNTGYRYPPRKYACKGILKKGKNRIVIRVICNNGEGGFTKNKPFRIFTDNETVELAGKWKYKVGVSASVRPDDFFPQRFPTGNYNAMIAPLLKYPLKGVIWYQGESNDSSPNDYEKLFRLMIQDWRKKSANKELPFIFVQLPVWKPPSDNNEDSSWAIIREAQAAALSLPATGMACALDLGEWNDLHPLNKKDVGHRLFLAAEKTLFNIDNSSPGPVFIA

SEQ ID NO: 33581 - DNA, 825 bp, Unknown
  Obtained from environmental sample
  misc_feature (1)..(825): n is a, c, g, or t
ttgttttccaaagggggctttgtaagcgtccccccatgcgctgccgcaagttcaatgaaaatacctgtgtttacccacgagtcggatttttcgccgggtcttgccacgcggtttaacacccgatttgccgaaagggtattcgttccctataaggaatcaaccgctttctttacaggcaagacggcaaaaaaaatctgcgtttccgggaaccccgtaagggatgagttcgtggcggcggatccggcaaggggacgcgcattcctcggcctgaaagaaagcgaaaggatactcctcgtcctgggcggcagcctcggctccagggagatcaacgaccttataaaagcctgcctaaaaaatatgacggaattttttaccgtagtgcatcaaaccggagaggataacattgaagacgcctcgaaagagagtgaactgtacaaaccttacgcttatttcagggatgaaatccctcatattatcgcagcggctgacctggtgctttgccgcagcggtgccggcacaatctgggaatgtaagtacctaaaaaaacccatggtgcttattccccttagaggttcgggtacacggggagaccaggtagagaacgcgcgtcttttcgaggaggccggcgccgccgtctgctttatgccggaaaacccactaagttcttccgcggaaaaactttccgctctcattgcttcgcttgcacaaaacccggaaaagcttaaatctatggctgaggcgaagatcggcgggttatctgaaggaaacgcggctgattttatctcgagggaaatcgctgaaaggataagggggaaagatgggtaa

SEQ ID NO: 33582 - protein, 274 aa, Unknown
  Obtained from environmental sample
  SIGNAL (1)...(16)
  DOMAIN (96)...(269): Glycosyltransferase family 28 C-terminal domain
  misc_feature (1)..(274): Xaa is any amino acid
MFSKGGFVSVPPCAAASSMKIPVFTHESDFSPGLATRFNTRFAERVFVPYKESTAFFTGKTAKKICVSGNPVRDEFVAADPARGRAFLGLKESERILLVLGGSLGSREINDLIKACLKNMTEFFTVVHQTGEDNIEDASKESELYKPYAYFRDEIPHIIAAADLVLCRSGAGTIWECKYLKKPMVLIPLRGSGTRGDQVENARLFEEAGAAVCFMPENPLSSSAEKLSALIASLAQNPEKLKSMAEAKIGGLSEGNAADFISREIAERIRGKDG

SEQ ID NO: 33583 - DNA, 525 bp, Unknown
  Obtained from environmental sample
  misc_feature (1)..(525): n is a, c, g, or t
atgggtaatcttccggtgattgattacatttttatttttctggttctgcttatgattgtacacggctatattaaaggttttgttgcggagcttttttcctgggctgccctgatcctggctatatgggccgctgtgcttctgaattcggcggcagcggtttttatcagacagaagaccatggagaatgtgcgcgtagtgcctgagatcctcggttttgccgcggtttttattcttgtaatgattgtgattaagcttctggagaaaattttaagggatgtaatagagggggcaaatctcggatctgtcaataaaattctcggggcacttttcggcgttattgaaggctttgcttttgtaatactcgtcattttcgttcttaccgttcagcctctttttgatccttcaaaaatttttgcgggtagtgtttttgcccaaataatgcttccgttaattagaattccaatgggtcgtgagcgggaaattatagagaccgtgtttcttatactgcctgttttaggtggatag

SEQ ID NO: 33584 - protein, 174 aa, Unknown
  Obtained from environmental sample
  DOMAIN (6)...(160): Colicin V production protein
  misc_feature (1)..(174): Xaa is any amino acid
MGNLPVIDYIFIFLVLLMIVHGYIKGFVAELFSWAALILAIWAAVLLNSAAAVFIRQKTMENVRVVPEILGFAAVFILVMIVIKLLEKILRDVIEGANLGSVNKILGALFGVIEGFAFVILVIFVLTVQPLFDPSKIFAGSVFAQIMLPLIRIPMGREREIIETVFLILPVLGG

SEQ ID NO: 33585 - DNA, 1041 bp, Unknown
  Obtained from environmental sample
  misc_feature (1)..(1041): n is a, c, g, or t
atggtaaaaaccagcgtcgatactaccggagcaagaccggtgtgggaatgggtcccgggngattggaataaaaccgacatttgtgctcatcaggtaactgccaatttggcggccagaataaaggacaaaaaccagaatttatcaatttcggcggtacttcctccgagagattcggttctctccgcaaatgccactttcagggcctggatttcggaaacctcgttgaggaacagtatttcatttctcctggaggaagataaaagaaaaatcgatccggtctatttcactgaaacgttgaggttcacacagggaagcttccagcaatatgtggtttttgatcccgcgctaaatgaatatacgacccttacgtccagcctttctctttccctgggcctttccgcttcgttttcggccgtttacgcccagccatataggtataattacaacgggagtgtggattccagccggcctaacggctggctccaattgaatgacaagaggctgaatccaaatgaattcagggtcagttatgttaaaacttttacacaaaacaatctctgggagaaccgtctttcattttcagtttcccttaatacatcccttgcctttgatcttcaaaggtatacgaattccaaatttagctttagcctgggaataaaaaccaaaattaacaatttccttgatttggatttttcaaccagctctgaaaacgcggtagttttcaaatacttccaaaaactgccgttttttaatcttccgactcagctctatccggggcaagaggccaatctttttgtggatcttttcaattcgttccgttttgataacgataatctgcgcaggcaatcgggatttaaactgaaaactttgaaagtgtccctcatccatcatctgggcgactggaatgccagactgtcagtggcaatgactccgtatttgccccaaggttccagaacttaccaattcagcaacgaaatttctttccttgttcaatgggtacccatcggagaaatcaactcggccgatctgatcaatggttaa

SEQ ID NO: 33586 - protein, 346 aa, Unknown
  Obtained from environmental sample
  misc_feature (1)..(346): Xaa is any amino acid
MVKTSVDTTGARPVWEWVPGDWNKTDICAHQVTANLAARIKDKNQNLSISAVLPPRDSVLSANATFRAWISETSLRNSISFLLEEDKRKIDPVYFTETLRFTQGSFQQYVVFDPALNEYTTLTSSLSLSLGLSASFSAVYAQPYRYNYNGSVDSSRPNGWLQLNDKRLNPNEFRVSYVKTFTQNNLWENRLSFSVSLNTSLAFDLQRYTNSKFSFSLGIKTKINNFLDLDFSTSSENAVVFKYFQKLPFFNLPTQLYPGQEANLFVDLFNSFRFDNDNLRRQSGFKLKTLKVSLIHHLGDWNARLSVAMTPYLPQGSRTYQFSNEISFLVQWVPIGEINSADLING

SEQ ID NO: 33587 - DNA, 705 bp, Unknown
  Obtained from environmental sample
  misc_feature (1)..(705): n is a, c, g, or t
ttgtgccgtcaggcttttattgacaaagtccttgcctttccgaatatcaattttcgttttattcaagacggaaaattaaaagattttttccccgctgtttcgtcaagaaaagaacgttttgccgccgtaaacggcagtgaaaactttcttcacgaaataaatgttacagggacgggtttttcagccgctgtcgtaatcggcggcccgcagctttacagaaatgacagacggcagctttttgtgtttgccaacggcagaagggtgaatgattattctctgattcaggcaatggaatacggaacgcagggatggtttccgaacggaactcatcctataggggctgtgtttgttgaaatcgatcccgccctcgcggattttaacattcatcccgcaaaacgggaggtacgtttccgcgatccaggcgcgattcatcacgctgtttcaggcggcttaaaaagtttttttcatttaaacgcgatccaaaacagtccgcataaatatgagcataagtttaaggaacacaaagaaagtccgtacgaaaaccatcaccatgcttctgaaacgtttaaagagaaacagcagacgcacgaagatcagggacaggatttcaaattttcatataacacatccgtctttgacactgcccgcgttaaagaaagattttctgaaataaaatttacaaatgaacgcctcggccgaatctga

SEQ ID NO: 33588 - protein, 234 aa, Unknown
  Obtained from environmental sample
  DOMAIN (22)...(156): DNA mismatch repair protein, C-terminal domain
  misc_feature (1)..(234): Xaa is any amino acid
MCRQAFIDKVLAFPNINFRFIQDGKLKDFFPAVSSRKERFAAVNGSENFLHEINVTGTGFSAAVVIGGPQLYRNDRRQLFVFANGRRVNDYSLIQAMEYGTQGWFPNGTHPIGAVFVEIDPALADFNIHPAKREVRFRDPGAIHHAVSGGLKSFFHLNAIQNSPHKYEHKFKEHKESPYENHHHASETFKEKQQTHEDQGQDFKFSYNTSVFDTARVKERFSEIKFTNERLGRI

SEQ ID NO: 33589 - DNA, 840 bp, Unknown
  Obtained from environmental sample
  misc_feature (1)..(840): n is a, c, g, or t
atgaagagaacccccataatatctgcccttttagcaattttatttattggcttatttacctcatgcagcacaatatccacggaaacctatcaggtaaaaacaacccgtttggaagaacaaaagatcataagaatagccttaatctctgatttgcacagtacaatatacggaaaagatcaaagtatactaatcaataaggtcaaagatagtaagcctgatataataatgttaaccggcgatatctttgatgatgttgtccctatgaccgggacaacattgtttttatcgggaatttccggcatcgcgcctgttttttatgttacgggtaaccatgaatatatgagccgcaatatggcggaaatcaggaaagaactcctggctcatggagtaaatattttatctgatgcttatacaattattgaaataaaaaatactgaaataattattgcgggaatagatgatccttataaaaaaagatacgaagcgccggattataatcaaaatgaaagtatggaaagggcgttcagggaactggatgaagtaaaattatataaaatattgatggcgcatcgtccggaaagaatcgaaatatataagaagtattcattcgatttggttttatcgggacacacgcacggggggcagctcagaatcccgaatattataaacggattatacgcgcctcatcagggcttgtttcccaaatacgcgggcggaatttatacacatggaaaactgacacatattgtaagcagggggctttcggttaacccgtggcttccgcgaatatgtaaccctccggaactggtaattattattatagaagacgttaaaccctaa

SEQ ID NO: 33590 - protein, 279 aa, Unknown
  Obtained from environmental sample
  SIGNAL (1)...(26)
  DOMAIN (43)...(214): Calcineurin-like phosphoesterase
  misc_feature (1)..(279): Xaa is any amino acid
MKRTPIISALLAILFIGLFTSCSTISTETYQVKTTRLEEQKIIRIALISDLHSTIYGKDQSILINKVKDSKPDIIMLTGDIFDDVVPMTGTTLFLSGISGIAPVFYVTGNHEYMSRNMAEIRKELLAHGVNILSDAYTIIEIKNTEIIIAGIDDPYKKRYEAPDYNQNESMERAFRELDEVKLYKILMAHRPERIEIYKKYSFDLVLSGHTHGGQLRIPNIINGLYAPHQGLFPKYAGGIYTHGKLTHIVSRGLSVNPWLPRICNPPELVIIIIEDVKP

SEQ ID NO: 33591 - DNA, 876 bp, Unknown
  Obtained from environmental sample
  misc_feature (1)..(876): n is a, c, g, or t
atgcttttccattcgctcaattcccagggcgatgacatgacgacgcgccttgccacctccctcatcgagcggcagcgcaggggcgtgtggaacaataccgcgtcttctttctggccggcgcttgcctttggaatgttaggcgattccgaatcggctgagtggaaagcggctaacggcgcgccgtttacggcgccgcccctcgcggtaacgacaagccttgggggcgagtccctgttcaacgccgaatttaaaacttacggcggcgttccggtgtcgcataactggcatttcacggaaaagcccgtgctggatcttccgcgcgacgcgcttctgccgctgaggattgagcgcacaggccccggaaggctctactacacggcaagcctccgctacggcattccgcttgagcttgcgggcgcccgcgacgagggccttggcgtgtttgttgaaacattagactccgaaggcaatcctgtaaagaacggcaggctccaggccggcaagacctatacccggcgcgtcattgtttccagttcccgcgaccgcacttttgtcgccttgcgctcgcccatcccctccggcgctgaaattgtagacgccgtttttgtcacgagttccacagtgccaccttcccaaagggacgaatctgaggacgaggacgattggcgttactacaagcctgcgccggtgcgtttcctgatggacgacgaggcccgcttccactgggactttttcaacgcgggcagggagcagattgaattccgtttccgcgccgtaatgcccggcatttaccccaccccgcccgctactgccgagtgcatgtacgaggaggaaatttttggccgcgcggcaggggagttgatcaggatagaatga

SEQ ID NO: 33592 - protein, 291 aa, Unknown
  Obtained from environmental sample
  misc_feature (1)..(291): Xaa is any amino acid
MLFHSLNSQGDDMTTRLATSLIERQRRGVWNNTASSFWPALAFGMLGDSESAEWKAANGAPFTAPPLAVTTSLGGESLFNAEFKTYGGVPVSHNWHFTEKPVLDLPRDALLPLRIERTGPGRLYYTASLRYGIPLELAGARDEGLGVFVETLDSEGNPVKNGRLQAGKTYTRRVIVSSSRDRTFVALRSPIPSGAEIVDAVFVTSSTVPPSQRDESEDEDDWRYYKPAPVRFLMDDEARFHWDFFNAGREQIEFRFRAVMPGIYPTPPATAECMYEEEIFGRAAGELIRIE

SEQ ID NO: 33593 - DNA, 1404 bp, Unknown
  Obtained from environmental sample
  misc_feature (1)..(1404): n is a, c, g, or t
atggcagagaattttatattgaaacgagcgcaggcgttgcacgaagaccttaggaattatgcgcaacttggggaaaccgaaaagccgctggttgtttccgctattatgctcgcgttaaatgaaaatgagaaaaaaacggagatgttcataaataacttgactggcgatgctgtatatacagacgggcaaaagatatttaacgctgtatctgcacgtatggaaaaagtgaaagtttctgcacaggtgaaaaaagaaaaaatactgaaccaatttaacataatcaaagaccgcacagctttgaacgagaaacactcacgccttgggcaaacccctctccgttattacacggagtatcttcaaaaatatgtgatggattatgcaaagggttcttcaccggaagatgttttgggcagattttatggcgagtttatgagttatagcggtggcgatgggcaatctctgggagttgttttaacccccaagcatataacggagctgttttgcgatttagtggatataaaaccagatgatatattatttgacccttgctgcggcacaggcggttttttgattgcagggatgcacaggatgttagaattggcaaaagataaagcacaaaaaaacagcataaaaaaaaaccaaatctatgggattgaactccgcgaggatatgttttccatcgcaacaactaatatgattttaagaggcgatggcaaaagcaacattgagcaaaatgattttctaaaaacttcaacgactgagttaaagcaaaaaggatttacggttagctttatgaacccgccttattcacaggcaaaaaccagagctacgcagcacttggccgaaatcagttttatagaacacctgctggattgtatgagtgcaaactcccgcgttgtggttatagttccgcagtcaaccatggtaggcaaaaccaaagaaaccagagcggtgaaaaaatccatattggaaaaacatactttaaaaggcgtgataaccttgaacaagcagacattttatcgcataggcacaagcccgtgcatagcggtatttaccgcaggcattccgcacaaaaaggaaaaatttgtaaagtttataaactacgaagatgacggttatattgtgaataaaaatatagggcttgtaaggacggagcgcgcccaggcacaacatcaaaaacttatggatgtatggcgcaacgaccgcgatgctgaaattaaatttatggtcaaagcacggataaaagccgatgacgaatggctgcattctttctattgttttaatgacgaaataccaaccgatgcggattttgaaaaaacaatggcggattatctctcctttgagttcaatatgatttctcacaaccgaggatatttatttggtatggaggagaaaaatgagtag

SEQ ID NO: 33594 - protein, 467 aa, Unknown
  Obtained from environmental sample
  DOMAIN (161)...(334): Putative RNA methylase family UPF0020
  misc_feature (1)..(467): Xaa is any amino acid
MAENFILKRAQALHEDLRNYAQLGETEKPLVVSAIMLALNENEKKTEMFINNLTGDAVYTDGQKIFNAVSARMEKVKVSAQVKKEKILNQFNIIKDRTALNEKHSRLGQTPLRYYTEYLQKYVMDYAKGSSPEDVLGRFYGEFMSYSGGDGQSLGVVLTPKHITELFCDLVDIKPDDILFDPCCGTGGFLIAGMHRMLELAKDKAQKNSIKKNQIYGIELREDMFSIATTNMILRGDGKSNIEQNDFLKTSTTELKQKGFTVSFMNPPYSQAKTRATQHLAEISFIEHLLDCMSANSRVVVIVPQSTMVGKTKETRAVKKSILEKHTLKGVITLNKQTFYRIGTSPCIAVFTAGIPHKKEKFVKFINYEDDGYIVNKNIGLVRTERAQAQHQKLMDVWRNDRDAEIKFMVKARIKADDEWLHSFYCFNDEIPTDADFEKTMADYLSFEFNMISHNRGYLFGMEEKNE

SEQ ID NO: 33595 - DNA, 1314 bp, Unknown
  Obtained from environmental sample
  misc_feature (1)..(1314): n is a, c, g, or t
gtgattacaggctgggacggcagattgttcgtccctgttgaaaaaagactcttttgttatacggcatcgggaaatcttttatggtcaataagattggaagcgccgttttcaattgcgcctaaacccgatcgcagaggcggaataatttttgcgttaaacaataaagaagtttaccgtatcgatcattatgggagagccgctaaatgggcgctttccaatactccctccgtccttgtctctacggcgcagacgcttatttacgcttttttcagagacggaacaatagaagcggtaaatgcggtaaagaacgagaatcaatctcctttggaaaaaaataattctgcgtttccaaaacttccttccgctccgcttgctgcaatagaaagaaacggcaatatcgccgtgagtatgagagacggcagaatagcgtttatatcaacggataaaaaagaaatactctggttcggcgacagccacataagagaaatgattaagacaggcggaagacctgagatggaagcggaaatgctttttgatgaaagagggatttatgttttaagcaaaaacggagcaacgggttttaccgttgacggcaggaggctttggtttacaaacctgcagaacgccgccgcgatacccgcttttggaaatgacggagtattatattccggcggaaaagactggatactttattcatataaaattgaagatcgcgttatgccgggaaaaaacgcgctatacggaccaataccggaaggcaattacggaatgggacgccctctggttcccgataaatttgatattcctttaaacgaagaagaaaaaaaaattaaacttgaagaaatcgccaaaggaataaattcaggtatagtcggagtaaatgaacatgaatggacatcctttttactgacagtttccaccggacaggatcatattactatgagaattgacgctataaaacttttgggaaaaataggttcgcaggaaacaattccctggctggtaaatatttttaaagatgaaaatgagccgttaataagagcggaagccgtaaaagcaatcggaagtataggcgttgacccacaggggcttgcgattcaaacatttttgcagttaataatttacgacggcagcgtaaaggatgatcaaataatgacatcaatagcggcggcgacaggagctttgtgccgtttttcaggaccgccgttaagcgaaatgggtataaaaatattgaatatgttatgcacctcggatcagccgccgccggcaagaagacaggcaaaaaaagaacttaattctcttaacggaggataa

SEQ ID NO: 33596 - protein, 437 aa, Unknown
  Obtained from environmental sample
  misc_feature (1)..(437): Xaa is any amino acid
MITGWDGRLFVPVEKRLFCYTASGNLLWSIRLEAPFSIAPKPDRRGGIIFALNNKEVYRIDHYGRAAKWALSNTPSVLVSTAQTLIYAFFRDGTIEAVNAVKNENQSPLEKNNSAFPKLPSAPLAAIERNGNIAVSMRDGRIAFISTDKKEILWFGDSHIREMIKTGGRPEMEAEMLFDERGIYVLSKNGATGFTVDGRRLWFTNLQNAAAIPAFGNDGVLYSGGKDWILYSYKIEDRVMPGKNALYGPIPEGNYGMGRPLVPDKFDIPLNEEEKKIKLEEIAKGINSGIVGVNEHEWTSFLLTVSTGQDHITMRIDAIKLLGKIGSQETIPWLVNIFKDENEPLIRAEAVKAIGSIGVDPQGLAIQTFLQLIIYDGSVKDDQIMTSIAAATGALCRFSGPPLSEMGIKILNMLCTSDQPPPARRQAKKELNSLNGG

SEQ ID NO: 33597 - DNA, 675 bp, Unknown
  Obtained from environmental sample
  misc_feature (1)..(675): n is a, c, g, or t
atgaaccgttacacgccatatcactttccgcatgagaccgagataatgggagtgatgaccatttccggcggggatgtccgtttttacaataatcttttcataggcgacaaggatgtagaccttccgaatgaatctgtcggcatctggtcggacgctcctgttgccgaccttccgctttcagcggacgcgctggcgaatatgcctacatatatacgaaaacctttggggacaggccagtacgatgattatcccggtgaaaacgatcccgccccgtggcttcctaactccggcaaacaattcggcggcaaattcgatgccggtttcctgcctgtttacattaagcacaacgtttacctgaaaggcgcgaagccctgtatcaaagagcctgatcctgtggtgatccgcgagtgcggcgtggaatttgagatagacagcgctgaatcaaaggttatggtaaaaattgctaatccttctcaactccgttgtcctacgagtgaaataattactaccgaattgcttggtaaaaatcaccatacagagatgctttatgaagaaaaagacggtacgccctacgtgctggacaaagactttaccggcataaagcgatccgctacaccgaccgcaggcccctttgaagcaagcggcagcgatccggtgaagattgaactgggctag

SEQ ID NO: 33598 - protein, 224 aa, Unknown
  Obtained from environmental sample
  misc_feature (1)..(224): Xaa is any amino acid
MNRYTPYHFPHETEIMGVMTISGGDVRFYNNLFIGDKDVDLPNESVGIWSDAPVADLPLSADALANMPTYIRKPLGTGQYDDYPGENDPAPWLPNSGKQFGGKFDAGFLPVYIKHNVYLKGAKPCIKEPDPVVIRECGVEFEIDSAESKVMVKIANPSQLRCPTSEIITTELLGKNHHTEMLYEEKDGTPYVLDKDFTGIKRSATPTAGPFEASGSDPVKIELG

SEQ ID NO: 33599 - DNA, 555 bp, Unknown
  Obtained from environmental sample
  misc_feature (1)..(555): n is a, c, g, or t
atggaactcgaaaagctgataatcccacggttcttaaattacgtccgttacgataccgaaagcgaccgccatatagaaaaaaccccttcaacagagggacagtgggagttagcgaaaatcctgcgcgacgagcttttggctcttggacttaaagatgtaaaaattacagatcactgttatgtaatagcccgcctgccgacaaacaccgaaaaagaaaatgtgccttgtatcgggtttctttctcatcttgatacggcgagcgatgtttcgggcaagaacgttaagccccaatttgtgcagaattatgacggcggaaaaattgagcttgcagacggtctttgccttgatcccgaaaaagagccggggcttgcagagcaaaaaggtaagcctattattcacagcgacgggactaccctattgggagcggatgacaaagcggggatagcggaaattatggccgcggtggagtaccttgtttccaatccgcagatagagcatgggcaggtcgagattatttttactcccgatgaagaaacgcggcaagggactgcctga

SEQ ID NO: 33600 - protein, 184 aa, Unknown
  Obtained from environmental sample
  misc_feature (1)..(184): Xaa is any amino acid
MELEKLIIPRFLNYVRYDTESDRHIEKTPSTEGQWELAKILRDELLALGLKDVKITDHCYVIARLPTNTEKENVPCIGFLSHLDTASDVSGKNVKPQFVQNYDGGKIELADGLCLDPEKEPGLAEQKGKPIIHSDGTTLLGADDKAGIAEIMAAVEYLVSNPQIEHGQVEIIFTPDEETRQGTA

SEQ ID NO: 33601 - DNA, 966 bp, Unknown
  Obtained from environmental sample
  misc_feature (1)..(966): n is a, c, g, or t
gtgctagtagtacatcttgtaatttttattagtgatttttatactattcctatgggtcaataccagccgcaaatccaatgggaactcacccgcgccgcggtgagcattgccgcatggtgggtgttgttttaccgtctccacaggccggaagcgcgatggcggcggattacccttttaattgccatgccggcagcttatgctttttggatactcgtgccgatgagcattgtcgtaaacgccgtttcatgggcggccattaccatagtccttgccttcatatgcggggattngcgccgttccctttttaccgcctttttctacatcggcatggaggcatccatcgacaatacccgctccgccatgattgccctgttttttaacgggttctttccttctcattcgccaagccagtatttacagtacaacctgcaatatcttgtcgtatttgccttgtgctgctgttattattttattataagacggtattccggcaagttgccgttttcaagttggatactaattattatcccgcctatgattctgtgtgcgattctgacttatttcacttatgtcgcggatccgcttttgattgatcggggcattaacatctatggcccctgcttctgcttcgggctgttctgtatattattaaatatcgggatactctatctctatatacgccaactggttattaccgacgccaggaacctggcaattgcggtttccgacatagaaccggtatggactcaggagaacggcctgtccgaaaatttctgcaaacactaccagctgacagacagagaaaaagacattgtagaagttatgatgcgcggaaagagcaacaaggaaatcgccgatactctgttaatttcgctaaggacggttggggtctaccttcaaaatgtctacaagaaaaccggcacatcgagccgttttgctctttactcgctgataaagggaaattag

SEQ ID NO: 33602 - protein, 321 aa, Unknown
  Obtained from environmental sample
  DOMAIN (261)...(318): Bacterial regulatory proteins, luxR family
  misc_feature (1)..(321): Xaa is any amino acid
MLVVHLVIFISDFYTIPMGQYQPQIQWELTRAAVSIAAWWVLFYRLHRPEARWRRITLLIAMPAAYAFWILVPMSIVVNAVSWAAITIVLAFICGDXRRSLFTAFFYIGMEASIDNTRSAMIALFFNGFFPSHSPSQYLQYNLQYLVVFALCCCYYFIIRRYSGKLPFSSWILIIIPPMILCAILTYFTYVADPLLIDRGINIYGPCFCFGLFCILLNIGILYLYIRQLVITDARNLAIAVSDIEPVWTQENGLSENFCKHYQLTDREKDIVEVMMRGKSNKEIADTLLISLRTVGVYLQNVYKKTGTSSRFALYSLIKGN

SEQ ID NO: 33603 - DNA, 510 bp, Unknown
  Obtained from environmental sample
  misc_feature (1)..(510): n is a, c, g, or t
ttgttcacgctacagtattataaagggacaggtaattttaatgaggaattggctgaatttatcggcagcgaaggggcaaggcttttcatagtaaagcggtacggggaagattcggacgaataccggcaaatattttcatccgacaaagacagccaaaattatgtcgcgtttcttcaggaattgatcgcggaacttgatgttctttataaaagcgaagttggcagggaagaaaaactagcggaaaaagagcggataattaacgccgcgaaagagcggttcaacgccgaatacgacaaacgtttttccaacgataaatacagaggttttgcggaattacccgttaacaacgcgtatctggaactttttaggctataccacacagaagataatttttacgcggaactttacgaacgttcggggaagaaccttcccgcttttatcagcgccgccaaaaagatcacaaaaaaaggcaatccccgcattcaacttgaaaacgctctttttcagtga

SEQ ID NO: 33604 - protein, 169 aa, Unknown
  Obtained from environmental sample
  misc_feature (1)..(169): Xaa is any amino acid
MFTLQYYKGTGNFNEELAEFIGSEGARLFIVKRYGEDSDEYRQIFSSDKDSQNYVAFLQELIAELDVLYKSEVGREEKLAEKERIINAAKERFNAEYDKRFSNDKYRGFAELPVNNAYLELFRLYHTEDNFYAELYERSGKNLPAFISAAKKITKKGNPRIQLENALFQ

SEQ ID NO: 33605 - DNA, 657 bp, Unknown
  Obtained from environmental sample
  misc_feature (1)..(657): n is a, c, g, or t
gtgcttccgcgtattaaagaactggaacataaacttactgtcgatgaattgcgtattgtagcgaaggctcttcatgacgagggttattattccagatgtatggaagttgtcaatatgtatattttcagagtcggttacagcaagaacaagtacgattgggaattattgtttccgcgtccgtatcttgaattggtagaaaagtacgcaaaagaattctatattgagccttcgctgctttacgggcttattcgctcggaaagcgcgtttagagccgcggtagtttcgcgcgcgggagcggttggattaatgcagttgatgccgtttacagcgaaggatatggctgagcgtataaagcgcgaaggcggacctgatttttttggagaaaataacgttgttgactctacaaaccctttgcataatgttcatataggcacttattactttaaatatttaaaggactattttgacgacccaattctggcgttgatggcttacaacggcggacaaaataggatacgcagattgcgcaccgccaacagcaaactgcccattgatttatttgtggaaactgtcccaattaacgaaactagggattacggcaagagggttccggctgttgcgaagatttatcatgagttgtattacaaggaacagtag

SEQ ID NO: 33606 - protein, 218 aa, Unknown
  Obtained from environmental sample
  DOMAIN (63)...(188): Transglycosylase SLT domain
  misc_feature (1)..(218): Xaa is any amino acid
MLPRIKELEHKLTVDELRIVAKALHDEGYYSRCMEVVNMYIFRVGYSKNKYDWELLFPRPYLELVEKYAKEFYIEPSLLYGLIRSESAFRAAVVSRAGAVGLMQLMPFTAKDMAERIKREGGPDFFGENNVVDSTNPLHNVHIGTYYFKYLKDYFDDPILALMAYNGGQNRIRRLRTANSKLPIDLFVETVPINETRDYGKRVPAVAKIYHELYYKEQ

SEQ ID NO: 33607 - DNA, 906 bp, Unknown
  Obtained from environmental sample
  misc_feature (1)..(906): n is a, c, g, or t
ttgtcgtatgcaaacacgcatagaagcgctgatttgtttaaggcggtatttgtaagcctgttaacccaggcgcaagcgcaaatgggaagccacgggtttaggtttaagaacccgctgtacagcatcgattcgacaacgatagacctgtgcttaaaactatttccatgggctgatttccggaaaggcaaagccgggataaagctgaccgtcaagctggaccaccaggggaagataccctgctttgtagttgagtcaaacgccagggagcatgatacaaagaaagtacgggaagtgccgtatgaagcgggagacgtgctggtatttgaccggggatataccgattacgcctattttgcgtcaatttgcgggaaaaaagcctgttttgtgacccggttaaagaaaaacgcggtatataagcttgtcaaaaagaatccggtaaaggaaggcgggaatatcatatctgattatgaaataataattccgtcattgtcgaaggaaataaggctgcgtaaaataacagcccgtgaccctgaaacaaagaagcgggttgtgcttttaacgaataacctgaattggtctgccgcgacagtagccttagtatataaggaacggtggcagatagaattgtttttcaaagcgataaaacaaaacctgaagataaagcggttttatggcaactcaaagaacgcggtaatgacacaggtatggatagcgttaatagcatatcttttattttatctgttgaaagtaaagtcaaagatttttgggatgtcctttaccaattttatttcagttataaagacaatgctgtttcagcgggtttccctttttgattttttatgtggtacaagcccgccgccaaaaattaataagttacttgaatgtcagccggagttcgtatggtag

SEQ ID NO: 33608 - protein, 301 aa, Unknown
  Obtained from environmental sample
  DOMAIN (39)...(244): Transposase DDE domain
  misc_feature (1)..(301): Xaa is any amino acid
MSYANTHRSADLFKAVFVSLLTQAQAQMGSHGFRFKNPLYSIDSTTIDLCLKLFPWADFRKGKAGIKLTVKLDHQGKIPCFVVESNAREHDTKKVREVPYEAGDVLVFDRGYTDYAYFASICGKKACFVTRLKKNAVYKLVKKNPVKEGGNIISDYEIIIPSLSKEIRLRKITARDPETKKRVVLLTNNLNWSAATVALVYKERWQIELFFKAIKQNLKIKRFYGNSKNAVMTQVWIALIAYLLFYLLKVKSKIFGMSFTNFISVIKTMLFQRVSLFDFLCGTSPPPKINKLLECQPEFVW

SEQ ID NO: 33609 - DNA, 768 bp, Unknown
  Obtained from environmental sample
  misc_feature (1)..(768): n is a, c, g, or t
gtgcccggctcgtatccactgcgcgataagctgaccggagccgaggctgccgccaataccatcaccgccatcgaacaagaggtgggcaaagaaaacctggcttgcgtagtgatcgaaccgatcctgggcgaaggtggatttgtggctcccgcgccagggtatttgggtgcgattgccaagtggtgtcgggataacgatgtggtcttcgtctctgacgaaatccaagccgggatgtgccgcaccggcgactggttcgcggtagatcatgaaggcgtagtgcccgatttgatcaccgtggctaagggcatggccggcggcatgccgctctccggagtcattggccgcgccgagatcatggatgcccctggccctggcggtttgggtggcacttacggcggtaacccagtggcttgcgctgcggccctcgcctccatctcccaaatggagtcacttaacctgaatgctcgcgctcgcgaaatcgaggccatcatccgcgaggttttggaacccttggttgccaccggacgcatcgctgaggtgcgtggccgcggtggcatgatcgccatcgaaatgattactcctgatgggaagcccgatgccgctttgaccagcgcagttgtggctgcttgtaaagctgctggggtgctgatcctatcgtgtgggttagacggtaacgtggtgcggttgctgccatcgttggttattactgaagacctactccgcgaaggtctcggcattctagccgacgccatcaaagccaatatctaa

SEQ ID NO: 33610 - protein, 255 aa, Unknown
  Obtained from environmental sample
  DOMAIN (1)...(193): Aminotransferase class-III
  misc_feature (1)..(255): Xaa is any amino acid
MPGSYPLRDKLTGAEAAANTITAIEQEVGKENLACVVIEPILGEGGFVAPAPGYLGAIAKWCRDNDVVFVSDEIQAGMCRTGDWFAVDHEGVVPDLITVAKGMAGGMPLSGVIGRAEIMDAPGPGGLGGTYGGNPVACAAALASISQMESLNLNARAREIEAIIREVLEPLVATGRIAEVRGRGGMIAIEMITPDGKPDAALTSAVVAACKAAGVLILSCGLDGNVVRLLPSLVITEDLLREGLGILADAIKANI

SEQ ID NO: 33611 - DNA, 693 bp, Unknown
  Obtained from environmental sample
  misc_feature (1)..(693): n is a, c, g, or t
gtgcatgctgcgcaggctgtgctggcaaccaacgcgttcccgtccctgctgcggcgtaaccagctcaagactgttccggtttatgactatgcgctgatgactgagccactgaccgaccagcagatggaagcgattggttggcacaaccgccaaggtttgactgatgagtcgaatcagttccactattaccgactcactaaagataaccggattctgttcggtgggtacgatgtgctgtattacaccggcggtaaggtgcggaccgaataccatcatcgtccggaaacttgggaaaagctggctagccacttcttcactactttcccgcaactgcgtgaggtgaagttctcgaacaaatggggcggcgtcattgactccagcacccagttcgctcccttctacgggctggcccgcgggggtaaagttgcctacactgctgggttcaccggcttgggcgtgggggcgactgcctttgcggccgaggtaatgcttgacctattggaaggcttagataccgaacggactcggttaacggtagtgcggaagcaaccgctaccgttccccccagaaccggtggccagcttgggtattaacttctcgcgttatgcaatggactggcaggatcaccgtcaaggccaacgccatcccctgcaaaaagtcctagacgccgtcggtttcggcttcgactcctaa

SEQ ID NO: 33612 - protein, 230 aa, Unknown
  Obtained from environmental sample
  misc_feature (1)..(230): Xaa is any amino acid
MHAAQAVLATNAFPSLLRRNQLKTVPVYDYALMTEPLTDQQMEAIGWHNRQGLTDESNQFHYYRLTKDNRILFGGYDVLYYTGGKVRTEYHHRPETWEKLASHFFTTFPQLREVKFSNKWGGVIDSSTQFAPFYGLARGGKVAYTAGFTGLGVGATAFAAEVMLDLLEGLDTERTRLTVVRKQPLPFPPEPVASLGINFSRYAMDWQDHRQGQRHPLQKVLDAVGFGFDS

SEQ ID NO: 33613 - DNA, 690 bp, Unknown
  Obtained from environmental sample
  misc_feature (1)..(690): n is a, c, g, or t
ttggagggacgttatagaggcgacgggccagccgcacctgatgataaacaggtagccgacacaatgcgcccggcaccgctatacgtgtacgcgttacctctgttatgcgtatttgccgtgtccgcgtttgcccaaaacaaagacggcgccgtaaccgcggcgccgcaaccggattctatagcctacaaaaacaactatatagccgtggaacagataaacggttatataagcgacagcgtcgccgcctcaatccgtgagactctgatatcctcgcaaatcgccttgagcgacaccgtttccaacaaacccctcaaggcgcagctctcaaaactgcgtaccgccgactccgtgaagctggcgctgcgcaagcgaacgatagactccgtgaaacaacgcgccgtgccgacctacgccgtgctcgggagcgatacgattatgaccatatacgcccccacgcccaccctatccccgcatgagcgcgccgatatctactgtaaccgcgtacagcgggcggctaaggttttctcgcccaagttcgacaccctgagtattatcgacaacggtctgagcatggatatagcgttcggagagacgccgctcctaaacatcaccgccttagacgcctattgggcgggcgttgatcgcggcgtcctggcaaacgccgaaaggagagagtgctcgccgcgataa

SEQ ID NO: 33614 - protein, 229 aa, Unknown
  Obtained from environmental sample
  misc_feature (1)..(229): Xaa is any amino acid
MEGRYRGDGPAAPDDKQVADTMRPAPLYVYALPLLCVFAVSAFAQNKDGAVTAAPQPDSIAYKNNYIAVEQINGYISDSVAASIRETLISSQIALSDTVSNKPLKAQLSKLRTADSVKLALRKRTIDSVKQRAVPTYAVLGSDTIMTIYAPTPTLSPHERADIYCNRVQRAAKVFSPKFDTLSIIDNGLSMDIAFGETPLLNITALDAYWAGVDRGVLANAERRECSPR

SEQ ID NO: 33615 - DNA, 825 bp, Unknown
  Obtained from environmental sample
  misc_feature (1)..(825): n is a, c, g, or t
atgaggggcataaaccagctctacactataggcggcgacgggacgcagcgcggcacgctgagtatcgccaaggaggtcgagcgccgcggactcagcgtggcggtcgtgggcgttcccaagacgattgacaacgacctgagcttcatagagaagtccttcggcttcgagaccgccgtttcggaggcggttcaggcggtcgccgacgcccacattgaggcggagaacgccgtgaacggcataggcatggtcaagttaatgggcagagaggcgggtttcatcgccgcgtccacggcgataagctcgcgagacgccaacttcgtcctagtccccgaactgcaattcgatttggagggtgaaaacggctttctggcgcaccttgaaaagcggttggccaagcgcggccacgcgctcatcatcgtggctgaaggcgccggacaggagcacctttcgtccacaagggagtccgacgcctccggcaacaagaggttcggcgacataggtctcttcctcaaggacagtatcacgaattacttcaaggaaaagaagattgagatcaatttgaagtacatagaccccagctacatgatccgcgcccgggtatccaacccgatagactccatctactgcgcccgcttgggcacaaacgccgtccacgcggcgatgtcgggaaggacgaagatgctggtgagcaacgtcaacgacacattcgtgcacatcccgacggaaatcgcggtggcaaagcgcaactgcatagacccggagagcgatctttggagggacgttatagaggcgacgggccagccgcacctgatgataaacaggtag

SEQ ID NO: 33616 - protein, 274 aa, Unknown
  Obtained from environmental sample
  DOMAIN (1)...(222): Phosphofructokinase
  misc_feature (1)..(274): Xaa is any amino acid
MRGINQLYTIGGDGTQRGTLSIAKEVERRGLSVAVVGVPKTIDNDLSFIEKSFGFETAVSEAVQAVADAHIEAENAVNGIGMVKLMGREAGFIAASTAISSRDANFVLVPELQFDLEGENGFLAHLEKRLAKRGHALIIVAEGAGQEHLSSTRESDASGNKRFGDIGLFLKDSITNYFKEKKIEINLKYIDPSYMIRARVSNPIDSIYCARLGTNAVHAAMSGRTKMLVSNVNDTFVHIPTEIAVAKRNCIDPESDLWRDVIEATGQPHLMINR

SEQ ID NO: 33617 - DNA, 1191 bp, Unknown
  Obtained from environmental sample
  misc_feature (1)..(1191): n is a, c, g, or t
atggcgctcacattaaccacccattacacggtgacatataccaataacctcaacgtgggaaccgccactgtaactatcagcggagtaggtaactatgcgggcagttccggcagcgggactttcaccattaacaaagccgccggagcgattgtcagctctccatcaggcacatcatttgtaaacggtaccagcattacgatcaacgccgtttcagtgcccagcaatggacaaacagtcgaatacgccataaatacaattaataccgctccatcaacaggctggcagaatagcacaatattcagtgggttgaatgtaaataccacctactacatatttgcccgatcaaaagaaaatactaattacaatgcaggtatgcatagtactagcctgcaagttattacgtcattagttgaaatgatctatgtgcccggcggcagtttccagatggggaaagaactgggaaccttcattgaaggcgatcaaactccagtacatctggtaacgttgaccggcttttacatgggcaagtatgaggtaacgcaggtgcagtaccagacggtaatggggaacaatccaagtacttttagttcaaaccccgcaagtggggaagtgcagggaaatcgtccggtggattatgtcacttggtatgaagctattgagttttgcaatgctttaagcttaaaagaagggttgagttcctactacacaatagacaaagtaaacaaagaccctaataacactaacagttctgacacgatgaaatggactgtaacgcgcaatagcgcggcgaacggctaccggctgccgacgagggcgcagtgggagtacgcggcaaaggtgggcaacgggtctccggggaattacacgtattcggggagcaatacggcaggggatgtggcatggtatggcggcaaaagcggaagtatgactcatgaagtggggaagaaggctcccaacgggttgggcttgtacgacatgagcgggaacgtgtgggaatggtgctgggactggtacggggactactccagcagtgcgcagaccaatcctaccggggcggctactggcacgtaccgggtggcacgcggcgggggttggtactccgatgcgtctatcacgcgttcggtgcttcgggactacggcaacccgcacatcagggtcagccacgtcggattccggctgtcccgcccctga

SEQ ID NO: 33618 - protein, 396 aa, Unknown
  Obtained from environmental sample
  DOMAIN (135)...(395): Domain of unknown function (DUF323)
  misc_feature (1)..(396): Xaa is any amino acid
MALTLTTHYTVTYTNNLNVGTATVTISGVGNYAGSSGSGTFTINKAAGAIVSSPSGTSFVNGTSITINAVSVPSNGQTVEYAINTINTAPSTGWQNSTIFSGLNVNTTYYIFARSKENTNYNAGMHSTSLQVITSLVEMIYVPGGSFQMGKELGTFIEGDQTPVHLVTLTGFYMGKYEVTQVQYQTVMGNNPSTFSSNPASGEVQGNRPVDYVTWYEAIEFCNALSLKEGLSSYYTIDKVNKDPNNTNSSDTMKWTVTRNSAANGYRLPTRAQWEYAAKVGNGSPGNYTYSGSNTAGDVAWYGGKSGSMTHEVGKKAPNGLGLYDMSGNVWEWCWDWYGDYSSSAQTNPTGAATGTYRVARGGGWYSDASITRSVLRDYGNPHIRVSHVGFRLSRP

SEQ ID NO: 33619 - DNA, 645 bp, Unknown
  Obtained from environmental sample
  misc_feature (1)..(645): n is a, c, g, or t
ttggccgagaatacgtgcgggaatattaaaaatggcataatttacaggggcagctatcctatttttaaaatagatgaagaaagggataaaatgtataccgaacttgttattgatgccgggataaattgcatcataaacctggccggtaacttacaggatttggaaaccatcgcaaatttagttccatggtataacacgttacttgaaaataataacgcaatagggcttgatattcaatttgattttgatttttcagatcaatttggatatgaagtatttaattacaggttaagacaaggatttaaatttttaatttcacgcgatggaccttaccttatccattgcaatgccggtgttgacaggaccgggtttgtcgcggcgattatagaattattatttggagcaaatattgacgatgttatttatgattatcttctttcatacgggaaggaatttgcgaatgccaaagataatgaattaaattttattaccggaagaaatatttatggtcaaataaacgcgatagtaaacggaaaaataaatgacatgaataatttacaagcgaatatagaaaaatattttttggaaaaaataggtttaacaataaacgaacttgaaatgttaaaagaaaaattaacaaaataa

SEQ ID NO: 33620 - protein, 214 aa, Unknown
  Obtained from environmental sample
  misc_feature (1)..(214): Xaa is any amino acid
MAENTCGNIKNGIIYRGSYPIFKIDEERDKMYTELVIDAGINCIINLAGNLQDLETIANLVPWYNTLLENNNAIGLDIQFDFDFSDQFGYEVFNYRLRQGFKFLISRDGPYLIHCNAGVDRTGFVAAIIELLFGANIDDVIYDYLLSYGKEFANAKDNELNFITGRNIYGQINAIVNGKINDMNNLQANIEKYFLEKIGLTINELEMLKEKLTK

SEQ ID NO: 33621 - DNA, 780 bp, Unknown
  Obtained from environmental sample
  misc_feature (1)..(780): n is a, c, g, or t
atgtacattggcaaattggggacgggcaaagcccccgatgatggcatttacgttctggtcaaggaaataatagacaactctatagatgaatttatcatgggggcaggcaaaaaaattgaggttgagattaaagaccactccgcacgggtacgagactatggacgcggcattccgctggggaaggttattgaatgtgtatctaaaataaataccggcggcaaatacgatagcgaagcgttccagaaatccgtgggcttgaacggcgttggaacaaaagccgtgaacgcactttcctcttatttctgcgtggtttcgcacagagacggcaaatgcaaaaaagccgaatttaaatctggcaagctcataaaagaatatccagaaaaatctagcaacgaaaaaaatggaaccgaggtttattttgagccggataaggatatttttaagaacttccgttttttgccgctctatatggaagagaggatttggaactacgcctatctaaacacagggctttcgctgaatttaaacgaaaaaaattatgaaagcaaaaatggacttcttgatttgctccaaaaccaagtaaaagattccgcacgttatcccataattcactgcaaagggaaagacattgaaatagctttgactcacagcgaattttatggcgagcattatttcagctttgtgaacgggcagcacaccacgcagggcgggacacatcaagctgcattcagggaaggcgttgtaaaaggcgtcagggattttttcaaaagaggattttga

SEQ ID NO: 33622 - protein, 259 aa, Unknown
  Obtained from environmental sample
  DOMAIN (11)...(145): Histidine kinase-, DNA gyrase B-, and HSP90-like ATPase
  misc_feature (1)..(259): Xaa is any amino acid
MYIGKLGTGKAPDDGIYVLVKEIIDNSIDEFIMGAGKKIEVEIKDHSARVRDYGRGIPLGKVIECVSKINTGGKYDSEAFQKSVGLNGVGTKAVNALSSYFCVVSHRDGKCKKAEFKSGKLIKEYPEKSSNEKNGTEVYFEPDKDIFKNFRFLPLYMEERIWNYAYLNTGLSLNLNEKNYESKNGLLDLLQNQVKDSARYPIIHCKGKDIEIALTHSEFYGEHYFSFVNGQHTTQGGTHQAAFREGVVKGVRDFFKRGF

SEQ ID NO: 33623 - DNA, 471 bp, Unknown
  Obtained from environmental sample
  misc_feature (1)..(471): n is a, c, g, or t
atgtctgattttcgtagatgtcttttgaaaataagcggtgaagcattagctggagatgccggacacggcatagacaacttagtgataaaccaagtggctaaggaaattgtaggctccgttaaaaagggtgcccaaattgcccttgtgattggcggtgggaactttgcaagaggggtctctgcaagtactaatggcatgaaccgcgcggctgccgattcaataggaatgcttgcaacggttatgaatgccatagcaatgcatgatgcgcttgaaaaacatgacctcggtgctgagattatgagcgcaataggcatggaaccgctttgccaaatttttttaccgccgaaaagctatgcagattttggaaaatggcaaagttgttatttttgctgctggcactggcaatccctttttcaccacatataccgccgcggttttgagagctatataaagcgggtgcaatgttattga

SEQ ID NO: 33624 - protein, 156 aa, Unknown
  Obtained from environmental sample
  misc_feature (1)..(156): Xaa is any amino acid
MSDFRRCLLKISGEALAGDAGHGIDNLVINQVAKEIVGSVKKGAQIALVIGGGNFARGVSASTNGMNRAAADSIGMLATVMNAIAMHDALEKHDLGAEIMSAIGMEPLCQIFLPPKSYADFGKWQSCYFCCWHWQSLFHHIYRRGFESYIKRVQCY

SEQ ID NO: 33625 - DNA, 948 bp, Unknown
  Obtained from environmental sample
  misc_feature (1)..(948): n is a, c, g, or t
atgggtgatccgatcattactgtgcagaatctgaccaagcgttataaaggcgcgcagaaacctgccgttgacgacataagtttttcagtcggaaaaggcgagttcttcgcttttctgggcgcgaacggcgcggggaagacgacaaccatttctattctgacaacaacgctttccaaaacatcggggcagataaaaatcgcggggttcgatgttgaaaaagaggcgcgaaaggtgcgcgaaaagatagggattatttttcaacagccaagccttgatccgcaattgacggctgagcaaaatatccgcttccacgcatgcctgtacggaatgtgcggataccgcccctcttttcgtctgatgccctcagcataccgcaaacgggtaatggagcttgctgaaattgtcggaatacaggacgtgctttttaaacccatcaaaaaactttcgggcggcatgcagaggaaactggaaattatccgcagtcttattcatacgcctgacgtactttttcttgatgagccgactcaagggttggacgcggtaagcagacgcggactgtggaattacattaatgaaacgcgagaacgttacggaacgacgatattcctcactacccattacattgatgaagccgagaacgtggataccgtatgccttatcaataacggaaaaatcgcttcttgctgtccgcctgaaaaattgaaacaaagtttattgagacatgaacttattttggacgctgatgacaggatggcgttgacaaatgagttatccgcgcttggacttcagttttcgttgaacggacgtgtcgttgttccttacaaagattccgcgcaggaaattatttcgcggataaaaacaaaattgaccgtattgaaaatacacgaaccttcacttgaagacgcgtatattgaatttttaaccaaacaaaaggggaatctagtatga

SEQ ID NO: 33626 - protein, 315 aa, Unknown
  Obtained from environmental sample
  DOMAIN (33)...(223): ABC transporter
  misc_feature (1)..(315): Xaa is any amino acid
MGDPIITVQNLTKRYKGAQKPAVDDISFSVGKGEFFAFLGANGAGKTTTISILTTTLSKTSGQIKIAGFDVEKEARKVREKIGIIFQQPSLDPQLTAEQNIRFHACLYGMCGYRPSFRLMPSAYRKRVMELAEIVGIQDVLFKPIKKLSGGMQRKLEIIRSLIHTPDVLFLDEPTQGLDAVSRRGLWNYINETRERYGTTIFLTTHYIDEAENVDTVCLINNGKIASCCPPEKLKQSLLRHELILDADDRMALTNELSALGLQFSLNGRVVVPYKDSAQEIISRIKTKLTVLKIHEPSLEDAYIEFLTKQKGNLV

SEQ ID NO: 33627 - DNA, 369 bp, Unknown
  Obtained from environmental sample
  misc_feature (1)..(369): n is a, c, g, or t
atgaaagaaacaataaaatccagatttcccggcattcttatcatgctggctgccgccgcagtattcggcgcggctgtaatgctgctgtggaacgctcttttgccgcaaattttcgctcttccgcaaattaattacccgcaggcagtaggtctgcttgttttgacacgtttgttattcggcggcataggcggctgggggcatggcggacgcagagcgcatctgtttaatcacgggaacaaacttcgcgagaaatggatgaacatgagcgaggaagagcgcaaagaatttatcgaaaaggaaaaagactttttcaaaaatcgcgcttctcattttcaggtttttttcggcggcaaggaaaagccggaatag

SEQ ID NO: 33628 - protein, 122 aa, Unknown
  Obtained from environmental sample
  SIGNAL (1)...(23)
  misc_feature (1)..(122): Xaa is any amino acid
MKETIKSRFPGILIMLAAAAVFGAAVMLLWNALLPQIFALPQINYPQAVGLLVLTRLLFGGIGGWGHGGRRAHLFNHGNKLREKWMNMSEEERKEFIEKEKDFFKNRASHFQVFFGGKEKPE

SEQ ID NO: 33629 - DNA, 447 bp, Unknown
  Obtained from environmental sample
  misc_feature (1)..(447): n is a, c, g, or t
atgattctcaaacttgaacaaaacgcggcgcaaaatgacattgagatagtaatcacataccctgtaaagaataaaatccttgaacgtattgtctcatttattaaatcggttgacgcgaaaatagagtgttattcggatgacattgtaaagctggtaaatgtttccgatatttattacattgaaagcgttgacggaaaaaccattgtctgctgtgaaaaagaaaattatcttgttaaaagccgtttgtatcagatatatgaaaaattaagggacagcggttttatccaaatcagcaaatactgcgttttaaatattaacaagctggacaaattcaggccgttggacaataatcgtctggaagcggtattatccaacggggtttacctgtgtattaccagaaaatatatttccggtataaaacagatattacgggagatgaataaatga

SEQ ID NO: 33630 - protein, 148 aa, Unknown
  Obtained from environmental sample
  DOMAIN (47)...(144): LytTr DNA-binding domain
  misc_feature (1)..(148): Xaa is any amino acid
MILKLEQNAAQNDIEIVITYPVKNKILERIVSFIKSVDAKIECYSDDIVKLVNVSDIYYIESVDGKTIVCCEKENYLVKSRLYQIYEKLRDSGFIQISKYCVLNINKLDKFRPLDNNRLEAVLSNGVYLCITRKYISGIKQILREMNK

SEQ ID NO: 33631 - DNA, 345 bp, Unknown
  Obtained from environmental sample
  misc_feature (1)..(345): n is a, c, g, or t
atgagcgactgtattttttgcaggatcataaagggggaaatcctcagtaagaagatctatgaagacgatgaaatgcttgccttccatgacatcacgccgatggcccccgtgcattttctgcttatccccaaaaagcacattaagagcctcctgcatctgaagcgggaagacattgcccttgtcggacggcttctgggcaaagcccgggacctggcgaaagagcagggatgcggggagaacggcgcgcgctttgtgatcaacgcggggcgcgacggcggtcagacagtggatcatctccatatccacatcctcggcggacgcgccctcggatggcctccggggtaa

SEQ ID NO: 33632 - protein, 114 aa, Unknown
  Obtained from environmental sample
  DOMAIN (4)...(109): HIT domain
  misc_feature (1)..(114): Xaa is any amino acid
MSDCIFCRIIKGEILSKKIYEDDEMLAFHDITPMAPVHFLLIPKKHIKSLLHLKREDIALVGRLLGKARDLAKEQGCGENGARFVINAGRDGGQTVDHLHIHILGGRALGWPPG

SEQ ID NO: 33633 - DNA, 327 bp, Unknown
  Obtained from environmental sample
  misc_feature (1)..(327): n is a, c, g, or t
atgaaatacttaatttttccggcgcttgccgcggccttcattttagcctgcgccggccttaaaaccagaaatgtggatttttatgaaggcgccgcaatgggataccgggggatgatccatgtgcgggtgggaatggaaaacggggctattacggagattaccgtaattgaatccagtgaggatccggctgtaggcggggcggctatcgaggaattgacagaccttgcgctgatgtacaacaccacggaaatcgacgcggtttccggggcgactgaaacaagcaggggcttccttgaggcggtcgaaaatgctatatttagcccatga

SEQ ID NO: 33634 - protein, 108 aa, Unknown
  Obtained from environmental sample
  SIGNAL (1)...(18)
  DOMAIN (34)...(108): FMN-binding domain
  misc_feature (1)..(108): Xaa is any amino acid
MKYLIFPALAAAFILACAGLKTRNVDFYEGAAMGYRGMIHVRVGMENGAITEITVIESSEDPAVGGAAIEELTDLALMYNTTEIDAVSGATETSRGFLEAVENAIFSP

SEQ ID NO: 33635 - DNA, 1545 bp, Unknown
  Obtained from environmental sample
  misc_feature (1)..(1545): n is a, c, g, or t
gtgatggatttctgtatcggcaccccgacctactggttgatcgggtttgggatcatgttcggaaccggtaaatttatcggcggtatcgactttatggtcaggggggattacagcagtacctttccaacgcctgccttgctgatctttcagacggtgttctgcgcgacagcggcgacaatcgtctccggagcgatggcggagagaacaaaattttcggcttactgtctttacagcttcctgatcagcgccgtgatttatccgatttccggtcactggatatggggcgagggctggcttgcggatctcggttttcatgactttgccggctcaaccgccgtacacatggtcggcggcatagcgtcattggtcggcgcggcaattgtaggcccccgtatcggcaagtatgccgtaacaaaagacggcaaaaaaggcgaatcgagggcgattcccggacacagcctgacgctcggcgcgctcggcgttttcattctctggttctgttggttcggctttaacggcggttctactgtttccatgacaggcgaaaacatcgtgtctgctgccagtatttttgttactacaaaccttgcggctgcaaccgcagcggtcttcaccatgttcattacatggatccgctacaaaaagcctgatgtgtccatgacgcttaacggcgcccttgccggtcttgtagcgatcaccgcaggatgcgatgctgtatcgcccttcggcgcgttctgcataggcattgtggcggcgtttgtaatcgtattcggcattgaattcgttgacaaagtattaaaggttgacgatcccgtcggcgcgattggcgtacatggccttgccggagcagctgggacaattcttaccggtatattcgctcttgacggcggcttggcttacggcggcggctggggtatggtcggagttcaggctctcggcgttgttgcggtagcggcttgggtagcggtaacaatgggcattgtctttacagttattaaattcacaatgggtctgcgcgtttcacacgccgaagaagtcgccggtttggatattaccgaacacaacattgaaagcagctatgccgactttatgatttcacccgccggagcggactttaagcgttccgacaaagaagaaacagttcccgctaatgtatcgatccctgttgttaacaactcgaaaccgggcgcgaagatgaccaaaattacaatcatcaccaatcagaataaacttacggctcttcacaccgcgcttgataagatcggtattacagggttaacggttaccaatgtacttggtcatggaatgcagaaaggacataccgagtattaccgcggcgctcctgtaacaatcaaactgcttcccaaggttcaggttgatataatcgtaagtaaagtaccgacacaaaccgtaatagacaccgtaaagaaagtgttgtacacgggcagagtaggcgacggcaagatatttgtttatgatgttgaaaacgtggttaaagtccgcacaggcgaacaaggctacgacgcgctgcaagataacgaataa

SEQ ID NO: 33636 - protein, 514 aa, Unknown
  Obtained from environmental sample
  DOMAIN (402)...(503): Nitrogen regulatory protein P-II
  misc_feature (1)..(514): Xaa is any amino acid
MMDFCIGTPTYWLIGFGIMFGTGKFIGGIDFMVRGDYSSTFPTPALLIFQTVFCATAATIVSGAMAERTKFSAYCLYSFLISAVIYPISGHWIWGEGWLADLGFHDFAGSTAVHMVGGIASLVGAAIVGPRIGKYAVTKDGKKGESRAIPGHSLTLGALGVFILWFCWFGFNGGSTVSMTGENIVSAASIFVTTNLAAATAAVFTMFITWIRYKKPDVSMTLNGALAGLVAITAGCDAVSPFGAFCIGIVAAFVIVFGIEFVDKVLKVDDPVGAIGVHGLAGAAGTILTGIFALDGGLAYGGGWGMVGVQALGVVAVAAWVAVTMGIVFTVIKFTMGLRVSHAEEVAGLDITEHNIESSYADFMISPAGADFKRSDKEETVPANVSIPVVNNSKPGAKMTKITIITNQNKLTALHTALDKIGITGLTVTNVLGHGMQKGHTEYYRGAPVTIKLLPKVQVDIIVSKVPTQTVIDTVKKVLYTGRVGDGKIFVYDVENVVKVRTGEQGYDALQDNE

SEQ ID NO: 33637 - DNA, 714 bp, Unknown
  Obtained from environmental sample
  misc_feature (1)..(714): n is a, c, g, or t
gtgaaacttattttaactgaacaaagcgttttatttgatgacataataaaaaatatggaaagcaataaggaactctttgacttactgcacgacataataatttctggacaaaaatttttgtacaatcatttcaatcctgcaattcgtattggggtgatgtttggaatacttgctgaaagcaacaggggtttgattgtacacaatgagattttcgaaacttttatttgcgaatatttcatatcactgaatgacacagctagaaaaatgacaggcagtgtttttgaagttgttgaaaaaggcaaatttaatatggaactctgcattaaaaaatttatgcagcattactatgaaatttaccataaaaaagactcaaattttttggaacgtgagtgcaggctattgtttttgacatttttgcgacccctgataaacggtgctggtttttatcatattgaaagcgaaacccgaaacggcaatagaacggatttgatagttgatttcaacgacgagcagtttatcattgagttgaaaatctggaaaggcgaacagaagcacgaaaaggcttatgggcagcttatagaatacctaaattccaaaaacaaaagtgttggctatcttctaacctttgatttccgtaaacgcagagcaacaaaacccagcgcaaaatgggtgagaaaaagcaaaaagaaatttttggattgtttatgtgtgtaa

SEQ ID NO: 33638 - protein, 237 aa, Unknown
  Obtained from environmental sample
  misc_feature (1)..(237): Xaa is any amino acid
MKLILTEQSVLFDDIIKNMESNKELFDLLHDIIISGQKFLYNHFNPAIRIGVMFGILAESNRGLIVHNEIFETFICEYFISLNDTARKMTGSVFEVVEKGKFNMELCIKKFMQHYYEIYHKKDSNFLERECRLLFLTFLRPLINGAGFYHIESETRNGNRTDLIVDFNDEQFIIELKIWKGEQKHEKAYGQLIEYLNSKNKSVGYLLTFDFRKRRATKPSAKWVRKSKKKFLDCLCV

SEQ ID NO: 33639 - DNA, 423 bp, Unknown
  Obtained from environmental sample
  misc_feature (1)..(423): n is a, c, g, or t
atgacagggtcccgcttttcttccggtgattgccctttcattcacgcgggggcattcatgtctgaaactatccgatcttctcttctggctgtggatttgggacaactggaagccgcctacagcgtaaacatgactacgtctcaggcgctaaagcgtattgttatacctcaggcttttgcaattgcgataccgcctttggcaaatacccttgtttccattattaaggaaacttctctggtttttaccatttccattattgatattatggcccaggcaaaaattgtaggctctcgtagttaccgtttttttgagatttatgtggtagtttccatcatgtactggataatctgtacctgtgtttcacgtgttctggcgcttgttgagaaaaaagcccggagacatgaaaggagcctgaccgcatga

SEQ ID NO: 33640 - protein, 140 aa, Unknown
  Obtained from environmental sample
  misc_feature (1)..(140): Xaa is any amino acid
MTGSRFSSGDCPFIHAGAFMSETIRSSLLAVDLGQLEAAYSVNMTTSQALKRIVIPQAFAIAIPPLANTLVSIIKETSLVFTISIIDIMAQAKIVGSRSYRFFEIYVVVSIMYWIICTCVSRVLALVEKKARRHERSLTA

SEQ ID NO: 33641 - DNA, 528 bp, Unknown
  Obtained from environmental sample
  misc_feature (1)..(528): n is a, c, g, or t
atgatggtacaactggaaaagatcaataaaagcttcggcagtaaccatgtgcttaagggaatggaccttacggtagaacagggagaaattctttcgcttataggcccaagcggagccggcaagacaactctgctcaggacagtaaactggctggaaaaacctgactcgggaagcgttacggtggatggaataactgtggaagccggttccgccagccatgagaatattcacctgctccgatccaaatcgtcaatggtgtttcaacattataatttatttagaaataaaacggccctgcaaaatgttaccgaaagccttttgatagtcaaaaaaatccccaaagccgaagccgatgagcgcgggcttgagcttctccgttcagtgggaatggaagacaaggccggcgaatacccttncaggctttcaggaggacagcagcaaagggttggtattgcccgggcccttgcgttgatccaaagggtatgctttttgatgagcctaccagcgctcttgatccggaatgggtag

SEQ ID NO: 33642 - protein, 175 aa, Unknown
  Obtained from environmental sample
  DOMAIN (28)...(175): ABC transporter
  misc_feature (1)..(175): Xaa is any amino acid
MMVQLEKINKSFGSNHVLKGMDLTVEQGEILSLIGPSGAGKTTLLRTVNWLEKPDSGSVTVDGITVEAGSASHENIHLLRSKSSMVFQHYNLFRNKTALQNVTESLLIVKKIPKAEADERGLELLRSVGMEDKAGEYPXRLSGGQQQRVGIARALALIQRVCFLMSLPALLIRNG

SEQ ID NO: 33643 - DNA, 918 bp, Unknown
  Obtained from environmental sample
  misc_feature (1)..(918): n is a, c, g, or t
ttgagtaaacgtattattaatgaaccgactgccgcttcccttgcctttggttttaataaagattccaaaaaagacaaagttatcgctgtttacgatcttggcggcggaacattcgatatttcaattctggaacttggtgacggagtatttgaagtaaaatccacaaacggcgacactcatctcggcggcgatgattttgaccgccgtgttatggaatggctaatttccgaattcaaaaaagacacaggcatcgatcttggacaggatcgcatggcgttacagcggcttcgtgaagctgcggaaaaggcaaaaattgaattatcttccatgcaatctacagaagtcaatctgccctttattaccgccgaccaaagcggaccgaaacacctgcaaaaatccctgacaagggcaaaatttgagcaaatggtggaagaccttcttgaacgttccaaagaaccctgcaaaaaagcgctttcggacgcaggccttaccgccgatcaaattgacgaggtaattcttgtcggcgggtctacccgtattcccgcagtacagcagattgttaaagaccttttcaaaaaagaacccaacaagggcgtaaaccccgatgaagcggttgctgtcggcgcggcgattcaaggcggtattctcggcggcgatgtaaaagacgttcttttattggatgttactcctctttcgctcggtatagaaacacttggcggcgtaatgacaaaacttattacacgcaacacaacaatcccgacccgcaagagccagattttctctacagcggcggacggacaaaccgctgtttccattcaggtactgcagggcgagcgcgaaatggcaaaccagaaccgcgtgcttggccgctttgatcttgtcgcattcctcccgctccgcgcggagttccgcagatga

SEQ ID NO: 33644 - protein, 305 aa, Unknown
  Obtained from environmental sample
  DOMAIN (2)...(305): Hsp70 protein
  misc_feature (1)..(305): Xaa is any amino acid
MSKRIINEPTAASLAFGFNKDSKKDKVIAVYDLGGGTFDISILELGDGVFEVKSTNGDTHLGGDDFDRRVMEWLISEFKKDTGIDLGQDRMALQRLREAAEKAKIELSSMQSTEVNLPFITADQSGPKHLQKSLTRAKFEQMVEDLLERSKEPCKKALSDAGLTADQIDEVILVGGSTRIPAVQQIVKDLFKKEPNKGVNPDEAVAVGAAIQGGILGGDVKDVLLLDVTPLSLGIETLGGVMTKLITRNTTIPTRKSQIFSTAADGQTAVSIQVLQGEREMANQNRVLGRFDLVAFLPLRAEFRR

SEQ ID NO: 33645 - DNA, 318 bp, Unknown
  Obtained from environmental sample
  misc_feature (1)..(318): n is a, c, g, or t
ttgaatcgccgcgccgacagcaaccgcttcatcggggtttacgcccttgttgggttcttttttgaaaaggtctttaacaatctgctgtactgcgggaatacgggtagacccgccgacaagaattacctcgtcaatttgatcggcggtaaggcctgcgtccgaaagcgcttttttgcagggttctttggaacgttcaagaaggtcttccaccatttgctcaaattttgcccttgtcagggatttttgcaggtgtttcggtccgctttggtcggcggtaataaagggcagattgacttctgtagattgcatggaagataa

SEQ ID NO: 33646 - protein, 105 aa, Unknown
  Obtained from environmental sample
  misc_feature (1)..(105): Xaa is any amino acid
MNRRADSNRFIGVYALVGFFFEKVFNNLLYCGNTGRPADKNYLVNLIGGKACVRKRFFAGFFGTFKKVFHHLLKFCPCQGFLQVFRSALVGGNKGQIDFCRLHGR

SEQ ID NO: 33647 - DNA, 1002 bp, Unknown
  Obtained from environmental sample
  misc_feature (1)..(1002): n is a, c, g, or t
atgcaataccttggttttgacgcttttgaaaagtcaataaatgaaattgattcaaccgttgtttttatggcagaagagagcggtcaaacggttattataattgctgaaaaaaacaagggatgccgcgaatgtaagtctgaatccttaattttggggtttaacgcggttgagttgggcggcggaatatataaagcggctctgacccatgaaaacgcgctcgttttacgaaaactttttccttttaccgctcctgtccgggggttaaataaaccggcaagtttcgggcttggagaccggctggggattgcgacgccgggtcatatagaccttttcagagacatggacgtttttcccgtttttgcgcaacagtcaatcagggagcttaatctgacatgccggacttacgaagacgtattggacgccgtttcctttgccgtgtttcgtgaagggtataaaaagggctttggcgcggacggggatcacttaaaaaccgtaaaagacattgaatatgccctgtctctcgatttttcaatgataaccctggattgttccgatcatataaaaagcgaaaatattgaaaataatccgttacctgataattataaaaacaagtatattgataaaacttttaatatcgaaggtatttctcttgttttttcacaggaagaacttaaaaaatgcgccgccgtttacggggacgcgataaaatttataatagaaatatttaacaggtttttttctaaagataataaacctgcggattttgaaatttctatagatgaaacagtatcgcctacaacgccgttacagcatttttttgtcgcaaaggaactttttgacgccggcgtttcttttgagtcattggcgccgcgtttctgcggagagtttcaaaaaggaatagattacataggcgatacagctcagtttgaaaaagaaaataatattcacgcggccaataacaaggtttttttggtacaaaatgaatattcattcccgctctga

SEQ ID NO: 33648 - protein, 333 aa, Unknown
  Obtained from environmental sample
  misc_feature (1)..(333): Xaa is any amino acid
MQYLGFDAFEKSINEIDSTVVFMAEESGQTVIIIAEKNKGCRECKSESLILGFNAVELGGGIYKAALTHENALVLRKLFPFTAPVRGLNKPASFGLGDRLGIATPGHIDLFRDMDVFPVFAQQSIRELNLTCRTYEDVLDAVSFAVFREGYKKGFGADGDHLKTVKDIEYALSLDFSMITLDCSDHIKSENIENNPLPDNYKNKYIDKTFNIEGISLVFSQEELKKCAAVYGDAIKFIIEIFNRFFSKDNKPADFEISIDETVSPTTPLQHFFVAKELFDAGVSFESLAPRFCGEFQKGIDYIGDTAQFEKENNIHAANNKVFLVQNEYSFPL

SEQ ID NO: 33649 - DNA, 426 bp, Unknown
  Obtained from environmental sample
  misc_feature (1)..(426): n is a, c, g, or t
atgggggccaccggcgttggaaaaacctatcttgcatgcgcattaggcatagcagccaaccgcaatttctttgcaaccaggtataccagactcccggatcttttctgcgacttggcaatcgcccgggcggacggaacataccgaaaagtgataaaacaatatacccaagcaaaacttctaattctggatgaatggctcttgtttcctcttacggaaatagaaagccgtgaccttctggaaattatcgaagcaaggaataaccagggttccacagtcttctgttcccagtttgatgttggtgagtggtatccaaaaataggggaacctatattggccgaagcggtctgtgaccgcattgttcacaactcgtacacgatcgtactttccggggattctatgcgaaagagaaagggcatagctgagtaa

SEQ ID NO: 33650 - protein, 141 aa, Unknown
  Obtained from environmental sample
  DOMAIN (1)...(126): IstB-like ATP binding protein
  misc_feature (1)..(141): Xaa is any amino acid
MGATGVGKTYLACALGIAANRNFFATRYTRLPDLFCDLAIARADGTYRKVIKQYTQAKLLILDEWLLFPLTEIESRDLLEIIEARNNQGSTVFCSQFDVGEWYPKIGEPILAEAVCDRIVHNSYTIVLSGDSMRKRKGIAE

SEQ ID NO: 33651 - DNA, 363 bp, Unknown
  Obtained from environmental sample
  misc_feature (1)..(363): n is a, c, g, or t
ttgccgagaatctgcgcgcgttccggaggctctttatttgatatggttatacgcctaagggacggaatgttaaggggagactccgagtttataggaagccagggaatagcgggaattgatcttgcgttaagcaataacgcggtaaggatggcggacgtaggaagccgtcaggaaagagctcaaatggcatgggagagaattaacagggagatccccgatataacaaacatgctgaaccgcgaatccggccttgatttggcggacgccgcgatggaattaagagaactccagcttgcgcatcaggcgacacttcaaacggcggcgaaaattattccgccttcattgcttgattttttaagataa

SEQ ID NO: 33652 - protein, 120 aa, Unknown
  Obtained from environmental sample
  misc_feature (1)..(120): Xaa is any amino acid
MPRICARSGGSLFDMVIRLRDGMLRGDSEFIGSQGIAGIDLALSNNAVRMADVGSRQERAQMAWERINREIPDITNMLNRESGLDLADAAMELRELQLAHQATLQTAAKIIPPSLLDFLR

SEQ ID NO: 33653 - DNA, 444 bp, Unknown
  Obtained from environmental sample
  misc_feature (1)..(444): n is a, c, g, or t
atgaaagtagatacaaaagcctttggactgattgaagttgatgacaggcagaaaataaaaattcccgaagggctttacggctttgaagattatattgaatatgtgttattggacgctgaacaacagccttatttcctgcttcagtctgtaaaagaaagagatatcgcgtttatacttattaatccttttcttttccgtcctgattatgaagtaaacattccaaatgaagatcttgaagatataggattaaaaacacctgaaaacgcgttgatattttcgattgtaacaattcctccggacggaagcgcgatgacggcaaaccttcagggtcctcttataattaaccgtgacaatatgacgggaaaacagtggatacagtctgatgtacgctggaaaacaaggcatgacattgtagcggaattaaaaaacgcggggaaattataa

SEQ ID NO: 33654 - protein, 147 aa, Unknown
  Obtained from environmental sample
  DOMAIN (17)...(140): Uncharacterized BCR, COG1699
  misc_feature (1)..(147): Xaa is any amino acid
MKVDTKAFGLIEVDDRQKIKIPEGLYGFEDYIEYVLLDAEQQPYFLLQSVKERDIAFILINPFLFRPDYEVNIPNEDLEDIGLKTPENALIFSIVTIPPDGSAMTANLQGPLIINRDNMTGKQWIQSDVRWKTRHDIVAELKNAGKL

SEQ ID NO: 33655 - DNA, 585 bp, Unknown
  Obtained from environmental sample
  misc_feature (1)..(585): n is a, c, g, or t
atgatagaactgaacatctcctgccccaatgtaaaagccgggggcatttcgttcggtctggaccccggaaccgcggcggctcttgtcgccgcagtaaagcgcgtatgcaccataaaaccgcttattgtaaaactttcacctaacgccccttcccttccggccgtatccctttcctgcattaaagccggagccgacgctctttcgcttattaattcttacagggctatggcgatagacactgttaaccgcaaacctgtatttgacaatgtaagcgccggcctctcgggacccgcgataaaaccaatcgcgctgggcatggtttgggaacttattaaaattttaagggattcaaaatcaaacgttccggttataggcataggcggaatttcctgcacaaatgacgcgcttgagtttttaatggcgggagcatccgctatacaggtaggctcctctacttttgttaatcctaatacaatgacggaaattatagacggattacgcaattatttaatcgagaataaaatgtcaaatgtaaatcaaatatcaataagaatagaaaaggacgatcatggaaaacataattga

SEQ ID NO: 33656 - protein, 194 aa, Unknown
  Obtained from environmental sample
  DOMAIN (1)...(170): Dihydroorotate dehydrogenase
  misc_feature (1)..(194): Xaa is any amino acid
MIELNISCPNVKAGGISFGLDPGTAAALVAAVKRVCTIKPLIVKLSPNAPSLPAVSLSCIKAGADALSLINSYRAMAIDTVNRKPVFDNVSAGLSGPAIKPIALGMVWELIKILRDSKSNVPVIGIGGISCTNDALEFLMAGASAIQVGSSTFVNPNTMTEIIDGLRNYLIENKMSNVNQISIRIEKDDHGKHN

SEQ ID NO: 33657 - DNA, 594 bp, Unknown
  Obtained from environmental sample
  misc_feature (1)..(594): n is a, c, g, or t
atggaaaacataattgaattattgcgcgaatcaaacgcgatgctggaaggccattttcttttaagctcgggccgccactccgacaagtattttcagtgcgcgaaacttttgcagtacccggacaagtcgcaggccgcgttaaaaccggtcgcggacaaaatacgcgaagacattaaaagcgggaagctcaaggttgatatagttgtaggaccggcgatgggcggaattatcgccgcttgggaagttgcaagacagctttcactccccgcaattttcacggagcgcgacgataccggcgctatgaccctgcgcaggggatttgagttacagagcggagaaaacgtccttattgtagaagatgttgttaccaccggaaaatcctcgatggaatgcgccgaggccctgaaagcggcaggcgcggttataaccgcccttgcctgtattgtagaccgcagaactgaaaacgcgcaggatattccctggccgttttatccgggtgtaaaagtaagttccgaaaactgggaagcggctgattgcgagttatgcaagaagggaattcccgccgtaaaacccggttcaagaaagataaaataa

SEQ ID NO: 33658 - protein, 197 aa, Unknown
  Obtained from environmental sample
  DOMAIN (32)...(159): Phosphoribosyl transferase domain
  misc_feature (1)..(197): Xaa is any amino acid
MENIIELLRESNAMLEGHFLLSSGRHSDKYFQCAKLLQYPDKSQAALKPVADKIREDIKSGKLKVDIVVGPAMGGIIAAWEVARQLSLPAIFTERDDTGAMTLRRGFELQSGENVLIVEDVVTTGKSSMECAEALKAAGAVITALACIVDRRTENAQDIPWPFYPGVKVSSENWEAADCELCKKGIPAVKPGSRKIK

SEQ ID NO: 33659 - DNA, 780 bp, Unknown
  Obtained from environmental sample
  misc_feature (1)..(780): n is a, c, g, or t
ttgatacattgcaagtcagcccaaaaagacatgatcgacgtggcggatattcttgtctccctttacgatgaagaaagatgttacagcggctattatctgcgcaaggcgggaataaggcggctggaacttttacaggtactgtcccacagttatggcaacgatccatttttaaattctcaaaggggcgaaaaatttgccggtgtggacgatgacgccgacgcccagaaaaaagcgggtaaaaagacaatgcttgagcgttatgcgatagatttgaccgctttggctaaggagcaaaaactggaacccgtaatcggcagggaagacgaacttgaccgtaccgtgcaggtgctttgcagaagaatgaaaaataacccgattcatgttggggattccggcgtaggaaagacggcaataacggaaggccttgcccagagaattgtagcaggcaatgtgccgccgcttcttaaaaactttagtatttacgcccttgacatgggaactctcctggcgggaaccaagtaccggggtgatttcgaggaaagggtaaaacgtgttgtagaagaactgttaaaaaaagaaaaaactattctttttatcgacgagattcacactcttgtcggagcgggggccgtttcaggcggcgcgatggacgcttccaatctgttaaagcccgcgcttacttcgggcaagcttcgctgtatcggctccacaacgcacgaggagtacaacaagttctttgaaaaaagaccgcgcgctttcaaggcgtttccaaaaaattga

SEQ ID NO: 33660 - protein, 259 aa, Unknown
  Obtained from environmental sample
  misc_feature (1)..(259): Xaa is any amino acid
MIHCKSAQKDMIDVADILVSLYDEERCYSGYYLRKAGIRRLELLQVLSHSYGNDPFLNSQRGEKFAGVDDDADAQKKAGKKTMLERYAIDLTALAKEQKLEPVIGREDELDRTVQVLCRRMKNNPIHVGDSGVGKTAITEGLAQRIVAGNVPPLLKNFSIYALDMGTLLAGTKYRGDFEERVKRVVEELLKKEKTILFIDEIHTLVGAGAVSGGAMDASNLLKPALTSGKLRCIGSTTHEEYNKFFEKRPRAFKAFPKN

SEQ ID NO: 33661 - DNA, 1440 bp, Unknown
  Obtained from environmental sample
  misc_feature (1)..(1440): n is a, c, g, or t
atgttcgggtgggtgccggtgctgctttggatattggtcgggggggtgttcttcggcgcggttcaggactttgcggcgctctacgcttcggtgaagaacaagggaaagactatagggtttatcattgagatgtatataggcaagaccggcaagcggctttttcttatcttcgtgtggcttttctccatattggtagtggcggcgtttgcggatattgtggcggggactttcggcgggtttgacaagggggcgggcggcgaagccgtcaaggttccggccaatgccgctgtggcgactacttccgtgttgtttatagtcgcggcggtggggcttgggctcttcttgcggcgtgtaaagcctaaggcgcttatcagcgccgcggtcgcctgtactgttttggtgctctgtatcgcggcaggccttttcttccctatatatattgacaagggcgtttggctgtatctcgtgttcgcctatatattcttggcctccgtcacaccggtatgggcgctactgcagcctagggactacctaaactcgttcctgcttgtggcgatgatcgcggcggcttttgtaggcgtggtgatttccgcgccgcccatcaatatcccggcgtttaccggatttaaggcgggcgacagttacatgttccccatactctttgtaacggtggcttgcggagccgtctccggtttccacagccttgtttcgtcgggcactacgagcaagcagatagcgagcgagaagcacattttgcctatcgggttcgggtctatgcttgttgagagctttttggcggtcatcgcggtcatcaccgtgggcgcgatcaccgtgggcgggaagctgccgcagggcatagagacgcctccgcaggttttcgcctcggcggtggcgagttttttagtgaagatcgggttgccggagagcgttgtttttacgctgatcaccttgtcgataagcgcgttcgccctcacttccttagattcggtcgcccgagtggggcggctggcttttcaggagctttttacggagtcggagtcggagggcggcaggggggcggcggcgcgtataagggattttttcaggggcaagtacgtcgcgacgctctgcaccctgctcttcgggtatctgctcgccgttttgggctacaaggccatctggccgctcttcggctcggccaaccagctgcttgccgccctgtcgctgatcgcctgcgccgtgttcttgaagaagaccaagcgtcaggggtttatgctctacgcgccaatggttgtcatgttggcggtgacgttcacggcgttgacgcttaccgttctggcgaagggcgggaagctcatcgacggcacgttcagcgtcgctcaggacttccttcagctggccttcgccgtgttgcttttgggntggggacgatggttctcgtgcanggggtcggccggctga

SEQ ID NO: 33662 - protein, 479 aa, Unknown
  Obtained from environmental sample
  SIGNAL (1)...(25)
  DOMAIN (1)...(305): Carbon starvation protein CstA
  misc_feature (1)..(479): Xaa is any amino acid
MFGWVPVLLWILVGGVFFGAVQDFAALYASVKNKGKTIGFIIEMYIGKTGKRLFLIFVWLFSILVVAAFADIVAGTFGGFDKGAGGEAVKVPANAAVATTSVLFIVAAVGLGLFLRRVKPKALISAAVACTVLVLCIAAGLFFPIYIDKGVWLYLVFAYIFLASVTPVWALLQPRDYLNSFLLVAMIAAAFVGVVISAPPINIPAFTGFKAGDSYMFPILFVTVACGAVSGFHSLVSSGTTSKQIASEKHILPIGFGSMLVESFLAVIAVITVGAITVGGKLPQGIETPPQVFASAVASFLVKIGLPESVVFTLITLSISAFALTSLDSVARVGRLAFQELFTESESEGGRGAAARIRDFFRGKYVATLCTLLFGYLLAVLGYKAIWPLFGSANQLLAALSLIACAVFLKKTKRQGFMLYAPMVVMLAVTFTALTLTVLAKGGKLIDGTFSVAQDFLQLAFAVLLLGWGRWFSCXGSAG

SEQ ID NO: 33663 - DNA, 534 bp, Unknown
  Obtained from environmental sample
  misc_feature (1)..(534): n is a, c, g, or t
ttgactctagatgaggagcgaaaaatgtcttcagtgggcggaattttcggcggacttgagatcagcgcttccggtatgcgcgcgcagcgcattcggcagaacaccatatcgtccaacttggccaacgcggagacgacgcgtacggccgagggcggtccgtaccgccggcagttcgtggtcttcgaggcgcagtccaacaggcgcgacacgcgtatactgaacgaaaacgtctcgctctacggcgccacgacgcagggcaaccacatgcccataccgccgtcgaacttcccgagggacgagcgtttcttcggccgcggagtagacgtcccggaaatccgttccgacacccgcccgccccgcctagaatacgacccggggcacccggacgcggacgaggaagggtacgtggcaatgccgaacgttaacgtcatagaagagatgacggacatgatagccgccacaagagcctacgaggcgaatgttacggcgttcgacgcaataaagggcatgctgatggagactgttaaaggatag

SEQ ID NO: 33664 - protein, 177 aa, Unknown
  Obtained from environmental sample
  DOMAIN (139)...(177): Domain of unknown function (DUF1078)
  misc_feature (1)..(177): Xaa is any amino acid
MTLDEERKMSSVGGIFGGLEISASGMRAQRIRQNTISSNLANAETTRTAEGGPYRRQFVVFEAQSNRRDTRILNENVSLYGATTQGNHMPIPPSNFPRDERFFGRGVDVPEIRSDTRPPRLEYDPGHPDADEEGYVAMPNVNVIEEMTDMIAATRAYEANVTAFDAIKGMLMETVKG

SEQ ID NO: 33665 - DNA, 1533 bp, Unknown
  Obtained from environmental sample
  misc_feature (1)..(1533): n is a, c, g, or t
atggtcagattcgccgagttccgcccgcgcaggttcggcaagtcgctcttgtgctggacgctcgacgcgctgtttcgcgggaagcgggagctgtttgaggggctggccatatcaaagacggactgggcgtgggagagttatccggtcgtccacttggatatgagcaaggtggagacggacaggggcactgacggcgtcatagaatcattggcgtggcagacaaaaaaattcgccgaagagtacgatatcaacttagacggactcactctgcccggaataatgctggcgaacataatcattgatacatccaaaaaacacaacaagccggtcgtcgtaattgtggacgaatatgacaagccgttcctggacttctacaataagcccccgatggcgcaggaagtccgcgatgttatgagaagttactactcgcaactgaaggggaacgaaccgtatataaaatttttgttcatgaccggtatctccaaattcactaaggcgggggtcttctctacgctgaacaacctatacgatctctcgcttgatgaaaaattcggtacgttgctcggatacaccgaaaaggaactcgttgattattttggccagtatattgaaattggggctaaaaaattaaatatgtcggcaaacggacttgtggataaactgagagactattacaacggattttgtttcgacggaatccatagagtatactgcccgttttctatacttaatttctttgaaaggtatcaattctttaatatttggatggacagcggaaaccctaagataatagccgactacatgaaagataggcgcctcaccgtcgaacagtttaaggggcttcaggtatcaagggactttgcgctaagaccaggcgagatcgaaatcgcgccgccggagagctttctatatcaggccggatacctgacgctccgcgagggcgtctccgacgacttttctctcgactacccaaataccgaagtgcttaattccatgtcgcagttggtgtacaaaaatatgttgcaatccggcgatgacccatactttgacctaaacgccccgctcctgcgtgcgctctatgatgggaactgcaagctctttgttgataccataagcaaccttctggcgagcatcccatacgatgattacaccggcgcggccaaacaggcgctggcgcataccggattggaaataccggtgcaggagtggctctaccgctcgaccattttggcgtttttgcgcggttgcaacgtgctggcgttcggagagatgcacggcagtaaaggacgctcagacttgcagattatgcacaaaggcatcccgtgggtggcggagataaaggtcgcctacaacgacgactgcaaagccaaagccgcagaggctatggaacagctgaacggcaaccggtacgccgacccgtacaanaacgctaagaaaatcgccattgccatagacgaacagactagacgggtcggggagtggattggggcgtanatggaaactccgttccgcctatgggtatctttaaattaa

SEQ ID NO: 33666 - protein, 510 aa, Unknown
  Obtained from environmental sample
  DOMAIN (1)...(494): Protein of unknown function (DUF1703)
  misc_feature (1)..(510): Xaa is any amino acid
MVRFAEFRPRRFGKSLLCWTLDALFRGKRELFEGLAISKTDWAWESYPVVHLDMSKVETDRGTDGVIESLAWQTKKFAEEYDINLDGLTLPGIMLANIIIDTSKKHNKPVVVIVDEYDKPFLDFYNKPPMAQEVRDVMRSYYSQLKGNEPYIKFLFMTGISKFTKAGVFSTLNNLYDLSLDEKFGTLLGYTEKELVDYFGQYIEIGAKKLNMSANGLVDKLRDYYNGFCFDGIHRVYCPFSILNFFERYQFFNIWMDSGNPKIIADYMKDRRLTVEQFKGLQVSRDFALRPGEIEIAPPESFLYQAGYLTLREGVSDDFSLDYPNTEVLNSMSQLVYKNMLQSGDDPYFDLNAPLLRALYDGNCKLFVDTISNLLASIPYDDYTGAAKQALAHTGLEIPVQEWLYRSTILAFLRGCNVLAFGEMHGSKGRSDLQIMHKGIPWVAEIKVAYNDDCKAKAAEAMEQLNGNRYADPYXNAKKIAIAIDEQTRRVGEWIGAXMETPFRLWVSLN

SEQ ID NO: 33667 - DNA, 804 bp, Unknown
  Obtained from environmental sample
  misc_feature (1)..(804): n is a, c, g, or t
atggttacgtttaaccgttgggcgacagaccctaaatttattaagggcgatatttccattattctgctgactgaaaatctatccgatataacttcgcgtcttacaagttctccggctattgtaaagataagcgttccgtttcccaacgcgaaaatcagggaaagttatctgcgttcggaagaagaaaaaggaaaactcctattggaacgaggattaactcccgaaaggcttgcgtcgattacgtccggcctaaatctgatgaacctgtaccgtctggccgcggaaagttttgaaaatgaaagccccgtttcgcttgagttcatgcggcagaaaaagaaagaaataatcgagaacggagcctgcggtcttttggagtttatggaaacgtcttatgatctttcccatgtgtcgggacatgattttgttaaaaagcggtttaaaaacgccgcaaaggcaattaaaaagggacgccccgacgtattgccgatggggtatttaatcgccggtcctgtagggacgggtaaaagttttatggttagcgccttcgcaggcgagattgggattccgatggtgaagttccgcaatttccgcagtaagtggcagggcgagactgaatcgaatcttgaaagagttttaaatattcttacggcgatgtctcccgttggagtgatgatagacgaagccgacgcttttctgggagaccgctctcaggaaggggactcangcacaagtaaccgcgtgtttgcgcagatagcctcttttatggggcatacggaataccggggcaaaatatatggtttttaa

SEQ ID NO: 33668 - protein, 267 aa, Unknown
  Obtained from environmental sample
  misc_feature (1)..(267): Xaa is any amino acid
MVTFNRWATDPKFIKGDISIILLTENLSDITSRLTSSPAIVKISVPFPNAKIRESYLRSEEEKGKLLLERGLTPERLASITSGLNLMNLYRLAAESFENESPVSLEFMRQKKKEIIENGACGLLEFMETSYDLSHVSGHDFVKKRFKNAAKAIKKGRPDVLPMGYLIAGPVGTGKSFMVSAFAGEIGIPMVKFRNFRSKWQGETESNLERVLNILTAMSPVGVMIDEADAFLGDRSQEGDSXTSNRVFAQIASFMGHTEYRGKIYGF

SEQ ID NO: 33669 - DNA, 1485 bp, Unknown
  Obtained from environmental sample
  misc_feature (1)..(1485): n is a, c, g, or t
atgatcagatcggcacgaaagccgtcattggaagaaatagaaaaaacagccaaaacagggcaatacagcgtaatacctatgagtatggaattgtactctgatatgtttacgtcgattgacatattaaaaaaattaaaaaatgtcagtaaacattgctttattcttgaaagcgccgaggacacaaaaacatggggcagatacacttttctgggatttgatcctacaatggaaatcacctgccttaacggtttaatgaatattaccgagggcgagacaaaatcttttaagactgacgacccgaacaaacatattcaggaaattttaagcaaatataaaagcgtaaaattcgattatctgccgccctttaccggaggacttgtcggctattttgcctacgattacgcgaaatactgcgagccgtcgcttcagcttgaagccaatgacgaagagcgttttaacgacgtcgatttaatgctttttgacaaggtgatatgttttgatcattacaaacaaaaaatcattttaatcgtaaatataaaaaccgataatccgcaggctgaatacgagaaaggaaaatcaaaacttgaatacataaataatttaatcagaacgggaactcatgaggatactccttccgcttgtttaaagtctgattttaaacctttgttttccaaagatgaatactgcaaaatggtaaacaaggcgaagcatcatataaaagaaggcgatatttttcaggttgtgttgtccaacaggtacgaggctgattttgagggcagtattttttacacataccgcatactgcgaaccattaacccttcgccgtatatgttttatttcagcggcagcaatcttgaaatagccggcgcgtcgcccgaaacgcttgtcaagttacacgacggtaagctctttacctttccgctcgccggaacccgtccaagaggcgcaaacgacgaggaagacatcgctctggaaaaagagctgctcaatgacgaaaaagagcttgcggaacacaatatgctggtcgatcttggccgcaacgatttgggaaaaatcagcaaattcggaacagtatcagtcgctaaatacaagtctatcctgcgcttttcccacgttatgcacatcggctccacggtaagcggcgaaatcctcgaaggaaaaacggggcttgacgccattaacgccgtgcttcccgccggtacattgtcaggcgcccccaaaatccgcgccatgcaaatcatcaatgagctggaacaaaacaaacgcggcatttacggcggcgcaatcgggtatcttgattttacaggcaatatggacacctgcatcgccattagaattgtgtaccgcagaaacaacaaagtgtttatccgttcaggcgcgggaattgttgtggacagcatacctgaatcagaatatcaggaatgtgtgaacaaatccaaagcggtaatggacgcgcttaaaaactcctccggagggcttgaataa

SEQ ID NO: 33670 - protein, 494 aa, Unknown
  Obtained from environmental sample
  DOMAIN (27)...(175): Anthranilate synthase component I, N terminal region
  misc_feature (1)..(494): Xaa is any amino acid
MIRSARKPSLEEIEKTAKTGQYSVIPMSMELYSDMFTSIDILKKLKNVSKHCFILESAEDTKTWGRYTFLGFDPTMEITCLNGLMNITEGETKSFKTDDPNKHIQEILSKYKSVKFDYLPPFTGGLVGYFAYDYAKYCEPSLQLEANDEERFNDVDLMLFDKVICFDHYKQKIILIVNIKTDNPQAEYEKGKSKLEYINNLIRTGTHEDTPSACLKSDFKPLFSKDEYCKMVNKAKHHIKEGDIFQVVLSNRYEADFEGSIFYTYRILRTINPSPYMFYFSGSNLEIAGASPETLVKLHDGKLFTFPLAGTRPRGANDEEDIALEKELLNDEKELAEHNMLVDLGRNDLGKISKFGTVSVAKYKSILRFSHVMHIGSTVSGEILEGKTGLDAINAVLPAGTLSGAPKIRAMQIINELEQNKRGIYGGAIGYLDFTGNMDTCIAIRIVYRRNNKVFIRSGAGIVVDSIPESEYQECVNKSKAVMDALKNSSGGLE

SEQ ID NO: 33671 - DNA, 438 bp, Unknown
  Obtained from environmental sample
  misc_feature (1)..(438): n is a, c, g, or t
atgccgcgtttgttttgttccagctcattgatgatttgcatggcgcggattttgggggcgcctgacaatgtaccggcgggaagcacggcgttaatggcgtcaagccccgtttttccttcgaggatttcgccgcttaccgtggagccgatgtgcataacgtgggaaaagcgcaggatagacttgtatttagcgactgatactgttccgaatttgctgatttttcccaaatcgttgcggccaagatcgaccagcatattgtgttccgcaagctctttttcgtcattgagcagctctttttccagagcgatgtcttcctcgtcgtttgcgcctcttggacgggttccggcgagcggaaaggtaaagagcttaccgtcgtgtaacttgacaagcgtttcgggcgacgcgccggctatttcaagattgctgccgctgaaataa

SEQ ID NO: 33672 - protein, 145 aa, Unknown
  Obtained from environmental sample
  SIGNAL (1)...(19)
  misc_feature (1)..(145): Xaa is any amino acid
MPRLFCSSSLMICMARILGAPDNVPAGSTALMASSPVFPSRISPLTVEPMCITWEKRRIDLYLATDTVPNLLIFPKSLRPRSTSILCSASSFSSLSSSFSRAMSSSSFAPLGRVPASGKVKSLPSCNLTSVSGDAPAISRLLPLK

SEQ ID NO: 33673 - DNA, 630 bp, Unknown
  Obtained from environmental sample
  misc_feature (1)..(630): n is a, c, g, or t
atgcatcagatcggccgagcggacgcaaggttatataggcagatacatccagacctaggcgggccatcgaacagaatcgcccagcttgagcgcatgagggacatgggctatgaaataggcacgggcataatgattggcctcccaggccaaacatgggagagcctggcaaacgatatatggctgttccgcaagtacggcattgacatggtgggcgtgggcccattccttgaaagccctgccacgccgctggcaggggaacttgggaaagcccttagagcatcggcaggggacagccaagtgccctctgacgacctgaccgcgcttaaagtgatagccctcacgcgcctattgtgccccgacaccaacatacccgccaccaccgccctagccaccattgacccaacggacgggcgcgtccacggcttgcagcgcggcgccaacgtcgtgatgccaaacgtaacccccgccgaataccgcagcctgtaccagacataccccggcaaagccgggacgcatgagtcggcggatgtatcaaggcacaaaatcgaatcgcagatattgtcgctgggcaggacgattggaaaggggccggggacttcgctgaagtacttgcgagtgggaaacgtttga

SEQ ID NO: 33674 - protein, 209 aa, Unknown
  Obtained from environmental sample
  misc_feature (1)..(209): Xaa is any amino acid
MHQIGRADARLYRQIHPDLGGPSNRIAQLERMRDMGYEIGTGIMIGLPGQTWESLANDIWLFRKYGIDMVGVGPFLESPATPLAGELGKALRASAGDSQVPSDDLTALKVIALTRLLCPDTNIPATTALATIDPTDGRVHGLQRGANVVMPNVTPAEYRSLYQTYPGKAGTHESADVSRHKIESQILSLGRTIGKGPGTSLKYLRVGNV

SEQ ID NO: 33675 - DNA, 1314 bp, Unknown
  Obtained from environmental sample
  misc_feature (1)..(1314): n is a, c, g, or t
gtgtataacccggttgacgagatcgatcttcttgaggcaaaagagcttaaccccgacgcggatgtaggggacgaaatcctggttccgatagatacaacagaattcggacggcagtccatacagctagcaaagcagactgcccatcaatcgattcgggaaatacaaaaggacagcctttactccgaattcaaggacaaagtcggtgaaattatcatcggttattaccagcgcgaacggaacgggacaatctacgtagatctgggaaaagtcgagggcgtgctacagaagaaataccagtccaaccgcgaaacctaccatgtgaacgaccggattaaagcccttattaaggaagtaaacaagaccccttccgggcttcagattgtgctgtcgcgcaccgaccccgaatttgtccgggctatttttgagcttgaagttccggagatatacgacaagaccgttgaaatacacaagatcgtcagggaagccggttacagaaccaaacttgccgtgtattcaaaccgcgacgatgttgaccctgtcggcgcctgcgtggggctcaagggcgtgagaatacaggcggttataaaggagcttgagggagagaaaatcgacatactaaaatacgatcccgatccccggcactttattaaaaacgccctttcccccgccgaggtcagagacgtgatcatcctcagtgaaaaatcgaaaaaagcccttgccgtagtgagcgattcacttttatcgcttgccataggcaaacagggccttaatgtgcgccttgccaacaaattaaccgactggatgatagacgtgaagactgacgcgcaattcgccgaaatggatatagctgccgaatccaaacgggcggtcaatgagctttttaaggaaggcgaggcggaggagttctccagaatctcggaacttcccggagtggatccggccgttgcccaggccttgcttgacaatggcattgactatattgtggacttcctcgagttgagtaaggaacagcttgacgcgatggaaaatatatcggatgagcaaattgcggttttacgcagcttgattgacgactctgttgaaatactggaagaagaagccgaagataccgccgaagcggaatttgccggagatgaagccgttcccgctgccgccggcgaccatgagggtgaagaaaacgcggaagaaattgaatgtcccgaatgtaatggaaaattcgttcttgatatggacggcttttccggaggtaccatcagttgccccaactgcggcgcggaactggaattgagctttgagaaagaagaaggggattaa

SEQ ID NO: 33676 - protein, 437 aa, Unknown
  Obtained from environmental sample
  misc_feature (1)..(437): Xaa is any amino acid
MYNPVDEIDLLEAKELNPDADVGDEILVPIDTTEFGRQSIQLAKQTAHQSIREIQKDSLYSEFKDKVGEIIIGYYQRERNGTIYVDLGKVEGVLQKKYQSNRETYHVNDRIKALIKEVNKTPSGLQIVLSRTDPEFVRAIFELEVPEIYDKTVEIHKIVREAGYRTKLAVYSNRDDVDPVGACVGLKGVRIQAVIKELEGEKIDILKYDPDPRHFIKNALSPAEVRDVIILSEKSKKALAVVSDSLLSLAIGKQGLNVRLANKLTDWMIDVKTDAQFAEMDIAAESKRAVNELFKEGEAEEFSRISELPGVDPAVAQALLDNGIDYIVDFLELSKEQLDAMENISDEQIAVLRSLIDDSVEILEEEAEDTAEAEFAGDEAVPAAAGDHEGEENAEEIECPECNGKFVLDMDGFSGGTISCPNCGAELELSFEKEEGD

SEQ ID NO: 33677 - DNA, 702 bp, Unknown
  Obtained from environmental sample
  misc_feature (1)..(702): n is a, c, g, or t
gtgcgtatggatatcagcacaatatgcgtacacggctgtaataaaaaatttgatacaacaggagcggtagccgttcccatttttgcttcggctacttttgcgcatccgggcgtaggacagagcacaggctttgattactcccgctcgctcaaccctaccaatgtacatctggaagacactgtcgctgcattggaagggggcagcgatgccgtggcgttttcttcaggcatggcggctgtttccgcgctgatggaattgttttcacagggcgatcatatcatcgcttccgatgatctttacggcggcactttccgcctcttttcgcatatatcccaaaagaacggcgtaaaagtctcttatgccgcaactgtggaaaatatagaaaaagaaataaccccggctacaaaagctatatttatagaaactccttccaatccgatgatgcacgtaacggacatggcggcggtcgcggccatcgcgcaaaagcataaattacttttcattgttgacaatactttccttacgccttattttcaaaaaccgttttctcacggagccgatattgtcctgcacagcggaacaaaatatctgggcggacacaacgataccctggcggggatgttagttgtaaaagagcggcgctctcgcggaaaaattacggttcatcgcaaagacaaccggcggatgtttatcgccctttga

SEQ ID NO: 33678 - protein, 233 aa, Unknown
  Obtained from environmental sample
  DOMAIN (6)...(233): Cys/Met metabolism PLP-dependent enzyme
  misc_feature (1)..(233): Xaa is any amino acid
MRMDISTICVHGCNKKFDTTGAVAVPIFASATFAHPGVGQSTGFDYSRSLNPTNVHLEDTVAALEGGSDAVAFSSGMAAVSALMELFSQGDHIIASDDLYGGTFRLFSHISQKNGVKVSYAATVENIEKEITPATKAIFIETPSNPMMHVTDMAAVAAIAQKHKLLFIVDNTFLTPYFQKPFSHGADIVLHSGTKYLGGHNDTLAGMLVVKERRSRGKITVHRKDNRRMFIAL

SEQ ID NO: 33679 - DNA, 933 bp, Unknown
  Obtained from environmental sample
  misc_feature (1)..(933): n is a, c, g, or t
atggaaattgactatgagatagagcaaattgctgccgaattgttaagcgatttccaaaagaagcgcgaaattaccaaacaaccggcaaagccggtgataattgagataattggcaaattgcagcaccttctgttcccaggaatttttgaaagtgttttgacagacggctcggtgaaaaataaactcaacgttatgctagaagaagtttctcacgatttagcaaagcaaacaaaattggcactgcgttatgatttacgctacaaagatgcaaagcaagaagatgttgataaaacggcttgggaaaaaacgcgccaatttattttaaaaattcctctcataaaagattttttggaaaaagatatagaagctgcatataatggcgatccttccgcatatagcaaggcagaaattgtaatatcttaccctggcatttatgccacaatggtttaccgaatagctcacgaactatacctgctctctgtgccgctaataccgagaattatgagcgaatatgcgcacagcttaaccggtatagatattcaccctggcgcagctataggcaaatatttttttatagaccacggcactggcattgttataggcgaaaccgcagttatcggggataatgtaaaattgtatcaaggagttacactcggtgccttgtccancaagggaggtcaaaccataaagggagttaaaaggcacccaactataagcgataatgttacgatatactcaggcgctactattttgggtggagacaccattatcggcgagggcgttgtatcgggaggaaacgcttntgtgatacggtctgttccggaaaaaacccgcgtcagcgtgaaaaatcccgaattgcagtttaagagcagcggtaatatttcctctcacatggaattagaccagcttgatttttggcattatgagatatag

SEQ ID NO: 33680 - protein, 310 aa, Unknown
  Obtained from environmental sample
  misc_feature (1)..(310): Xaa is any amino acid
MEIDYEIEQIAAELLSDFQKKREITKQPAKPVIIEIIGKLQHLLFPGIFESVLTDGSVKNKLNVMLEEVSHDLAKQTKLALRYDLRYKDAKQEDVDKTAWEKTRQFILKIPLIKDFLEKDIEAAYNGDPSAYSKAEIVISYPGIYATMVYRIAHELYLLSVPLIPRIMSEYAHSLTGIDIHPGAAIGKYFFIDHGTGIVIGETAVIGDNVKLYQGVTLGALSXKGGQTIKGVKRHPTISDNVTIYSGATILGGDTIIGEGVVSGGNAXVIRSVPEKTRVSVKNPELQFKSSGNISSHMELDQLDFWHYEI

SEQ ID NO: 33681 - DNA, 645 bp, Unknown
  Obtained from environmental sample
  misc_feature (1)..(645): n is a, c, g, or t
atgccgttttttttatacaaggccgtttcgtctacaggtgctgattttagcgggcaattagaagcgcgcgaccttgaagaagcgcgcggaatgttaatccgcaggcatttgactattcagagcctcaaaaaaaaaccaaccgaaataaaactgccatctattggcacgggaataaaatcaaaagaaattgctcgcttcactcgccagttttctgctatgagtcaggccggtttgccaataattcaatcacttgcaattttagaagagcaagccacaaatccaacattaaaagccacaatacacaaaatcacaatgtctatcaacggtggttcatctcttgcagatgctcttgcgcttcacccaaaggtgtttgataggctttatattcatatggttgcggcaggtgaggctggcggtattttagatggcattctgcttaggcttgccgaatatcaagaggcaaacgaaaggctaaagagaaaagtaaaaaaagccatgacataccctgcaatggtagccatagttgcaattctcgttgtgataataatgctcacttttgttattccgcagtttgtatccatattcagagatgcaggcattggtctgccttggcccacaagggtggttatgggagcttctgattga

SEQ ID NO: 33682 - protein, 214 aa, Unknown
  Obtained from environmental sample
  DOMAIN (66)...(189): Bacterial type II secretion system protein F domain
  misc_feature (1)..(214): Xaa is any amino acid
MPFFLYKAVSSTGADFSGQLEARDLEEARGMLIRRHLTIQSLKKKPTEIKLPSIGTGIKSKEIARFTRQFSAMSQAGLPIIQSLAILEEQATNPTLKATIHKITMSINGGSSLADALALHPKVFDRLYIHMVAAGEAGGILDGILLRLAEYQEANERLKRKVKKAMTYPAMVAIVAILVVIIMLTFVIPQFVSIFRDAGIGLPWPTRVVMGASD

SEQ ID NO: 33683 - DNA, 306 bp, Unknown
  Obtained from environmental sample
  misc_feature (1)..(306): n is a, c, g, or t
ttgtgcttcaaggcgttatttgccaaaccccttttgcccaagctaggcggtgggcgcgttatggcctacgaggttatgaatgttttgccatcaattcgcgctctgattagagacgataaagttcaccaaatagaatccataatagagataagccaaaaattcggaatgaataccatgaacatgaggcttgccgatttggttttatccaggcaaatagaccgctttttggctctgaacaaatcttctaacccagaaaatttggaaaaattgctgctggaaaaagagcttaagaaaggagccacttaa

SEQ ID NO: 33684 - protein, 101 aa, Unknown
  Obtained from environmental sample
  misc_feature (1)..(101): Xaa is any amino acid
MCFKALFAKPLLPKLGGGRVMAYEVMNVLPSIRALIRDDKVHQIESIIEISQKFGMNTMNMRLADLVLSRQIDRFLALNKSSNPENLEKLLLEKELKKGAT

SEQ ID NO: 33685 - DNA, 552 bp, Unknown
  Obtained from environmental sample
  misc_feature (1)..(552): n is a, c, g, or t
atggcgaaaaattctgttgtacaaatatttaagagttaccagcaaaaactgttaagctttatccgcggtcaggttaaccaaattgaggacgcggaagatattttacaggacgtattttatcagtttagccgcgcggatagtttgattaacccgatagaaaatatttccgggtggctttaccgcgccgcccgcaacagaataatcgaccatcgcagaaaaaagaaagacgagtctctgccttcgtcgtatgatgaagatgccgatgattatatttttgacgaaatatcggatatcatctacggcgaagaatcaacgcccgaaaccgaaatgcttcgctcgctggtttttgaagaaatacaaaccgctcttgcagaccttccgcaagaccagcgggaagtttttcagatgaccgaattaatgggattttccgtaaaagaaacagcggaaaaaaccaacacgcccgttaatactgttctttcacgaaaacattacgcggtgaaatttttgcgcaaaagactggaagagttgtacaacgatgttatgtggaagtga

SEQ ID NO: 33686 - protein, 183 aa, Unknown
  Obtained from environmental sample
  DOMAIN (1)...(175): ECF sigma factor
  misc_feature (1)..(183): Xaa is any amino acid
MAKNSVVQIFKSYQQKLLSFIRGQVNQIEDAEDILQDVFYQFSRADSLINPIENISGWLYRAARNRIIDHRRKKKDESLPSSYDEDADDYIFDEISDIIYGEESTPETEMLRSLVFEEIQTALADLPQDQREVFQMTELMGFSVKETAEKTNTPVNTVLSRKHYAVKFLRKRLEELYNDVMWK

SEQ ID NO: 33687 - DNA, 342 bp, Unknown
  Obtained from environmental sample
  misc_feature (1)..(342): n is a, c, g, or t
gtgtttatcgggcggagcgttggcaatgatcatcatcggactgataaaaaacaaaaaggcggcgaaccttgccgtaatgctcattgtcatgccgcagatgttttgtcgggagcgataatccctatcaacaattcatcgggcgcattgctgattntgaaccgaataatgccgatgacatactgcctagaccttgttagggcggtagtctacaggggcaatcccgagtatgatagtgtagtaatgtttaatccgttggtcaattttggcgcaattattttgttgacgataatttgccttgtgcttggcacttacttcttcgcgcggagtgaaaaagacaggtaa

SEQ ID NO: 33688 - protein, 113 aa, Unknown
  Obtained from environmental sample
  misc_feature (1)..(113): Xaa is any amino acid
MFIGRSVGNDHHRTDKKQKGGEPCRNAHCHAADVLSGAIIPINNSSGALLIXNRIMPMTYCLDLVRAVVYRGNPEYDSVVMFNPLVNFGAIILLTIICLVLGTYFFARSEKDR

SEQ ID NO: 33689 - DNA, 594 bp, Unknown
  Obtained from environmental sample
  misc_feature (1)..(594): n is a, c, g, or t
atgagcgagattgaattaaagcggaaaaaatcacggctgtttagagaattaaacaccgttctgacagttatgtcccgagaaataacgatatttttcaggtctcccgccacggcaattatgagtcttgcgatgccgattgttttaatgggcatgataggcggcaaccttatgcagaacatggcaggcggactcggtttccaattcggtcaatttatgctggttggaatgttagtcaacatgctttttatgatgaccacaatgggcatgacatctcttatagacgatcacgacatcgactttaatcaggaaatgctggtttcgcccgtttcgcgtcattcaatagtaatcggcaaaatactcggctgcggtttttccgcaatcatgagcatggcggggacgcttattgtctcgcttgtaatgggcatcacgctccctgtcggcaaactgctgttaattctcgccctgtcgccgctgatgtgtttatcgggcggagcgttggcaatgatcatcatcggactgataaaaaacaaaaaggcggcgaaccttgccgtaatgctcattgtcatgccgcagatgttttgtcgggagcgataa

SEQ ID NO: 33690 - protein, 197 aa, Unknown
  Obtained from environmental sample
  misc_feature (1)..(197): Xaa is any amino acid
MSEIELKRKKSRLFRELNTVLTVMSREITIFFRSPATAIMSLAMPIVLMGMIGGNLMQNMAGGLGFQFGQFMLVGMLVNMLFMMTTMGMTSLIDDHDIDFNQEMLVSPVSRHSIVIGKILGCGFSAIMSMAGTLIVSLVMGITLPVGKLLLILALSPLMCLSGGALAMIIIGLIKNKKAANLAVMLIVMPQMFCRER

SEQ ID NO: 33691 - DNA, 828 bp, Unknown
  Obtained from environmental sample
  misc_feature (1)..(828): n is a, c, g, or t
ttgaaaaaggcgcacctgactgggatcaggatcagaaagaaaacgtattttcctgtggatattgacacatcgccgatggacaattccaaaacgaaaaaggaaggggtcagttatacctataaaaagtntgagggataccatccaatctttgcctacatagggaaagaagggtacatgatagacaatgagctgcgccccggttcacagcattgtcaggagggaacgcctgagttcataaggctgttattgggaaggcttccggataatctgagcggcctgcctttgttatttcgtttagacagcggaaatgacagtatagatacgataaaagcactatttaacgatacgaacgtaaagaatcgatttctgatactcaagcggaataaccgaagagaaaatggggagaactggcttacgtacgcgcaagagcacggtaaagggaaagaggtgaaagccggtaagaagatctggaccggacatgcgtatgacattaatcctgacggctataataagattcattgtgtatatgagataacagaacgaaccatagatgaatatgggaatccgctgcttatccacgacatagaggtaaacacatggtggacaaatttgtcgtatgcggtagaaacaataatagggctatatcacgaccatggaaccagtgagcacaacaatcatagcgagctgaagcatgatatggatattgaacgtctgccgtccggaaaattcaatgtaaacgaattgtacctgatgatagggatgaacgcatataatgtattgcggtttatagggcagagcgccaaagctatgaaaacagcatgcccataa

SEQ ID NO: 33692 - protein, 275 aa, Unknown
  Obtained from environmental sample
  DOMAIN (18)...(259): Transposase DDE domain
  misc_feature (1)..(275): Xaa is any amino acid
MKKAHLTGIRIRKKTYFPVDIDTSPMDNSKTKKEGVSYTYKKXEGYHPIFAYIGKEGYMIDNELRPGSQHCQEGTPEFIRLLLGRLPDNLSGLPLLFRLDSGNDSIDTIKALFNDTNVKNRFLILKRNNRRENGENWLTYAQEHGKGKEVKAGKKIWTGHAYDINPDGYNKIHCVYEITERTIDEYGNPLLIHDIEVNTWWTNLSYAVETIIGLYHDHGTSEHNNHSELKHDMDIERLPSGKFNVNELYLMIGMNAYNVLRFIGQSAKAMKTACP

SEQ ID NO: 33693 - DNA, 405 bp, Unknown
  Obtained from environmental sample
  misc_feature (1)..(405): n is a, c, g, or t
atggttttgccagcaatgatttacaaaatacataaggcaaaatgcgaaggggcagatgttttggaactgtggggaactggcgagcctttgcgtgagtttttgtggagcgaagatatggcagatgcctgtgtttattgcttggaaaacataaattacgcagatgtcaaaagccatataaatataggaacgggaaaagaaataagcatagcaaatttggcggcactcgtggcaaaaacaataggctacaatggcaaaattatttttgacagctcaaaacccaatggcacaatgcgaaaactctgcgatgttagcaaaattcaatctatgggctggcgacacaaaattgagattgaagaaggcgttgaaaaattgtacgaatggtatttaaagaatgaacgaagatag

SEQ ID NO: 33694 - protein, 134 aa, Unknown
  Obtained from environmental sample
  misc_feature (1)..(134): Xaa is any amino acid
MVLPAMIYKIHKAKCEGADVLELWGTGEPLREFLWSEDMADACVYCLENINYADVKSHINIGTGKEISIANLAALVAKTIGYNGKIIFDSSKPNGTMRKLCDVSKIQSMGWRHKIEIEEGVEKLYEWYLKNERR

SEQ ID NO: 33695 - DNA, 468 bp, Unknown
  Obtained from environmental sample
  misc_feature (1)..(468): n is a, c, g, or t
gtgggcatgagggacttaaaagattatatcacctcagcaaaggacggagttgcccctaaccccggctctccttttaacattaaagaagattccgcggtactatctaacttctcacaggcggatgttgaaaaactttttgtccagcgggcggaagaaacaggacaggctatagaccgtgtcgctcttgaatatgtatgggaacaattccgagggcagccctggattgtcaattcattgttcaaacgcgctactatgcgcgtgttacagaatgatgattacagcacggtaacgttggcgcatatcaaagaagcgcgggaacagatgatacttgcccgtgagactcatctggacgcgctggcttccgcctatcttgtaatttttgaccgccgccccgaaaccaaagggaaatcatgggaagaacggctttcatggggagttgaaaacggtatcactttgattggatgttga

SEQ ID NO: 33696 - protein, 155 aa, Unknown
  Obtained from environmental sample
  misc_feature (1)..(155): Xaa is any amino acid
MGMRDLKDYITSAKDGVAPNPGSPFNIKEDSAVLSNFSQADVEKLFVQRAEETGQAIDRVALEYVWEQFRGQPWIVNSLFKRATMRVLQNDDYSTVTLAHIKEAREQMILARETHLDALASAYLVIFDRRPETKGKSWEERLSWGVENGITLIGC

SEQ ID NO: 33697 - DNA, 780 bp, Unknown
  Obtained from environmental sample
  misc_feature (1)..(780): n is a, c, g, or t
atggttgccgccgcctgcgaagcgcacgaaatccatgagtggaaagacgttgacggaatcctgaccgccgacccgcgtattgtaaaaaacgcgaagccggttcaaaacgtaacttacgaagaagcgtccgagcttgcgtattacggcgcgcaggtgctccatccaagagcgatgcagccctgcatgaaaacgggaacgccggtgcttgtaaaaaattcctacaatgtggaagcgccgggcacgcggattgaacacgcgcaggccgccacagcgaaaaacaggccggtacgcgcgattacttcacgcagaaatataactcttgttgatgttgtatcgacaaggatgctggggcagtacggattcctggcggaagttttttcaatcttcgcaaggaacaatatttccatagacatggtagccacaagcgaagtttcggtttcgcttactctggacaccaactatgatcttaccgaagtaaaaaaggaattgagcaagatcgcgcaagtggaagttaaaaccgggaaggcgattgtttcgatcatagggaatgtcaggcgctcttcggagattttagtcagagcgttcagaatatgccagttcataggagttaccgtgcagatgatttcacagggcgcaagtaaagtgaacataagttttattgtgaacgatactgaggcggcggaagttgtcaaagcccttcatttggatttctttgaagaggcggagaaaccggcggaaaaatccgcggagaaaacctcggtaataccggcggcaaaataa

SEQ ID NO: 33698 - protein, 259 aa, Unknown
  Obtained from environmental sample
  DOMAIN (176)...(243): ACT domain
  misc_feature (1)..(259): Xaa is any amino acid
MVAAACEAHEIHEWKDVDGILTADPRIVKNAKPVQNVTYEEASELAYYGAQVLHPRAMQPCMKTGTPVLVKNSYNVEAPGTRIEHAQAATAKNRPVRAITSRRNITLVDVVSTRMLGQYGFLAEVFSIFARNNISIDMVATSEVSVSLTLDTNYDLTEVKKELSKIAQVEVKTGKAIVSIIGNVRRSSEILVRAFRICQFIGVTVQMISQGASKVNISFIVNDTEAAEVVKALHLDFFEEAEKPAEKSAEKTSVIPAAK

SEQ ID NO: 33699 - DNA, 669 bp, Unknown
  Obtained from environmental sample
  misc_feature (1)..(669): n is a, c, g, or t
ttgatcgcgagcgggaacagtcgtggcggcggcaagcggctgctttttggcgaggtcggcattgattttatcgccggccccaccgacgtgctgataattgccgatggcgccattcccaacccggcggaactcgcggcggcggacatgatcgcccaggcggagcatgatcccgatgcctgtgcgcgggcgctggtttccggccaaacgctggcagatcaactaaccgccgcccttgagcggcggcttgcgcttctgcccgaacctgcaaccgcccgcgcttcgcttgacaagaacggtttaatcatcgtgtatcgcaatgaagaagaggcggtacgcattgccaatgttatcgcgccggaacatctggaacttcagattggtaatcccgaagcgttaattccttttttgaaaaattacggttcgctgtttatcggcggcctttgtgcggaagttttgggcgactattcggcgggaataaaccacaccctgccgacatcggcaagcgcccgcttcaccggcggcctttctgtgcggcattttctcaaaacggtaacaaccctgcgttgcgcttccggcgagggttttgagcgggcgcgccgcgcggcggaaattctggcccgcgcggaagggttggaaggccacgcggcaagcgcggcggcgcgtgggtag

SEQ ID NO: 33700 - protein, 222 aa, Unknown
  Obtained from environmental sample
  DOMAIN (2)...(221): Histidinol dehydrogenase
  misc_feature (1)..(222): Xaa is any amino acid
MIASGNSRGGGKRLLFGEVGIDFIAGPTDVLIIADGAIPNPAELAAADMIAQAEHDPDACARALVSGQTLADQLTAALERRLALLPEPATARASLDKNGLIIVYRNEEEAVRIANVIAPEHLELQIGNPEALIPFLKNYGSLFIGGLCAEVLGDYSAGINHTLPTSASARFTGGLSVRHFLKTVTTLRCASGEGFERARRAAEILARAEGLEGHAASAAARG

SEQ ID NO: 33701 - DNA, 411 bp, Unknown
  Obtained from environmental sample
  misc_feature (1)..(411): n is a, c, g, or t
ttgcgttttggttttgctatcggtaatgaaaaactgattgaaggcctgtgccgcatacgcgattcgtttaattcctacaccattgaccttcttgccctgtcaggcgcggcggcagcagtttccgacaaactgtattacgatgaaattaaccgccgtgttattgccacacgggaacggacggcggaggttttgcgcggtcttgggtttaccgttttgccgtcgtcggctaacttcctttttgtaaaacctcccaataaaagcggcgcggaattttttgccgcgttacgcaatcggggtattctggtgcggcatttcaataaaaaccgaattgccgattttctgcggatcagtatcggtacagacgcggacatggataaagttcttgaagcgtgccgggaaatattaggatag

SEQ ID NO: 33702 - protein, 136 aa, Unknown
  Obtained from environmental sample
  misc_feature (1)..(136): Xaa is any amino acid
MRFGFAIGNEKLIEGLCRIRDSFNSYTIDLLALSGAAAAVSDKLYYDEINRRVIATRERTAEVLRGLGFTVLPSSANFLFVKPPNKSGAEFFAALRNRGILVRHFNKNRIADFLRISIGTDADMDKVLEACREILG

SEQ ID NO: 33703 - DNA, 432 bp, Unknown
  Obtained from environmental sample
  misc_feature (1)..(432): n is a, c, g, or t
atgaagattattcatagcaaagaatttgattcatattggaaaaacgcaacaaaacgctctgaggataccaaaacagaaaaatctgtcaaaaagataatcacggaagtacgcgcaaaaggggacgctgcggtcaaaaagttcgcgtccaaattcgacaaatcttccccgcagcaacttgaagttcccctttccgaagcgcaacgcgcccttgaacagttacgcgcaaacgatgccgctctggtgggtgcgcttgagcttgcggcaaggcacataaaatgctttgcggaaaaacaaaaagaacaatttgcccattttgaatttgaaatggaaccggggctggttaccggccaacgggtaatccccgttaccagagcggcatttacgttcccggcggacggttccccctgttttcttcggtgcttatgtgcatga

SEQ ID NO: 33704 - protein, 143 aa, Unknown
  Obtained from environmental sample
  misc_feature (1)..(143): Xaa is any amino acid
MKIIHSKEFDSYWKNATKRSEDTKTEKSVKKIITEVRAKGDAAVKKFASKFDKSSPQQLEVPLSEAQRALEQLRANDAALVGALELAARHIKCFAEKQKEQFAHFEFEMEPGLVTGQRVIPVTRAAFTFPADGSPCFLRCLCA

SEQ ID NO: 33705 - DNA, 591 bp, Unknown
  Obtained from environmental sample
  misc_feature (1)..(591): n is a, c, g, or t
gtgatttccataatcatacttagctttatggcaggttttgcctttgccaaacttccatcgaaaataacgcctatccttcatagcagttttattgtaggaatactcataacccttcaatgtattatgattcctctttttatcttaatcaggggaatagggttgattgatacgaggctgggggtactcatcccctatattggtattgggcttccaatggcagtttatcttgctaccgaatacataaaagccatacctactgaggtagttgaatccgcccgtattgacggtgccaaatatttgcgtattttcagaattataattatgccaatggcagcgccggtagctactaccgtcgcgatcctaaacattaccggaacctggaacgagttcatgctgattaatatcctggttgcttccgacaacctcaaatctatacctgttggaatgaggcaatttgccggctctttggccacggattacggcaagcagtttgccgccctggtaatcggtatgatgccgatgatcatcttttatgtcattttcagaaaacagataacgaagggtgtttccgctggggcagttaaaggttga

SEQ ID NO: 33706 - protein, 196 aa, Unknown
  Obtained from environmental sample
  SIGNAL (1)...(16)
  DOMAIN (1)...(191): Binding-protein-dependent transport system inner membrane component
  misc_feature (1)..(196): Xaa is any amino acid
MISIIILSFMAGFAFAKLPSKITPILHSSFIVGILITLQCIMIPLFILIRGIGLIDTRLGVLIPYIGIGLPMAVYLATEYIKAIPTEVVESARIDGAKYLRIFRIIIMPMAAPVATTVAILNITGTWNEFMLINILVASDNLKSIPVGMRQFAGSLATDYGKQFAALVIGMMPMIIFYVIFRKQITKGVSAGAVKG

SEQ ID NO: 33707 - DNA, 954 bp, Unknown
  Obtained from environmental sample
  misc_feature (1)..(954): n is a, c, g, or t
atgaaaaanattgtttttatcgcattggcccttttgatctgctgcggcacgcttttttttgctggctgtaaaaaggatgattcccgaaaaatcaagctgacggtattgaattatacggacttaaccgtagccaatgcagcaaaggatcagaaatggcagtgggatacttttttaggtgcaaacaaggacattgtcctcgaaaaggaagatctttttaacgaacctttccacgagaagactgcggcttatgccgcatcgggaaatattcctgacgtgttgtttgtctggccagccggacgctcaacacctctgcacgagaaaagactgttgaaagacctgatgcccttaatccggaaggacaatctggcagataaatatctgccggtggcgctggatcccaatatgcaggcttcgcgttatgtcgcaatgattccccaggctctcaccgccactcacgcgatgtttgtaaacctgaatgtgcttagggactgtgggcttcagcccgcgacgacttatgcggaattaaaatctcaggtgccggtgttgaaggccaaaggctatgacactctgatcatgccatgcaaggatacatgggttatgcagagctgtatgttttccatgatagccggacgtttttgcggtcaaggctgggatcagaagatcctttccggtcaggcgaaatttaccgacccggattttgtggctgctcttgactttatcaggcagctatatgctgatggtgttcttccccagtcctgcctgggcatagactacggcgaaggccccggattgtttgctaccaataaatgcgcctactacatagacggtgactggagagtaggagattttcttgaagatgaagatacaggccaggcgctgtttagcgctacccagcaaagaaacatccggatcactgttttcccgacatcgccggcgcgaagctcggccatctga

SEQ ID NO: 33708 - protein, 317 aa, Unknown
  Obtained from environmental sample
  SIGNAL (1)...(21)
  misc_feature (1)..(317): Xaa is any amino acid
MKXIVFIALALLICCGTLFFAGCKKDDSRKIKLTVLNYTDLTVANAAKDQKWQWDTFLGANKDIVLEKEDLFNEPFHEKTAAYAASGNIPDVLFVWPAGRSTPLHEKRLLKDLMPLIRKDNLADKYLPVALDPNMQASRYVAMIPQALTATHAMFVNLNVLRDCGLQPATTYAELKSQVPVLKAKGYDTLIMPCKDTWVMQSCMFSMIAGRFCGQGWDQKILSGQAKFTDPDFVAALDFIRQLYADGVLPQSCLGIDYGEGPGLFATNKCAYYIDGDWRVGDFLEDEDTGQALFSATQQRNIRITVFPTSPARSSAI

SEQ ID NO: 33709 - DNA, 909 bp, Unknown
  Obtained from environmental sample
  misc_feature (1)..(909): n is a, c, g, or t
atgtctaggattatcgtaaaaaacgctaccacaagtaatgaacttctctggcgaaatattaaaatcaaaaagtcattagatgacatttgccatactttggaattggaaattccggcaagtgaacggactaaagtacacaaacatgaacggattgaagtgcggtatgagaattcatttgttcgcgattcgggaggtaagaggctggttaccagcgtattggttgacgaaataaccgccagtgcggatgtcacaaaacatagcgtcatggttataggccgcagtccggcgcgtgatataattgattcaacatggtcaggcttgttaataaatatgacactttatgaagttacaaaaaacatagccgataaattcaacattaccactaccaatatccccacgaaccggggcgatcctactgataaagtaacggttttttcatgggaaaatgaaagcccctggacaaaactaattactgaagcagatagtcagggatttattcttaccgcgaatgaggccgggggactttacatttggcagcctgaaggcacggtacgggatagagaaaagtttcacctcaccgaggggctgaacgtaaaagccattgagtggaaagaaaatggagccgaacagtttcacgaatatattgtaagagcagcaggccgggaagtcagcgtgatagataatacttgtagaaacaatcgtactctgactattgatcttacaaatcctataatagaaccggaaaaactccagcgccgggcagacacggaaatgcgccgcagaagagaaaatcgtacatctgtaactgtttccggttggggtctgacggatacgcaaatcaaaaaacttgggcgcggttacttccgggaaagaaattttttgggtgccgaatttactaatccctattag

SEQ ID NO: 33710 - protein, 302 aa, Unknown
  Obtained from environmental sample
  DOMAIN (12)...(301): Bacteriophage Mu P protein
  misc_feature (1)..(302): Xaa is any amino acid
MSRIIVKNATTSNELLWRNIKIKKSLDDICHTLELEIPASERTKVHKHERIEVRYENSFVRDSGGKRLVTSVLVDEITASADVTKHSVMVIGRSPARDIIDSTWSGLLINMTLYEVTKNIADKFNITTTNIPTNRGDPTDKVTVFSWENESPWTKLITEADSQGFILTANEAGGLYIWQPEGTVRDREKFHLTEGLNVKAIEWKENGAEQFHEYIVRAAGREVSVIDNTCRNNRTLTIDLTNPIIEPEKLQRRADTEMRRRRENRTSVTVSGWGLTDTQIKKLGRGYFRERNFLGAEFTNPY

SEQ ID NO: 33711 - DNA, 327 bp, Unknown
  Obtained from environmental sample
  misc_feature (1)..(327): n is a, c, g, or t
gtgagtgtgggtatagaacgatgggcagatattaaagaacttgtcagcatgagcatcggcacgaataaaggaacatggccgaatgatcctaatttnggaagtgaactttggcttttgaaaaaagacggaaaggtagacggccagacggcgggaactgtagagcggatggtcagggaatctttgcaatggcttatagctgacaaactggccgcagaaattaactgtaaagcggaacgaaacggcaagcatcggattgattatcaggtgactataatccggccagacggctcaacagtaacagttgaggaggtgtggagtgtcatttaa

SEQ ID NO: 33712 - protein, 108 aa, Unknown
  Obtained from environmental sample
  DOMAIN (9)...(105): Phage protein GP46
  misc_feature (1)..(108): Xaa is any amino acid
MSVGIERWADIKELVSMSIGTNKGTWPNDPNXGSELWLLKKDGKVDGQTAGTVERMVRESLQWLIADKLAAEINCKAERNGKHRIDYQVTIIRPDGSTVTVEEVWSVI

SEQ ID NO: 33713 - DNA, 1002 bp, Unknown
  Obtained from environmental sample
  misc_feature (1)..(1002): n is a, c, g, or t
atgaatataataaaagttgataatcttgttaaaacttatattacttttaagcgcggaagcggcataagggaatctttacagagtttctttaagcgggaaaaggtaattattaacgcagttgacaacatatcgtttgccgttgagaaaggttctatctgcggcgtactcggcccaaacggcgcggggaagtccacggcgataaaaatgctctgcggcgcgctgtatcccacttcgggaaaaattgatgttatgggatattcgcccagcaaggagcggaaaaggtatgtgcgtgaaatcggagccgtattcgggcagcgctcccagttaatctgggatattccgccaattgacagttttaacatgaaccgcgccatttacgggataacgcaaacggattacaaaacgcgccttgatgaactggccgaaatgtttgagcttgaagaagttatgcataaaccgacaagggtgctgtcgctgggcgagcgcatgaagtgcgagtttataatggcaatgctccacagaccgaaaatcgtctttttggacgagcctacaatcgggcttgacgttatcgcaaaggcgaaaatccgcgagttcattctgaagattaacaagacaggcacgactttcatccttacgactcacgatctggaagacgtgaaacagcttgccgataaggtgattgtaattaaccacggggttaaggtgttcgatgacaccttgcagaaattgcaattaagccttggcgagaagaaaattgtagagctgacgctggatcatccctttgatattggcgcggagcttccggacagcgtaagggtgcttgaacaaaaatccccgctggaattgaccctggagcttgacgcttcaaagatcgcaatcggcgactttattaaatttctttcaagcagggtcgcgttatccgatatagcggtaaaggaactgcccatggaagagataattacgcagatatataactcgccctttcgggatcttaccttgtaa

SEQ ID NO: 33714 - protein, 333 aa, Unknown
  Obtained from environmental sample
  DOMAIN (50)...(232): ABC transporter
  misc_feature (1)..(333): Xaa is any amino acid
MNIIKVDNLVKTYITFKRGSGIRESLQSFFKREKVIINAVDNISFAVEKGSICGVLGPNGAGKSTAIKMLCGALYPTSGKIDVMGYSPSKERKRYVREIGAVFGQRSQLIWDIPPIDSFNMNRAIYGITQTDYKTRLDELAEMFELEEVMHKPTRVLSLGERMKCEFIMAMLHRPKIVFLDEPTIGLDVIAKAKIREFILKINKTGTTFILTTHDLEDVKQLADKVIVINHGVKVFDDTLQKLQLSLGEKKIVELTLDHPFDIGAELPDSVRVLEQKSPLELTLELDASKIAIGDFIKFLSSRVALSDIAVKELPMEEIITQIYNSPFRDLTL

SEQ ID NO: 33715 - DNA, 732 bp, Unknown
  Obtained from environmental sample
  misc_feature (1)..(732): n is a, c, g, or t
atgttcaacgcacaaaaagttaaaaacgacattgtcgattggatacgcgcctttttcaacgaatacggcccggactgcaacgccgtggtcgggatcagcggcggcatggacagctccgtcaccgcaacgctctgcgccgaggccctcgaagcggacagggtcgtgggcgtcttgatgccgcgcggggagcagtacgatatcgacttctctcacgccgtcgttgatcacctgaaaatcaagagctacacggtcaacataaaggaggcggttgacgcgcttttcgcgtctatcaacgcgggcggtttgacgcctagccgccaggcgctcgtgaatacccccgcgcgcatcaggatggccgtcctctacgccgtggcggccacggtcaacgggcgggtggccaatacgtgcaacctgagcgaggattgggtgggctactccacaaagttcggcgacagcgccggagacttctcgccgcttgcccacatcaccgtgacggaggtcagggccctggggcgcgccttgtcgctgccgccgaagatcatcgaaaaggtcccggaggacggcctctccggaaagtcggacgaggataatctggggttcacctacgcggtcttggacaaatacatccgcgagggggtctgcgaggacgcggcgatcaaggagcggatcgacacgctccacaaggccaatctgcacaaattgcgcttcatgccttgttttgagctgcgttga

SEQ ID NO: 33716 - protein, 243 aa, Unknown
  Obtained from environmental sample
  DOMAIN (7)...(238): NAD synthase
  misc_feature (1)..(243): Xaa is any amino acid
MFNAQKVKNDIVDWIRAFFNEYGPDCNAVVGISGGMDSSVTATLCAEALEADRVVGVLMPRGEQYDIDFSHAVVDHLKIKSYTVNIKEAVDALFASINAGGLTPSRQALVNTPARIRMAVLYAVAATVNGRVANTCNLSEDWVGYSTKFGDSAGDFSPLAHITVTEVRALGRALSLPPKIIEKVPEDGLSGKSDEDNLGFTYAVLDKYIREGVCEDAAIKERIDTLHKANLHKLRFMPCFELR

SEQ ID NO: 33717 - DNA, 936 bp, Unknown
  Obtained from environmental sample
  misc_feature (1)..(936): n is a, c, g, or t
gtgagaataatgtattttatgaaacgacatgataaatattcattaacgctggaaggcaaaaacgcggttaccggatatttatttttactgccctttattatcggttttctcgcgtttatgtttttcccgattattgaatcgcttagaatggtgttcagcaatgttaaaattgacaccgagaagcatgggttcgcgatggaatatatcggaatagaaaatataaggcgcgttgtcgcggtagacgccgaatttaacaggtttgttaccgaggaaatcggacgtatgctgttgatagttccggcgattattattttcagtttgtttgtcgctcttatcctgaatcaggagtttaaggctagaggctttgtgcgcgcaatcttctttttgcccgtaattctttcttccggtattatgattgggcttgagacaaacaattcactgttaaacagcatgtccgaaattattaaagaaggaaacctgatgaaatcgtcggttaccggcgtattggaaaatattctggttaccgaaggagcggcaagcgattttatgggatatattttccaaataattaatcaaatttataatatcgcgatggcttccggcattcaaataattattttcctttccgcccttcagactattccgccgagtatgtttgaagccgcaaaaatagaaggagctacaagctgggaatgtttctggaaaattacctttcccatggtaagttccctgatacttgtaaatattgtttacagcgtagttgactattttctgcggacggataaccgtgtaatgaaaaaaataaatgtagcaatgattgagcgaatgcaattcggatttgggaccgctatggcatggatttattttctttccgttatgttaattatcggaattgcaatatcattgatttccaggaaggtatactattatgaataa

SEQ ID NO: 33718 - protein, 311 aa, Unknown
  Obtained from environmental sample
  misc_feature (1)..(311): Xaa is any amino acid
MRIMYFMKRHDKYSLTLEGKNAVTGYLFLLPFIIGFLAFMFFPIIESLRMVFSNVKIDTEKHGFAMEYIGIENIRRVVAVDAEFNRFVTEEIGRMLLIVPAIIIFSLFVALILNQEFKARGFVRAIFFLPVILSSGIMIGLETNNSLLNSMSEIIKEGNLMKSSVTGVLENILVTEGAASDFMGYIFQIINQIYNIAMASGIQIIIFLSALQTIPPSMFEAAKIEGATSWECFWKITFPMVSSLILVNIVYSVVDYFLRTDNRVMKKINVAMIERMQFGFGTAMAWIYFLSVMLIIGIAISLISRKVYYYE

SEQ ID NO: 33719 - DNA, 462 bp, Unknown
  Obtained from environmental sample
  misc_feature (1)..(462): n is a, c, g, or t
atgattatgaagnatcaggcgtttggcataacggatacctcagtcccgttcctgcctattgttttgcacggcatagtgccgtataccggaagggcgataaaccttgcggaagattacacaaagaatttattaaaatcgattgaatgcggggcaggcctttactttagtttcatgaaagaagatacctcagaattacaggaaacaaagttcaggcaattttacgcgaatgagtatgataaatgggcgggggacgcaaacgcgttatacaaaagatttacggacgattttgggaatttgtataaccagaagatagttaaccatgtgattttatcgcctgatgtaacaattacggaatacgaggacggaacaaaggtttttgtaaacgcgagcgactttgacgcaagttacaacggcatgaatatcgaagcggacagttataaaataatcgaaaagggaaggtga

SEQ ID NO: 33720 - protein, 153 aa, Unknown
  Obtained from environmental sample
  misc_feature (1)..(153): Xaa is any amino acid
MIMKXQAFGITDTSVPFLPIVLHGIVPYTGRAINLAEDYTKNLLKSIECGAGLYFSFMKEDTSELQETKFRQFYANEYDKWAGDANALYKRFTDDFGNLYNQKIVNHVILSPDVTITEYEDGTKVFVNASDFDASYNGMNIEADSYKIIEKGR

SEQ ID NO: 33721 - DNA, 1353 bp, Unknown
  Obtained from environmental sample
  misc_feature (1)..(1353): n is a, c, g, or t
atggttgagtttgcctcaggcgctcatggaattgttttcaaccttgaagaagaaaacgcaggctgcgttatcttaacaggcgaagacttagttaaagacggcgaagaagtaaaacgaaccggcagagttgtctctattccaacaggcgactccttctttggcagagtgataaatccgttaggtgaaccacttgacggcaaaggtcccataacagccgaagcgttcatgccgatggaggctcccgccgcgcctgtaatcgaccgtggaagcgtagacactccgcttcaaacaggatgcctctccatagacgcgatgatccccatcgggcgcggtcagcgtgagctgataatcggcgaccgccaaacgggaaaaaccgctatcgccattgatacgataattaaccaaaaagggaaaaatgttatttgcgtttattgcgccatcggtcagaaatcatcttcggtagtggcaatagtaaacaaccttgaaaaacacggcgcgatggactacacctttgtagtgcttgcgtccgcttccgattcggcggctcttcaatacatcgcgccctattcggcggtcgcaatggcggaacattttttacaacagggaaaagacgtgcttgtaatttacgatgatctttccaaacacgccgtcgcctaccgtgcaatcagcttgctcctgcgccgtcctcccggacgtgaagccttccccggcgacgtattctatcttcattcacggcttttggaacgtgcggcaaaactttcaaaggcaaagggcggcggctcaattaccgcaatgcccattgttgagacgcaggcgggcgacatttcgtcttacattcctaccaacgtaatttctataacggacgggcagatatttctcgattccgaattattcaattcaggtttccgacccgcgatagacgtagggctttcggtaagccgtgtcggaggttcggcccagacaaaggcaatgcggaaaatttcaggacgcataaggctcgaccttgcccagtaccgcgaaatggcggcttttgcgcagttcggcagcgatttggacaaggcaactcaggacaaactggcacagggcgaaagattaatggaggtgctgaaacagccgcagtattcgccgtataatatcgaagaacagatcgtcattctttttcttgcggtagaaggtttccttcttgatattaagactgaaaatgtttctgtttttgttaaagatttcttattgcatcttaaaagccagaaggcggatttattgaggagtattgcggaaacgggagttatttcagcgcaacaagaagacgaattgcgtttaacagtaaaaaccttcaaaggaactgtttcatga

SEQ ID NO: 33722 - protein, 450 aa, Unknown
  Obtained from environmental sample
  DOMAIN (325)...(429): ATP synthase alpha/beta chain, C terminal domain
  misc_feature (1)..(450): Xaa is any amino acid
MVEFASGAHGIVFNLEEENAGCVILTGEDLVKDGEEVKRTGRVVSIPTGDSFFGRVINPLGEPLDGKGPITAEAFMPMEAPAAPVIDRGSVDTPLQTGCLSIDAMIPIGRGQRELIIGDRQTGKTAIAIDTIINQKGKNVICVYCAIGQKSSSVVAIVNNLEKHGAMDYTFVVLASASDSAALQYIAPYSAVAMAEHFLQQGKDVLVIYDDLSKHAVAYRAISLLLRRPPGREAFPGDVFYLHSRLLERAAKLSKAKGGGSITAMPIVETQAGDISSYIPTNVISITDGQIFLDSELFNSGFRPAIDVGLSVSRVGGSAQTKAMRKISGRIRLDLAQYREMAAFAQFGSDLDKATQDKLAQGERLMEVLKQPQYSPYNIEEQIVILFLAVEGFLLDIKTENVSVFVKDFLLHLKSQKADLLRSIAETGVISAQQEDELRLTVKTFKGTVS

SEQ ID NO: 33723 - DNA, 603 bp, Unknown
  Obtained from environmental sample
  misc_feature (1)..(603): n is a, c, g, or t
atgatggattataaatacctgcaaaacatgtacgtccgctaccttcgcaactttcttgtgaaggacgaaatgaccgccaccgtgtacgataagttcatggcgctggcttacgcggtgcgcagcgagtttgtcgaccactggatcaacacgcagcgcggttacatcggtaaacgcaggatttacatgctctccatggagtacacgctaggcaagagcctctacaacaacatggtcaatctcggcatagaggaggtttttactgaggcggtcggttccttgggcatctccgtgaaggagcttttcgagagggacgacgagtttgatttgggcaacagcggcaaggctcgcacggcggcctgcgtcttggagtctatggctaccttggggctgccctctatggcttacgggctgcgctacgactacgggcagttccgccaagagataaggaacggcgtgcaggtggagttcccgaacgattggcttcacaaagggcacccgtgggagatcgtgaggccggagtacgagagcgtagttaagttttccggggagagctcgcccgtcgacccgaacaatccgcggggccgcacgttctcggccatctga

SEQ ID NO: 33724 - protein, 200 aa, Unknown
  Obtained from environmental sample
  misc_feature (1)..(200): Xaa is any amino acid
MMDYKYLQNMYVRYLRNFLVKDEMTATVYDKFMALAYAVRSEFVDHWINTQRGYIGKRRIYMLSMEYTLGKSLYNNMVNLGIEEVFTEAVGSLGISVKELFERDDEFDLGNSGKARTAACVLESMATLGLPSMAYGLRYDYGQFRQEIRNGVQVEFPNDWLHKGHPWEIVRPEYESVVKFSGESSPVDPNNPRGRTFSAI

SEQ ID NO: 33725 - DNA, 918 bp, Unknown
  Obtained from environmental sample
  misc_feature (1)..(918): n is a, c, g, or t
ttgggaaatgccgggattattgacgcgccaaccgataaccttattccgcaggacggcgaaaaggtttgcgggcatgaaaggttgaagccggttaaaatagtgacatcgcccaaaggcgaaacaatacttgattttgggcaaaatctgacggggaggctgtgtcttgaaataaacggaaaggccggcaatttttacactgaaaatttgcgttccgcaaaacagcgcatagaatatatctgcagggacggtttccaaacatataaaccgcattttacctttatgggtttccgttatatccgcttagaccaatacccgtacgaagtagacgcgaataacttcaccgcgatagcggcctattctgatatgaagcgaaccggatacttcaaatgcgcccacccaaagctgaataaactgtttgaaaatattatctgggggcaaaaaggaaacttccttgacattcccaccgattgcccccagcgcgacgagaggcttggctggacgggcgacgcgcaggtatttgtacgtacagcctcatataacttcgatgcgcaaaagttctttaaaaaatggctgcgtgatttggcggcggatcagtttccggacggaggggttccccacgttatcccgaatgtccttggcgatggcggcagaagcgcggcatggagcgacgcggcggtgatatgcccctggcagatatatttgagttacggggacaaggaaatactgaaagagcagtacggcagcatggtaaaatgggtggaatatatacgccgcacaggcgacaatgaatttttgtggaacagcggcgagcatttcggcgactggctggggcttgacgcagccgagggaagctataaaggttcaaccgacccttattttatcgccacggcattttacgcctattcaactctctgctga

SEQ ID NO: 33726 - protein, 305 aa, Unknown
  Obtained from environmental sample
  DOMAIN (33)...(304): Bacterial alpha-L-rhamnosidase
  misc_feature (1)..(305): Xaa is any amino acid
MGNAGIIDAPTDNLIPQDGEKVCGHERLKPVKIVTSPKGETILDFGQNLTGRLCLEINGKAGNFYTENLRSAKQRIEYICRDGFQTYKPHFTFMGFRYIRLDQYPYEVDANNFTAIAAYSDMKRTGYFKCAHPKLNKLFENIIWGQKGNFLDIPTDCPQRDERLGWTGDAQVFVRTASYNFDAQKFFKKWLRDLAADQFPDGGVPHVIPNVLGDGGRSAAWSDAAVICPWQIYLSYGDKEILKEQYGSMVKWVEYIRRTGDNEFLWNSGEHFGDWLGLDAAEGSYKGSTDPYFIATAFYAYSTLC

SEQ ID NO: 33727 - DNA, 747 bp, Unknown
  Obtained from environmental sample
  misc_feature (1)..(747): n is a, c, g, or t
ttgtggcggctgagagtgtcggcgagttcgcaatcgccaaccgttttgccgcaacacctcgcggtagccgtcgttgacctcaaagcggtgcctgtggcgctcgctgatctccccctcgccgtacagcctgctcaagagcgaccccggcgcgaccttgcagggatacgccccgaggcgcatcgtgccgccgcttcccatcttgcccgtctggccggacatgaaatctatcaccgggtgcggcgaaagctcgtcgaactcgctcgaattcgcgccgtcaagcccgcatacgcccctggcgtactctatgaccgcgacctgcatgccgagacagatgccgaggtacggtatatcgttctccctcgcatagcggcaggcggcgatctttccctctatgcccctgtcgccgaaaccgccggggattatcatcccgtccaccacgctcaacgcgtcagccacattttggccgatcaggttctcgctgtctatccagtgaatgtgcacgttcgcggcggtttcaaacccggcgtggttcaagctctctattatggagaggtacgcgtcccgcagctttatatacttgccgacgatagcgatattcaccgccctctcccgcgaaccgatcctgtccgccatcgactgccactccgccaaatccggctcgggaacgtcaagcgaaagcccccggcacacaacgccgtcaagcccgttcctgtggagcatcagcggcgcctcgtagagcgtagataa

SEQ ID NO: 33728 - protein, 248 aa, Unknown
  Obtained from environmental sample
  misc_feature (1)..(248): Xaa is any amino acid
MWRLRVSASSQSPTVLPQHLAVAVVDLKAVPVALADLPLAVQPAQERPRRDLAGIRPEAHRAAASHLARLAGHEIYHRVRRKLVELARIRAVKPAYAPGVLYDRDLHAETDAEVRYIVLPRIAAGGDLSLYAPVAETAGDYHPVHHAQRVSHILADQVLAVYPVNVHVRGGFKPGVVQALYYGEVRVPQLYILADDSDIHRPLPRTDPVRHRLPLRQIRLGNVKRKPPAHNAVKPVPVEHQRRLVERR

SEQ ID NO: 33729 - DNA, 453 bp, Unknown
  Obtained from environmental sample
  misc_feature (1)..(453): n is a, c, g, or t
gtgtatgaacaagcagttctggcgcgggttttcgagcgaaatttggcgtatcgcctccaaaaacggctggctctcgatgtcgcccgtcgtcccgccgatctcggtaatcagcacgtcggcgccggtgcccttggcgcccgcgtagatgaactccttgataacctccgtgacgtgcggaataacctgcacggtgccgcccagataaccgccggcgcgctcgcgttcaagcaccttccagtagaccttgccggaggtgaggttcgagaacttcgtcaggttttcgtctatgaagcgctcgtagtggccgaggtcgaggtcggtctcggcgccgtcgtcggtgacaaagacctcgccgtgctggaacgggctcatcgttccggggtcgatgttcatgtacgggtcaagcttttgggccgctactttcagcccgcgctgtttgaggagacggcctaa

SEQ ID NO: 33730 - protein, 150 aa, Unknown
  Obtained from environmental sample
  misc_feature (1)..(150): Xaa is any amino acid
MYEQAVLARVFERNLAYRLQKRLALDVARRPADLGNQHVGAGALGARVDELLDNLRDVRNNLHGAAQITAGALAFKHLPVDLAGGEVRELRQVFVYEALVVAEVEVGLGAVVGDKDLAVLERAHRSGVDVHVRVKLLGRYFQPALFEETA

SEQ ID NO: 33731 - DNA, 1011 bp, Unknown
  Obtained from environmental sample
  misc_feature (1)..(1011): n is a, c, g, or t
atgattgttattatcaagaaagacgcaaatgaaaagagtttggaaaatctgatctcatggcttgagaatcagggactgcgtgtaaatgtaaacaagggcgtttatcaaacggtactgggactgataggagacacgcacagcctcaacgcggaacttgtcagcgctatggatattgtagagcgcgttcaacggatcagcgagccgtacaaaaacgccaaccgcaagtttcattcggacgataccgtgattgacatggacgggtataaaatcggaggcggacattttcagtttatagccggtccctgttccgtggaatcggaagaacagatctgcagtattgcgtggcatgtcaaagaagcaggggcaaatcttttacgcggcggtgcgttcaagccacggacttctccctattcgtttcaggggcttagggacgaaggcatagagtttttattaaaagcaaaagaactcaacggaatgcctgtggtcagcgagataatgaacgccaaccatctgcctatgtttgagcaggttgacatcattcaagtcggcgcgcgcaatatgcagaactttgaacttttaaaagaattgggagcgacaaaaaaaccaattctgttaaagcgcgggcttgcaaatactcttgaagaacttttaatgagcgcggaatatatcatgtccggcggaaacgagcatatcattttatgcgagcgcggtatccgcacatttgaaaccgcgactcgcaacactcttgatatttcagccataccgatgcttaaacggttgactcatcttccggtaatcatcgacccaagccacgcggcgggagacgcggctcttgtgtatccgctttccatggcggcggcggcggcgggcgcggacggattaattattgaagtgcacaacgaccccgcccacgcgttatgtgacggaccgcagtcgatcacgccggacgctttcgcctctttggcgggtgatgttaagaaagttttagaaattgtaaacaagaagaaataa

SEQ ID NO: 33732 - protein, 336 aa, Unknown
  Obtained from environmental sample
  DOMAIN (113)...(334): NeuB family
  misc_feature (1)..(336): Xaa is any amino acid
MIVIIKKDANEKSLENLISWLENQGLRVNVNKGVYQTVLGLIGDTHSLNAELVSAMDIVERVQRISEPYKNANRKFHSDDTVIDMDGYKIGGGHFQFIAGPCSVESEEQICSIAWHVKEAGANLLRGGAFKPRTSPYSFQGLRDEGIEFLLKAKELNGMPVVSEIMNANHLPMFEQVDIIQVGARNMQNFELLKELGATKKPILLKRGLANTLEELLMSAEYIMSGGNEHIILCERGIRTFETATRNTLDISAIPMLKRLTHLPVIIDPSHAAGDAALVYPLSMAAAAAGADGLIIEVHNDPAHALCDGPQSITPDAFASLAGDVKKVLEIVNKKK

SEQ ID NO: 33733 - DNA, 315 bp, Unknown
  Obtained from environmental sample
  misc_feature (1)..(315): n is a, c, g, or t
atggatattgataaactgaatcaggaagtagacggtattgacgaccaaatactgaagctgtttgaacaacgcatggaactttcgcaaaaaatagggcaaggcaaggaagagctttcactgcccgccatggatacggaacgcgagcgtaaaattttataccgtctttgcgaaaaagcgaagccggaactttcaggctatgtcaaagttttattctcgtctttgtttgagattggcagaagccatcaaaaaacgctcagcagtcactacgattcgtccgtaataaaactgcttaatgacgcggtgcgcaaaaactga

SEQ ID NO: 33734 - protein, 104 aa, Unknown
  Obtained from environmental sample
  DOMAIN (8)...(85): Chorismate mutase type II
  misc_feature (1)..(104): Xaa is any amino acid
MDIDKLNQEVDGIDDQILKLFEQRMELSQKIGQGKEELSLPAMDTERERKILYRLCEKAKPELSGYVKVLFSSLFEIGRSHQKTLSSHYDSSVIKLLNDAVRKN

SEQ ID NO: 33735 - DNA, 798 bp, Unknown
  Obtained from environmental sample
  misc_feature (1)..(798): n is a, c, g, or t
gtgtcagggtgtggaaggagcgttttcacaagccgcctggacaaattgtcttctcccgcggacatcacatatttcaacaactttgaaggagtgtttcaggcgctggacggcggcttgtgccgttacggcgtattgccgcttgaaaacagttccgcaggctcggtcaacgaagtgtatgaccttatgaaccgttaccgtttcttcattgtgcgcagtattaaactgcccataacgcacacgttacttgccgcgcccggggcgaagatggacgatattaaagaagtgttttcgcacgagcaggcgattcgccaatgcaaccgatttttaaaatcgtggaagaacgttaaggttaccgaatgcgcgaatacggcaatggcggcaatgcaggcggcaaattcggggaggacggatgcggctgttatttcatcacgtgactgcgccgagttatacggcttacaggcgctatcattcaatattcagaacaccgacaacaattacacgcgctttatttgcatttccaaaaagccggaaatctatccgggggcgcataaaaccagtcttatgttagcgttgaaacacaagcccggctccctttaccatgtgttagcgaaattttacgcgcatggaatcaacatgaacaaactggaaagccgccccatctcagggcaagcctttgagtttcttttttattttgacattgatacgcctgttatttcagacgaactgaagcaggtgcttgcggagcttgagcaggagacggatatgtttaattatttggggacttatcaggagatatag

SEQ ID NO: 33736 - protein, 265 aa, Unknown
  Obtained from environmental sample
  DOMAIN (185)...(258): ACT domain
  misc_feature (1)..(265): Xaa is any amino acid
MSGCGRSVFTSRLDKLSSPADITYFNNFEGVFQALDGGLCRYGVLPLENSSAGSVNEVYDLMNRYRFFIVRSIKLPITHTLLAAPGAKMDDIKEVFSHEQAIRQCNRFLKSWKNVKVTECANTAMAAMQAANSGRTDAAVISSRDCAELYGLQALSFNIQNTDNNYTRFICISKKPEIYPGAHKTSLMLALKHKPGSLYHVLAKFYAHGINMNKLESRPISGQAFEFLFYFDIDTPVISDELKQVLAELEQETDMFNYLGTYQEI

SEQ ID NO: 33737 - DNA, 528 bp, Unknown
  Obtained from environmental sample
  misc_feature (1)..(528): n is a, c, g, or t
atgggaattgatgaattgaatcaaaagattgataatgttgacgatcagttgttgaagctgtttgaacagcggatggagattgcgctggaaattgagaaggatagaaaagaaaactcattggctgttattgatacggagcatgagaggaaaattctttaccggatttgtgagaaggcgcggcctgagctttcggggtatgccaaggttttattttcttccatttttgagatatgccatagttatcagaaggcgcagagtcattatgattcggctgttaagaaattgcttgaagacgcggttcaacataagagcgacagttttccttcacgggcggttgtcgcgtgtcagggtgtggaaggagcgttttcacaagccgcctggacaaattgtcttctcccgcggacatcacatatttcaacaactttgaaggagtgtttcaggcgctggacggcggcttgtgccgttacggcgtattgccgcttgaaaacagttccgcaggctcggtcaacgaagtgtatgaccttatga

SEQ ID NO: 33738 - protein, 175 aa, Unknown
  Obtained from environmental sample
  DOMAIN (8)...(85): Chorismate mutase type II
  misc_feature (1)..(175): Xaa is any amino acid
MGIDELNQKIDNVDDQLLKLFEQRMEIALEIEKDRKENSLAVIDTEHERKILYRICEKARPELSGYAKVLFSSIFEICHSYQKAQSHYDSAVKKLLEDAVQHKSDSFPSRAVVACQGVEGAFSQAAWTNCLLPRTSHISTTLKECFRRWTAACAVTAYCRLKTVPQARSTKCMTL

SEQ ID NO: 33739 - DNA, 363 bp, Unknown
  Obtained from environmental sample
  misc_feature (1)..(363): n is a, c, g, or t
atgagcgcggagtacatcatgtcaggcgggaatggaaagatcattctatgcgagcgcggcatccgcacctttgaaacagccactcgtaatacgctcgatatttcagccgtgccgatgttaaagcggctgacccatctgcccgtcatcatagacccaagccacgccgcgggcgacgcggctcttgtttacccactgtcaatggcttcagccgccgcaggcgcagacggattgatcatcgaggttcacaacgatcccgcccatgcctggtgtgacgggccgcagtcgattacgccggaggcttttgccactctggcgcatgatgttcaaaagattttgaaaataatagggaagaatagtggatag

SEQ ID NO: 33740 - protein, 120 aa, Unknown
  Obtained from environmental sample
  DOMAIN (1)...(114): DAHP synthetase I family
  misc_feature (1)..(120): Xaa is any amino acid
MSAEYIMSGGNGKIILCERGIRTFETATRNTLDISAVPMLKRLTHLPVIIDPSHAAGDAALVYPLSMASAAAGADGLIIEVHNDPAHAWCDGPQSITPEAFATLAHDVQKILKIIGKNSG

SEQ ID NO: 33741 - DNA, 348 bp, Unknown
  Obtained from environmental sample
  misc_feature (1)..(348): n is a, c, g, or t
atggtcactggagctgcacagatggacggagccatattagtagtagccgccacagacggacccatgccccagacacgcgagcacatactgctcgccagacaggtgggcgttcccgccatagtcgtgttcatgaacaaagtggacatggttgacgacccagagatattagatttagtagaaatggaaatacgcgatcttttgagcaagtacgagttccccggagacaccactcccantatcaggggttccgcattngaagcccttgaagcgatgccgatgcccagggaaaagatatggaactcatngaagcctgcgatgaantttatccacagcccaagcgcgacatag

SEQ ID NO: 33742 - protein, 115 aa, Unknown
  Obtained from environmental sample
  DOMAIN (1)...(113): Elongation factor Tu GTP binding domain
  misc_feature (1)..(115): Xaa is any amino acid
MVTGAAQMDGAILVVAATDGPMPQTREHILLARQVGVPAIVVFMNKVDMVDDPEILDLVEMEIRDLLSKYEFPGDTTPXIRGSAXEALEAMPMPREKIWNSXKPAMXFIHSPSAT

SEQ ID NO: 33743 - DNA, 618 bp, Unknown
  Obtained from environmental sample
  misc_feature (1)..(618): n is a, c, g, or t
atggaactcatngaagcctgcgatgaantttatccacagcccaagcgcgacatagagaaacccttcctcatgcctattgaagacgtgttcgccatcacaggccgtggcaccgttgccacaggccgcatagagcgcggcaaggtgtccgtgaacgacaaggttcagagggtaggcttcggcgaaaccaaagaatttgtagttaccggcgtagagatgttccgcaaactgcttgacgatgcgcaggcaggcgacaacgtaggtttgttgcttcgcggcgcggagaaaacggacgttgagcgcggtcaggtattggctgctccgggttcaatcaccccccacaccagctttgaggcggagatatacgtattgagcaaggaagagggcggcaggcacacccagttcgccaaaggctaccgcccccagttctacctccgcaccaccgatgtcacgggcaccatagcgttgcccgctggcgttgagcttgtgatgccaggcgacaacgtcaagataagcgttgagttaatctcacccgttgcaatggatcagggtctccgctttgccatacgcgaaggcggcagaacggtcggtgctggctccgtaaccaaaattattaaataa

SEQ ID NO: 33744 - protein, 205 aa, Unknown
  Obtained from environmental sample
  DOMAIN (36)...(105): Elongation factor Tu domain 2
  misc_feature (1)..(205): Xaa is any amino acid
MELXEACDEXYPQPKRDIEKPFLMPIEDVFAITGRGTVATGRIERGKVSVNDKVQRVGFGETKEFVVTGVEMFRKLLDDAQAGDNVGLLLRGAEKTDVERGQVLAAPGSITPHTSFEAEIYVLSKEEGGRHTQFAKGYRPQFYLRTTDVTGTIALPAGVELVMPGDNVKISVELISPVAMDQGLRFAIREGGRTVGAGSVTKIIK

SEQ ID NO: 33745 - DNA, 321 bp, Unknown
  Obtained from environmental sample
  misc_feature (1)..(321): n is a, c, g, or t
gtgaaagaaaaaactgcacaaagcgcggttcgcaaagaaaagccagttcgttttcgtctttgctcttttgaccatcgtttattagatcaagtatcttcaaaactggttaaaatagcaagggatatgggagccagagtttctggacctatacctcttcctgtaaagattcaaaaatacacggttttgcgcggtccgcatatagataaaacttctcgtgagcagtttgagtccagaacgcataaaagattaatagatatgtacagcctttcacccgcagcaacagatgctttgtctaaaatagacattccctctggcgggtga

SEQ ID NO: 33746 - protein, 106 aa, Unknown
  Obtained from environmental sample
  DOMAIN (15)...(105): Ribosomal protein S10p/S20e
  misc_feature (1)..(106): Xaa is any amino acid
MKEKTAQSAVRKEKPVRFRLCSFDHRLLDQVSSKLVKIARDMGARVSGPIPLPVKIQKYTVLRGPHIDKTSREQFESRTHKRLIDMYSLSPAATDALSKIDIPSGG

SEQ ID NO: 33747 - DNA, 744 bp, Unknown
  Obtained from environmental sample
  misc_feature (1)..(744): n is a, c, g, or t
atgatcagatcggccgagacagctctcgacgatatcagctttgacattattgaggggcagtgtttgatgatcgcgggttctaacggatcggggaagactctgctgatgcggattattgccgggcttatggagccggacgggggcgaggttttttttcagggacagcctttgtatgacaaaaagactgcgcgtaacaccacccacaaacgtctccgcggaacattggggcttgtcttgcaggacgcggaggcgcagattgtcggcgagaccgtcatggaagacgcctctttcgggcccgagaacctgggctggccggcctctgatgtaagaaccgccgctgaaaaagccctgtccgatatggggcttatagaaaaacgggacaattctccgcgccagctttccggcggagagaaacgccgtctcgccattgccggcgtcgcggctatgggctgtaacacggtgattatggacgagccttttgccaaccttgactggcccggcgtaatccagacgctcaccattatacgcaatttaaaaaactcgggtaaaacattaattatactcacccatgagcttgaaaaagcattagcgttagccgacaggcttataatccttcataaaggaggaatcaacgccgactcaactccggccgaagttctggacgctcttgatccttcctggggagtgcgcgatccacgcaagaattacgcttcaataaaggactgttcatggctggaagattaa

SEQ ID NO: 33748 - protein, 247 aa, Unknown
  Obtained from environmental sample
  DOMAIN (19)...(208): ABC transporter
  misc_feature (1)..(247): Xaa is any amino acid
MIRSAETALDDISFDIIEGQCLMIAGSNGSGKTLLMRIIAGLMEPDGGEVFFQGQPLYDKKTARNTTHKRLRGTLGLVLQDAEAQIVGETVMEDASFGPENLGWPASDVRTAAEKALSDMGLIEKRDNSPRQLSGGEKRRLAIAGVAAMGCNTVIMDEPFANLDWPGVIQTLTIIRNLKNSGKTLIILTHELEKALALADRLIILHKGGINADSTPAEVLDALDPSWGVRDPRKNYASIKDCSWLED

SEQ ID NO: 33749 - DNA, 837 bp, Unknown
  Obtained from environmental sample
  misc_feature (1)..(837): n is a, c, g, or t
atggtcagattggccgagcgtttcaacgtattctataaggagggtgttatgaaaggtaatacaggttccagcgttgccgcaaatcctaaagcggcaggaaaagaagccgcggaaaaagctaaagacgggctttcggatattaaagtggcgtttgtctactccagcgtcgcttatgatcaaggcgaactgcttaaaggcgtggctgagggattgccgggggttccggttcttggaaacacttcctttaccggcgtcattacccccgaggggtttatttccggggataggggctttgtagggcttttggcccttggcgaaaaagatctgattgtcggcgtcacgggaaaaccaaaaagcggcggcgccgtaaacggcgacgccagggcaaccggcagggatgccgccaaggaagccatgaagaacgccgggaaaggcggcgcgccggcctacttctacatggccgcctctccgggagaagaggaattctatctaaagggcatcagcgatgtaatcggaagagtcccgtatttcgggggaagcgccgctgacaacaacatcgcgggcgaatggaaactatttgccaatcagcatgttttcgcggacggcgtggcgctcgcctttttttacacggacaaaccgatgacaaatctttttaccggcgcttaccgcgaaaccgcggatgttgggatcatcacaaaagtgaaaaacaacaggacgcttgtggagattgacagagtaccggcgcttaagaatacgcgcaatgggcaggggttgatcccgagactctcaaaggcggcaatctgctggtccatacgatcacgtcccctttgggcgtaa

SEQ ID NO: 33750 - protein, 278 aa, Unknown
  Obtained from environmental sample
  DOMAIN (78)...(274): Domain of unknown function (DUF1745)
  misc_feature (1)..(278): Xaa is any amino acid
MVRLAERFNVFYKEGVMKGNTGSSVAANPKAAGKEAAEKAKDGLSDIKVAFVYSSVAYDQGELLKGVAEGLPGVPVLGNTSFTGVITPEGFISGDRGFVGLLALGEKDLIVGVTGKPKSGGAVNGDARATGRDAAKEAMKNAGKGGAPAYFYMAASPGEEEFYLKGISDVIGRVPYFGGSAADNNIAGEWKLFANQHVFADGVALAFFYTDKPMTNLFTGAYRETADVGIITKVKNNRTLVEIDRVPALKNTRNGQGLIPRLSKAAICWSIRSRPLWA

SEQ ID NO: 33751 - DNA, 399 bp, Unknown
  Obtained from environmental sample
  misc_feature (1)..(399): n is a, c, g, or t
ttgggcgtaaaggacaggcttggcgacctcaccgctatccggcatcccatgaacggcaatgatgattattcaatggccatcggggcaaatctcgccgaaaaaacggctgtaatccgaatggagggatcggcggacgaactgattacatccgcttcgcatacccttgacgctttgaagaacaaaatgaaagcccctcccgctgcctaccaccttgtccactgtggcggacgcagggccgggattggggagcgtattgacgaagtggttcaaggggtgaagaaagcggcgagcggcgttccctttatcatggaattcacgtttggcgaatacggctacgaagaggacggcaataacacgaccggcggccttatgctgtcttatacggggtttgcacaatag

SEQ ID NO: 33752 - protein, 132 aa, Unknown
  Obtained from environmental sample
  misc_feature (1)..(132): Xaa is any amino acid
MGVKDRLGDLTAIRHPMNGNDDYSMAIGANLAEKTAVIRMEGSADELITSASHTLDALKNKMKAPPAAYHLVHCGGRRAGIGERIDEVVQGVKKAASGVPFIMEFTFGEYGYEEDGNNTTGGLMLSYTGFAQ

SEQ ID NO: 33753 - DNA, 816 bp, Unknown
  Obtained from environmental sample
  misc_feature (1)..(816): n is a, c, g, or t
atgattatgtttcttgcgctcaacacttcggggcttacgcttattcctatcagcattatggtatatcgtgcgcagttaggggcaggaaatccctccgatgtgtttttgccaatcctcattgccacctacttttcaacgctggctgctattgttattacctgcgtttatcaaaaaataagtttactcaaccgcacgctgctgctgttcttcggagggcttacggcgttcattggcggcgttatttacttcttttccaccttgcccaaagaaaaaatcgggctgtactcgggatttggcgcaaaccttttgctgctgtgcattatcgttggctttttggcggcagggctgcgcaaaaaaatcaacgtttacgaggcgtttattgagggcgcaaaggagggatttaaaaccgccgttaccattattccgtaccttgtggcaatacttgttgccattggcatgtttcgcgcctcaggcgcaatggacgctttggtaaatgggctttcggcagggcttgcctgttttggcgttaacgccgattgggtaggagcattgcccactgcgctgatgaaacctttgagtggaagtggcgcacgcggcatgatggttgacgccatgaaaacttacggcgcagactcgtttgtaggtcgcctctcgtgcatttttcagggtgcagccgacaccactttttacattcttgccgtgtacttcggcagcgtaggcattaaaaatattcgctactcggttggtgttggcttgctggcagacttggttggtgtggtggcagcggttttggtagcgtatttgttttttgggtaa

SEQ ID NO: 33754 - protein, 271 aa, Unknown
  Obtained from environmental sample
  SIGNAL (1)...(23)
  DOMAIN (137)...(243): Nucleoside recognition
  misc_feature (1)..(271): Xaa is any amino acid
MIMFLALNTSGLTLIPISIMVYRAQLGAGNPSDVFLPILIATYFSTLAAIVITCVYQKISLLNRTLLLFFGGLTAFIGGVIYFFSTLPKEKIGLYSGFGANLLLLCIIVGFLAAGLRKKINVYEAFIEGAKEGFKTAVTIIPYLVAILVAIGMFRASGAMDALVNGLSAGLACFGVNADWVGALPTALMKPLSGSGARGMMVDAMKTYGADSFVGRLSCIFQGAADTTFYILAVYFGSVGIKNIRYSVGVGLLADLVGVVAAVLVAYLFFG

SEQ ID NO: 33755 - DNA, 1218 bp, Unknown
  Obtained from environmental sample
  misc_feature (1)..(1218): n is a, c, g, or t
atgaaagatcatctgcgctttgcgattgcctactggcacagcttttgcggcgacggcggagacccgttcggaccgggtacgcacattttcccgtggaatacggaagcaaaagacgcgatggacgccgcggacagaaaaatggacgccgcttttgaattctttacaaagataggcgcggaattttacgcgttccacgacagggacatggctcccgaaggcgcgaacccggcggaaagcgaaagaaaccttattacgttaaccgcgaaggcaaaaaaattgcaggacacaacaggggttaaacttctttggggaacggcgaatgtttttggcaacccgcgctttatgaacggggcggctaccaatcccgaattcggcgttgtcgcccttgccgcgactcaggtaaaagccgcgattgacgcgacaatcgagctaggaggcgcgggttacactttctggggcggacgcgaaggttacatgagccttcttaacacagaccttaagagggaaaaagaaaatttggcgcgtttccttacaatggcaagggactatgcccgcaagcagggctttaagggagtgttctacattgaacccaaaccgatggagccgacaaaacaccagtacgattttgacacggagaccgtcataggctttttgcgccagtggggtcttgataaggatttccgcatgaacattgaagccaaccacgcggaacttgccgggcacgaattcgcgcacgagctggaaacagccgccgccgcgggcttcttcggctcggtagacgccaaccgcggagacgcgcagaacggctgggatacagaccagttcccgatgagctactacgaaaccgcaatggcaatgtacacaatcctaaaaatcggcggctttaccacaggcggtcttaattttgactcaaagattcgccgcaactcgattgaccccgccgatctttttatcgcccacgtcggcggcatggacacattcgcggtaggtctgcagattgcgcagcgtattatcgacgacggcgttattcccaactttgtcaaagaccgctatgcgtcattcggcagcggagacggagcgaagttctcaaagggagaacttacgctggaacagcttgcaaaaataggaacagacgcgggttacggcaagacaggaatcacaagcggcaagcaggaataccttgaaaatgttctgaacagttatttactgggactttaa

SEQ ID NO: 33756 - protein, 405 aa, Unknown
  Obtained from environmental sample
  DOMAIN (51)...(266): Xylose isomerase-like TIM barrel
  misc_feature (1)..(405): Xaa is any amino acid
MKDHLRFAIAYWHSFCGDGGDPFGPGTHIFPWNTEAKDAMDAADRKMDAAFEFFTKIGAEFYAFHDRDMAPEGANPAESERNLITLTAKAKKLQDTTGVKLLWGTANVFGNPRFMNGAATNPEFGVVALAATQVKAAIDATIELGGAGYTFWGGREGYMSLLNTDLKREKENLARFLTMARDYARKQGFKGVFYIEPKPMEPTKHQYDFDTETVIGFLRQWGLDKDFRMNIEANHAELAGHEFAHELETAAAAGFFGSVDANRGDAQNGWDTDQFPMSYYETAMAMYTILKIGGFTTGGLNFDSKIRRNSIDPADLFIAHVGGMDTFAVGLQIAQRIIDDGVIPNFVKDRYASFGSGDGAKFSKGELTLEQLAKIGTDAGYGKTGITSGKQEYLENVLNSYLLGL

SEQ ID NO: 33757 - DNA, 660 bp, Unknown
  Obtained from environmental sample
  misc_feature (1)..(660): n is a, c, g, or t
atgaaacggattatattttttttattaggactttttatcgccctgccttgtttttctcaatctaatttacaacccgcggcaacagtaaatttaactaaaaccgaggttattactgtcgggcaacttcgtacggaagtacagcgcatggagaaggcgtcgggaaaaactttaaacaagtctgaacggcttcaggtattggacgtaatgatcaatgaaagacttgttattcaggcggcggaacgcgacagaataatggttacagaaaacgaagtaaaccagcaaattcaacaacttaggaacgtattagctcaacagcttggacgccagcctacagaagcggaatttacccaagcggtgatgaatgaaagcggtcttgacgttccaacttttaaagagcagcttcgcagacagttgatcgttcaaaagtaccttatgtcaaaaaaaggcgatctgattaattccgttaaaatgccgacagaagaagatattatatccgagtatgctctcttaaaaggagagcttgtgcgtcccgaaacaatccgctgcaacatgatacaagtttcttatggtcctgacgcggcatcccgttcaaaagcaaaaacgcttgctgaatcattggttaaagaaattaacaacgatcccgcaaaattgacgaagtag

SEQ ID NO: 33758 - protein, 219 aa, Unknown
  Obtained from environmental sample
  SIGNAL (1)...(19)
  misc_feature (1)..(219): Xaa is any amino acid
MKRIIFFLLGLFIALPCFSQSNLQPAATVNLTKTEVITVGQLRTEVQRMEKASGKTLNKSERLQVLDVMINERLVIQAAERDRIMVTENEVNQQIQQLRNVLAQQLGRQPTEAEFTQAVMNESGLDVPTFKEQLRRQLIVQKYLMSKKGDLINSVKMPTEEDIISEYALLKGELVRPETIRCNMIQVSYGPDAASRSKAKTLAESLVKEINNDPAKLTK

SEQ ID NO: 33759 - DNA, 873 bp, Unknown
  Obtained from environmental sample
  misc_feature (1)..(873): n is a, c, g, or t
gtgcgttccgcggtttttattctgggcgatccaaaagcggtaagcccttccaatgtgggagccggttatgtattgcgccgcctgatacggcgcgccgtccgtcacgggcgtaaacttaacggcgacggattaagtctttctcaaatcgcgcaggtcgtcgtgaaacagtttaaaggcgcttatcctgaacttgaacaaaacagcgcttctataattggcgaacttgacaaggaagaggcaaaattcatggaaacactgcaaaagggcgagcatgaatttgaaaaactgctgccaaatctgctcaaggacccgcgaaaaatcatgtcggggcggctggccttcaaactttacgacacttacggcttcccaatcgagcttacagaggaacttgccgccgaatcaggaatgaaggtaaatagggaagaatttgacgaagcgttccaaaaacatcaggaactgtcccgctcccaaagcggctctttcaagggagggctgggcgatcagggggaaatggcggttaaataccacaccgccacccatcttctgcacaaggccttaaggacggttcttggcgatcatgtagcccaaaaaggaagcaatatcaccgcggaacgtctgcggtttgactttgcccatgatgcacccatgacggcggaacaggttaaaaatgtgcaggatattgtcaacgagcagatagaaagggactttcctgtttttatggagactatggggcttgaagaagcaagagcgcagggggcaattgcccttttcggggaaaaatatgaatcgcaggtaaaagtctatactatcggcaattctacagccgattcttttccaaagaagtctgcggcggtccccatgtggaaaaaatag

SEQ ID NO: 33760 - protein, 290 aa, Unknown
  Obtained from environmental sample
  DOMAIN (2)...(236): tRNA synthetases class II (A)
  misc_feature (1)..(290): Xaa is any amino acid
MRSAVFILGDPKAVSPSNVGAGYVLRRLIRRAVRHGRKLNGDGLSLSQIAQVVVKQFKGAYPELEQNSASIIGELDKEEAKFMETLQKGEHEFEKLLPNLLKDPRKIMSGRLAFKLYDTYGFPIELTEELAAESGMKVNREEFDEAFQKHQELSRSQSGSFKGGLGDQGEMAVKYHTATHLLHKALRTVLGDHVAQKGSNITAERLRFDFAHDAPMTAEQVKNVQDIVNEQIERDFPVFMETMGLEEARAQGAIALFGEKYESQVKVYTIGNSTADSFPKKSAAVPMWKK

SEQ ID NO: 33761 - DNA, 897 bp, Unknown
  Obtained from environmental sample
  misc_feature (1)..(897): n is a, c, g, or t
atgaatgcggcaatagaagcggctcacgcgggcgaatttggcaaagggttcgcggtggttgcgacagaagtgcgaaagcttgccgaaagtacgacccagaattcaaaacaaatcgccgcctcgctgaagaccatcattgatcagataaatggcgcgaaggcggccagcgatagcgccggtaaaacatttctgaatgttaaaaatgatgtcgaaaaatttatcggggcttttcaggaaatagccaattcgaattctgaattgtccgccagtacggatcgtatattcagttccatggatgaattaaaatccatctccggtgaaatagcggtaggcagtaaagagattgtcaccggtactgaaaatattgattctgttttacggtcaacaaaggagttttctgaaagactggcagccgaagtgggtgaaatcgaagaaaagatatatgacatcagcggcgcgcaaagcggaattactttgtatttggtggatactaacaaaaatatcgagggcttttaccagaagatggtagaaaaaggggaacttgaaaaggaagacagtctgtttaattatgacttaatcgtacttatgcaccgtaactggctgatacagttacgggcttttttggacggcaggaaagaaaacctgaaagccacttcggaagatcatctgaaatgcgatttggggcggtggatatacggagatggcaagcattttcagtcaagtagaagctacaatgagttggaatcccaacataaaaatttccatgcgaaggccggagcgataatacgggcaaaaacagaaggaaaaaaagagcaggctgagcaaatgtaccaggacctgatgaatgattatcaccaggttgtcgctctgcttgacaaactaaaacaagagaaatag

SEQ ID NO: 33762 - protein, 298 aa, Unknown
  Obtained from environmental sample
  DOMAIN (2)...(146): Methyl-accepting chemotaxis protein (MCP) signaling domain
  misc_feature (1)..(298): Xaa is any amino acid
MNAAIEAAHAGEFGKGFAVVATEVRKLAESTTQNSKQIAASLKTIIDQINGAKAASDSAGKTFLNVKNDVEKFIGAFQEIANSNSELSASTDRIFSSMDELKSISGEIAVGSKEIVTGTENIDSVLRSTKEFSERLAAEVGEIEEKIYDISGAQSGITLYLVDTNKNIEGFYQKMVEKGELEKEDSLFNYDLIVLMHRNWLIQLRAFLDGRKENLKATSEDHLKCDLGRWIYGDGKHFQSSRSYNELESQHKNFHAKAGAIIRAKTEGKKEQAEQMYQDLMNDYHQVVALLDKLKQEK

SEQ ID NO: 33763 - DNA, 744 bp, Unknown
  Obtained from environmental sample
  misc_feature (1)..(744): n is a, c, g, or t
gtgcgttggaattctgcaaaaaaaggctttaccccctttattacacctgatattgcccgtactgaaattcttgaaggcatcggcttcaatccccgcggcgcggaatccaatgtctacacgctggaaggagaggattcctgtctcgtgggaactgccgaaattaccctgggggggtattactccgatacgatccttgccaaagacaagctcccccttcgcatggcgggcctttcccactgcttccgccgcgaagcgggagcggcgggccagttctccaagggcctgtaccgcgtgcatcagtttaccaagctggaaatgtttgtgtactgcctgcccgaagaatcggggcaatttcatgaggaactgcgtttaatagaagaagaaatcttttccggtcttgatattcctttccgggtggtggatacctgtaccggcgacctgggcgcgcccgcctaccgcaaatgggaccttgaggcatggatgccgggccgcaataacggcgagtggggagaggtaacatcaacttccaactgcaccgactatcaggcgcggcggctgaatatccgctacaaagacgacgacggtaaaaataaattcgtccatatgctcaatggcacggcgattgctatctcacgggccattatcgccattctggaaaatttccagcaggaagacggctcggtacggataccgcgtaatcttatcccttatgttgggtttgatattatcagaaagaagatatag

SEQ ID NO: 33764 - protein, 247 aa, Unknown
  Obtained from environmental sample
  DOMAIN (3)...(164): tRNA synthetase class II core domain (G, H, P, S and T)
  misc_feature (1)..(247): Xaa is any amino acid
MRWNSAKKGFTPFITPDIARTEILEGIGFNPRGAESNVYTLEGEDSCLVGTAEITLGGYYSDTILAKDKLPLRMAGLSHCFRREAGAAGQFSKGLYRVHQFTKLEMFVYCLPEESGQFHEELRLIEEEIFSGLDIPFRVVDTCTGDLGAPAYRKWDLEAWMPGRNNGEWGEVTSTSNCTDYQARRLNIRYKDDDGKNKFVHMLNGTAIAISRAIIAILENFQQEDGSVRIPRNLIPYVGFDIIRKKI

SEQ ID NO: 33765 - DNA, 366 bp, Unknown
  Obtained from environmental sample
  misc_feature (1)..(366): n is a, c, g, or t
ttgcttatgattatgggtattctaaacgagtgtatgagccgtgacattcaggtttggacgatcaaggacaattaccgtttgggcagcgacatcaactcaaaggttctcgctttcgcgttcggtctctccgcggagatagagcgtaaccttatctcgcaacgtacaaaggaggctcttgcccgtaagcgggcggaggggatggtgctggggcgtcctcgcgggagtaagtcgaaggccaaaaagttgacgggtcgggagactgagatcagagatttgttggatagaaatatgtcaaaatcggcaatcgctcggattttgggggtgcatcggcttacggtgttgtcgtttgtcagggatatgttgtaa

SEQ ID NO: 33766 - protein, 121 aa, Unknown
  Obtained from environmental sample
  misc_feature (1)..(121): Xaa is any amino acid
MLMIMGILNECMSRDIQVWTIKDNYRLGSDINSKVLAFAFGLSAEIERNLISQRTKEALARKRAEGMVLGRPRGSKSKAKKLTGRETEIRDLLDRNMSKSAIARILGVHRLTVLSFVRDML

SEQ ID NO: 33767 - DNA, 804 bp, Unknown
  Obtained from environmental sample
  misc_feature (1)..(804): n is a, c, g, or t
gtgtgggcaacaaagctttcgacaggcgctcccatcgcaaacgccagggtggaactccttgaaggaaataccgtagtcaggcagggcactaccaacgctcaggggctggcggtttttgagttccgcgatggggagtttgtctcccgttttaccgatctgtcccccagctacggtgtaagcgactggtcaaaaggttttcgcattcgggttatacaggacggcggggctatggccgggggagatcaggcggaatttgtcccgaacaacagccacaatatatggcgcttccctgttgaatccgccgtaagcccgttcaatgcagaaagcgacagagcactggtttttatgtttaccgaccgcgggctctacaggccgggagagaccgtcactttccggggcatagacaggaacctttcaaggggaaggttcttcccctacgaaggcaattacagcatcgaggtctcaacgggtggacgcaacgccccggtaattgcttcgcttggcgggaaaaccaccggaagcggcgggagccacggctcttttgccattcccgccaacctcgacccgggccgttacgttatgcgctacaagcgccttgagggcggcggtcaggactactcaattacctttttggtcgccaacttcgagcggctccgtgttgaagcgtccttaaaattccccgatctcacgtattatcagggcgaaaaaatatcgggccgcctttccgcctcttacctttcaggcggcggcctttcaggcgctccctacacctactactggagccgccaaacccgcgggttttaa

SEQ ID NO: 33768 - protein, 267 aa, Unknown
  Obtained from environmental sample
  DOMAIN (1)...(266): Alpha-2-macroglobulin family N-terminal region
  misc_feature (1)..(267): Xaa is any amino acid
MWATKLSTGAPIANARVELLEGNTVVRQGTTNAQGLAVFEFRDGEFVSRFTDLSPSYGVSDWSKGFRIRVIQDGGAMAGGDQAEFVPNNSHNIWRFPVESAVSPFNAESDRALVFMFTDRGLYRPGETVTFRGIDRNLSRGRFFPYEGNYSIEVSTGGRNAPVIASLGGKTTGSGGSHGSFAIPANLDPGRYVMRYKRLEGGGQDYSITFLVANFERLRVEASLKFPDLTYYQGEKISGRLSASYLSGGGLSGAPYTYYWSRQTRGF

SEQ ID NO: 33769 - DNA, 642 bp, Unknown
  Obtained from environmental sample
  misc_feature (1)..(642): n is a, c, g, or t
atggatctgcgtgctgctaagatgcggaggagattgcgatttaccgcaaagcnggcgattttaacaaataaaattatcgatcttttggagaaaagagcgagaaccggaagaatcaaaaccgaagctgacgccgttatgctgattgaacttgaggccaggaaactgggctgcgacggagcggcgtttgagattcttgccgcgggtcaggacaggagttttggcatacacgcgttccccgcgtggacagacgctccttttggcgggcagggtctttctatcctggacttcggcgtgcggtattgcggttataacaccgatgttactttgacctttgtgagggagccaagctcgcagcagttgaaaatggtaaacctggtagagagagcgtacaaagccgcggtcgattcagtcgcggccggggacgacaccaggtccaccgccattcttgttgatgaattgctggcaaagtcaagaaaacgcctggtacacgggctgggacaacgcatcggactggatgttcatgagtacccctttctcagaagccgccatgaaataacatgggatttgcaaccgggaatgctttttacaattgagccgggcctgtacgaccctgtgcatggcgggctgccgcctggaaaatga

SEQ ID NO: 33770 - protein, 213 aa, Unknown
  Obtained from environmental sample
  DOMAIN (19)...(211): metallopeptidase family M24
  misc_feature (1)..(213): Xaa is any amino acid
MDLRAAKMRRRLRFTAKXAILTNKIIDLLEKRARTGRIKTEADAVMLIELEARKLGCDGAAFEILAAGQDRSFGIHAFPAWTDAPFGGQGLSILDFGVRYCGYNTDVTLTFVREPSSQQLKMVNLVERAYKAAVDSVAAGDDTRSTAILVDELLAKSRKRLVHGLGQRIGLDVHEYPFLRSRHEITWDLQPGMLFTIEPGLYDPVHGGLPPGK

SEQ ID NO: 33771 - DNA, 1233 bp, Unknown
  Obtained from environmental sample
  misc_feature (1)..(1233): n is a, c, g, or t
atgatgggcgggcggggggtcaggaacaacgggatattccgtgcaatggagtattgcaaggacttcacgcagggattcagcgaatacgcccttgcctgccacggcgacgacgagaactttgttaagtacgccgggaagctgacgagcagacgcaaccgcgagggcatactttccgacgctcgttccatcgtgccaacatcactgaccgtgtttgaccgcgacaagtttttgctcaactgccaaaacggtacgctcaatctcaagacctttgagttgcagccgcacagcgccaccgatatgattaccaagatggcgcgggtcaagtatgacccaaaggcgcgttgtgagcgttgggagcggttcatagacgaggttatgtgcggcgataccgatatggcggcatatctgcaaaaggcgctcggctacgccctgacgggttcaacggaatatgagtgcttcttcatcttgtatggcagcaagacccgcaatggcaagaccacgctcacggaaacggttggccacatccttgccgattacgctgtgacttcacagccgcagaccttctctaagcgcccgtccgacggggcggctcctacgccggacatagcgcgtctgcaaggcgctaggctcgtcaatatgccggagccggaaaagggcatggaattgaacacagcactgattaagcagcttacgggcggcgatacctatacggggcggttcctcaatgaaaattcgtttgagttcccgatggagggcaaaatcttcatcaacaccaaccaccttccgaaaatagcggacggcaccgtgttcgcgtccggcagggcaaaggttatcccgtttgagcgccatttcacggaagcggagcaggataagagcttgaagcagttcttccggcgcatggaaaacaagaacgcgatattcaactggctcgtctggggtaatcggatgatacaggaaaccggattcgacccgccgcaaagggtgattcaggccgtcgaggaatacaggctggaagcggacgttatcggcacgttcttctctcaatatacccgcagggaagaaaacagcaggattccgactcccgaattgtacggcctgtatacagaatgggcaaaggtaaatggctacaaaccgctgtccagccaagcgtttgtcggcgatttgcggcaccgcttcaaggtcaaacacgatgggcgatacggcaacatggtttacgggctggcatttatgtga

SEQ ID NO: 33772 - protein, 410 aa, Unknown
  Obtained from environmental sample
  DOMAIN (78)...(394): Poxvirus D5 protein-like
  misc_feature (1)..(410): Xaa is any amino acid
MMGGRGVRNNGIFRAMEYCKDFTQGFSEYALACHGDDENFVKYAGKLTSRRNREGILSDARSIVPTSLTVFDRDKFLLNCQNGTLNLKTFELQPHSATDMITKMARVKYDPKARCERWERFIDEVMCGDTDMAAYLQKALGYALTGSTEYECFFILYGSKTRNGKTTLTETVGHILADYAVTSQPQTFSKRPSDGAAPTPDIARLQGARLVNMPEPEKGMELNTALIKQLTGGDTYTGRFLNENSFEFPMEGKIFINTNHLPKIADGTVFASGRAKVIPFERHFTEAEQDKSLKQFFRRMENKNAIFNWLVWGNRMIQETGFDPPQRVIQAVEEYRLEADVIGTFFSQYTRREENSRIPTPELYGLYTEWAKVNGYKPLSSQAFVGDLRHRFKVKHDGRYGNMVYGLAFM

SEQ ID NO: 33773 - DNA, 708 bp, Unknown
  Obtained from environmental sample
  misc_feature (1)..(708): n is a, c, g, or t
ttgattttggagttgaaagagcagtttccaaaactcgcgcagtatttatcaaaggcaatggataatttttccgcaaatcaggaaaatattcccataaaaatcttaacgaatctgctaactcaaattcaacagaatttaaataaacccaccgttgcggaaccggaaactgtgaaaaatcttgtggacgaggttataaaaattttgcagccaagcaaggaagctccaccggaatacaaattagttctggctctttctaaaaatgattttgcaagcgcaaacatagccgtaaaaaacatagtgcaagctgctgttattccacagcaaaatcaaactcccctgcaaatccaaactccacaacaaatccaagttccgcaacaaactcaaatcccactacaaacgcaaactccacaacaaatacaagttccgcaacaaacgcaaatcccattgcaaacgcaaactccgcagcaaatacaagttccgcaacaaacgcaaatcccattgcaaacgcaaactccgcaacaaatacaagttccgcaacaaacgcaaatcccactacaaactcaaactccgttgcaaactcaaattcctcaaaccgcggcaacagcaatgcaaacttttcaaacaatctttaatgctttgcaggaattgaaagaatttggcattccaatagaacttaaagatgctccgttaaaagaattgaaacaatag

SEQ ID NO: 33774 - protein, 235 aa, Unknown
  Obtained from environmental sample
  misc_feature (1)..(235): Xaa is any amino acid
MILELKEQFPKLAQYLSKAMDNFSANQENIPIKILTNLLTQIQQNLNKPTVAEPETVKNLVDEVIKILQPSKEAPPEYKLVLALSKNDFASANIAVKNIVQAAVIPQQNQTPLQIQTPQQIQVPQQTQIPLQTQTPQQIQVPQQTQIPLQTQTPQQIQVPQQTQIPLQTQTPQQIQVPQQTQIPLQTQTPLQTQIPQTAATAMQTFQTIFNALQELKEFGIPIELKDAPLKELKQ

SEQ ID NO: 33775 - DNA, 315 bp, Unknown
  Obtained from environmental sample
  misc_feature (1)..(315): n is a, c, g, or t
ttgtttgaaaagtttgcattgctgttgccgcggtttgaggaatttgagtttgcaacggagtttgagtttgtagtgggatttgcgtttgttgcggaacttgtatttgttgcggagtttgcgtttgcaatgggatttgcgtttgttgcggaacttgtatttgctgcggagtttgcgtttgcaatgggatttgcgtttgttgcggaacttgtatttgttgtggagtttgcgtttgtagtgggatttgagtttgttgcggaacttggatttgttgtggagtttggatttgcaggggagtttgattttgctgtggaataa

SEQ ID NO: 33776 - protein, 104 aa, Unknown
  Obtained from environmental sample
  misc_feature (1)..(104): Xaa is any amino acid
MFEKFALLLPRFEEFEFATEFEFVVGFAFVAELVFVAEFAFAMGFAFVAELVFAAEFAFAMGFAFVAELVFVVEFAFVVGFEFVAELGFVVEFGFAGEFDFAVE

SEQ ID NO: 33777 - DNA, 834 bp, Unknown
  Obtained from environmental sample
  misc_feature (1)..(834): n is a, c, g, or t
atgtgcgcatattatgaaaaaaaacgctccgagcttcctaaacttgactatgagcgctcgattatggcgtgtaccgcttcaaatccggtatttatccgcaagattgaatattacgcatggcgtgaaattgatgatgatagccatcttgaaatggcgcagaataaaattctgccgcttattcaggaaaatgaatcgttacgccaaatacgccgcgaagtccttttaaatccaggacccgctacgacaagtgacagtgttaaatacgcccaagtcagcgccgatatttgcccgcgtgaaaaagaattcggtgatgtgatgaaatggatatgcggtgaacttaccgccattgtcgccgacacgtcagaatatgaaacggtcttttttggcggttccggtaccgccgccgatgaagtcatgatttcctcatgcgttcccgaagagggtcacattcttattgttgataacggctcttatggggagcgtcttgccaaaattgcgtccgtttataaaataaaccacactgtttataaaagctcaacttacgaaagaatagacattacggcgcttgaaaatgaatttaaaaccggaaaatacacccatcttgccattgtgtatcacgaaaccacaacgggtttactcaaccctcttgacgttatatgccccttggcaaagaaatacaacattgtaacgatagttgacgctgttagcatatatgccggaaagccgatgaatttaaaaaaacttggcattgattttatggcttccacttccaataaaaatatacagggaatggcgggcgtttgttttgttatctgtaaaaaagatgagcgttga

SEQ ID NO: 33778 - protein, 277 aa, Unknown
  Obtained from environmental sample
  misc_feature (1)..(277): Xaa is any amino acid
MCAYYEKKRSELPKLDYERSIMACTASNPVFIRKIEYYAWREIDDDSHLEMAQNKILPLIQENESLRQIRREVLLNPGPATTSDSVKYAQVSADICPREKEFGDVMKWICGELTAIVADTSEYETVFFGGSGTAADEVMISSCVPEEGHILIVDNGSYGERLAKIASVYKINHTVYKSSTYERIDITALENEFKTGKYTHLAIVYHETTTGLLNPLDVICPLAKKYNIVTIVDAVSIYAGKPMNLKKLGIDFMASTSNKNIQGMAGVCFVICKKDER

SEQ ID NO: 33779 - DNA, 1038 bp, Unknown
  Obtained from environmental sample
  misc_feature (1)..(1038): n is a, c, g, or t
ttgtcaggtatgagtaacaaaaaccgcattatcataggtttatttttctctcttttgataattgccgccgccgtatctttgggcagttccggaataggcttgcgcgataccgttttgatcattttgcataaaattttccgtctgccgcttcctcaggatattgacccaaaaaatgtttctatcgtttggttgttgcgtctcccccgcgtactgcttgcgtttcttgtcggcggaggacttgcggcaagcggcgctgtttgtcagtccattctgcgaaacccgcttgcgtctccttacattttgggagtctcatccggcgcgtctttgggcgcgggaataatcatcgtaagcgggatagctgttcctttattgggcgattttaccctgccgcttacgggatttatcttcgggcttgtcacggttttttgcgtcgccgctttttcttcgcgcatagaccgctcgatgtcgaataacacaataattctgtgcggaatgattttttcgctttttttaagcgccgttcttaccatgttaagcgcggtgttttcagatgacttgcgccgaatagccctgtggcagatgggaagcttcgccatgcgcggctggcagtcggtattgcttttacttccgtttcttgtcatcggaataaccgggatttttctcttcacaaaggaaatggacattttaagtttcggcgacgaacaggcaaaatcttcgggagtggaaacaggcgctgtgcggaaaaaactgctcgctttatgcgccgtgctgacaggcgccgcggtcgctctcagcggcgttatcggttttgtagacctgatagccccacatgcggcgcgccgaatctgcggttcaaatcacaggcgcttaatcccaatgtcatttattcttggcggttctttacttgttttgaccgacctgttggcaagaacaatcgtctcgccatcggaacttccggtgggcgcaattaccgcattaatcggcgctccatttttcgcatgggtatatttcaagcgaagacgcaaggcgcaggtgtaa

SEQ ID NO: 33780 - protein, 345 aa, Unknown
  Obtained from environmental sample
  SIGNAL (1)...(28)
  DOMAIN (90)...(339): ABC 3 transport family
  misc_feature (1)..(345): Xaa is any amino acid
MSGMSNKNRIIIGLFFSLLIIAAAVSLGSSGIGLRDTVLIILHKIFRLPLPQDIDPKNVSIVWLLRLPRVLLAFLVGGGLAASGAVCQSILRNPLASPYILGVSSGASLGAGIIIVSGIAVPLLGDFTLPLTGFIFGLVTVFCVAAFSSRIDRSMSNNTIILCGMIFSLFLSAVLTMLSAVFSDDLRRIALWQMGSFAMRGWQSVLLLLPFLVIGITGIFLFTKEMDILSFGDEQAKSSGVETGAVRKKLLALCAVLTGAAVALSGVIGFVDLIAPHAARRICGSNHRRLIPMSFILGGSLLVLTDLLARTIVSPSELPVGAITALIGAPFFAWVYFKRRRKAQV

SEQ ID NO: 33781 - DNA, 555 bp, Unknown
  Obtained from environmental sample
  misc_feature (1)..(555): n is a, c, g, or t
atgctggaagttaaaaatttatccgccggatatggcggtgcaatcaaaaattgtgtggatgttatctgcaacattaactttaagactgaaaagggagaaagtctttgcatactcggtcctaacggtagcggaaaaagtactttgtttaaatcgatagcgcgtatcattgattaccgcgggtgtgttttaataaacggcgaggatataagtacggtttcacgcaaggaattggcgaaaaaaatcgccctactgacccaaagcgcacaggtgttttttccctacacggtttatgaaacggtatcaatggggcgttacgcatatttacagggctttttaaaaaatctttccgccgaggacagggcggttatcgaggacattttaaaaaaactcgacatttgggacagcaaagaccgcatgatagacgaattaagcggcggaacactgcaaagggttttcctggcaagaactttggcgcaaagtcccgatttaattttacttgacgagcctagtaatcaccttgatttgaaacatcaaattgaattgctcaagttttaa

SEQ ID NO: 33782 - protein, 184 aa, Unknown
  Obtained from environmental sample
  DOMAIN (32)...(184): ABC transporter
  misc_feature (1)..(184): Xaa is any amino acid
MLEVKNLSAGYGGAIKNCVDVICNINFKTEKGESLCILGPNGSGKSTLFKSIARIIDYRGCVLINGEDISTVSRKELAKKIALLTQSAQVFFPYTVYETVSMGRYAYLQGFLKNLSAEDRAVIEDILKKLDIWDSKDRMIDELSGGTLQRVFLARTLAQSPDLILLDEPSNHLDLKHQIELLKF

SEQ ID NO: 33783 - DNA, 627 bp, Unknown
  Obtained from environmental sample
  misc_feature (1)..(627): n is a, c, g, or t
gtgctgtacggaagatcgggaaaagcggtctctatcgacttggacgctttagaatttattaaaggtacaaaaggtatctcagaaagtacaatcgtaaatatcaatgtagacggtaaagcctatgacgcgtttgtaaaagacactcagcggaatatcctggacgggaatattcttcatatagatttttatgaggtggaaagcggcgttgttttaagggcgaaggtttcacttgttttgcacggaaaccccataggcgtacgcgaaggcggtatgcttgaaacgccgttacatgaaatcgaggttgaatgtcttcccaaggatcttcccgaaagaattgaaattgacatttccggccttaaagccaaccattcgattcacgtcagggacatcccgctcgcgcagggcgtcaggcttctttccaatccggatcaggttgtggcgctggttaaattcgccaaaatcgaagttgtcgccgctcctgaagccgaagccgcagccgccggtgaagccggagccgctcccgcagcaggcgccgccgctcccggagccgctcccgccgcaggcgctgccgccgctcccggcgccgctcccgccgcaggcaagaaagccgccggagacaagaagtaa

SEQ ID NO: 33784 - protein, 208 aa, Unknown
  Obtained from environmental sample
  misc_feature (1)..(208): Xaa is any amino acid
MLYGRSGKAVSIDLDALEFIKGTKGISESTIVNINVDGKAYDAFVKDTQRNILDGNILHIDFYEVESGVVLRAKVSLVLHGNPIGVREGGMLETPLHEIEVECLPKDLPERIEIDISGLKANHSIHVRDIPLAQGVRLLSNPDQVVALVKFAKIEVVAAPEAEAAAAGEAGAAPAAGAAAPGAAPAAGAAAAPGAAPAAGKKAAGDKK

SEQ ID NO: 33785 - DNA, 519 bp, Unknown
  Obtained from environmental sample
  misc_feature (1)..(519): n is a, c, g, or t
ttgaaacgccgttacatgaaatcgaggttgaatgtcttcccaaggatcttcccgaaagaattgaaattgacatttccggccttaaagccaaccattcgattcacgtcagggacatcccgctcgcgcagggcgtcaggcttctttccaatccggatcaggttgtggcgctggttaaattcgccaaaatcgaagttgtcgccgctcctgaagccgaagccgcagccgccggtgaagccggagccgctcccgcagcaggcgccgccgctcccggagccgctcccgccgcaggcgctgccgccgctcccggcgccgctcccgccgcaggcaagaaagccgccggagacaagaagtaacggatactatttccaaattagaatattcaatagcacgcgaattgaaagactgtcccgaggggacagtctttcttgccgctgtttcaggcggcgcggactctatggctatgcttgccgcgctttgcgcccttgtccccaaagacagaatcttttgccttcatgttga

SEQ ID NO: 33786 - protein, 172 aa, Unknown
  Obtained from environmental sample
  misc_feature (1)..(172): Xaa is any amino acid
MKRRYMKSRLNVFPRIFPKELKLTFPALKPTIRFTSGTSRSRRASGFFPIRIRLWRWLNSPKSKLSPLLKPKPQPPVKPEPLPQQAPPLPEPLPPQALPPLPAPLPPQARKPPETRSNGYYFQIRIFNSTRIERLSRGDSLSCRCFRRRGLYGYACRALRPCPQRQNLLPSC

SEQ ID NO: 33787 - DNA, 1506 bp, Unknown
  Obtained from environmental sample
  misc_feature (1)..(1506): n is a, c, g, or t
atgtactgggactacacagagcctttatcgcagattaaaccgcaccgtcttttcgcaattaaccgcggcgaaagggaagaagtgctttctaccactttcgatgttgacgaaaacaccgccgtggaaatgctatgcaaaagttacgccattcataacgattatcacaggacagccattgaggacggcttaaagaggcttctctcccccgctgtaatccgtgagctgcgcggagatcagagcgaggccgcggacgaccacggcatatctgtattcggtgaaaatcttaagaacctgcttatgcagcagcccatcaagggaacaagagttatgggcattgaccccggcatacgcaccggaacaaaatgcgcttttctgaacgatacggggaagtatcttggaagcgttgttattcacaatcacaaggtggaagaagcgaagaaactcattcttgaaggggtaaaaaaatacgacatccagcttattgccgttggaaacggaaccggaagcagggaagtacaggaaatcgtgtccgccgttatagcggaaaacaacctggaagttctttacactgtagtggacgaagacggggcgtcggtgtactcggcaagcgacatcgcgagggaggaatttcctgagctcgatttaacaatccgcggagcaatctccatcggcaggcggctccaggacccgctgtcggaacttgtgaagatcgatccaaagtccatcggcgtcggcctttaccagcatgacgtaaaccaaaagaaactttccgacacactggacgaggttgtttcatcggtggtgaaacacgtgngtgtaaacctaaacaccgcaagcgtttcgcttttaaaatacgtttcgggaataaacagctctcttgccagaaagcttgtgaagtacagggaagacaagggcaagatcgggagccgtgaggaactagcctcggtgccgggcatggggcctaagagttttgagcaggcggctggtttcctgaaaatccctgaaagccgcgaggcattggacaatacctgggtacacccggagaattactcagtcgcaagggacatacgcgaagagctttgtaaaggcggcacaatcacgcttaccggaagcctttccgccgaagcattgcgaaagatcagggagcgctacggggtgggggagaccaccgtcagggatattatcgaggagctaaaaaaaccgaaccgtgatcccagggacgactatccaaagcctttgatgcagaagggagtcgtcaacttcgaggatttgcgcgaagggatgaaagttacaggcaaggtaaagaacgtcgtggatttcggggttttcgtggatctgggaataaaagaaagcgccctggtccacatttcagaattgagcgatcatttcgtcaaagaccccatgagcgtagtcaaagtgggagacgtgctggtatttcgcataataagccttgacggcgaaaggcggcgaatcagccttagcaggaaacagctcgccgaaaactag

SEQ ID NO: 33788 - protein, 501 aa, Unknown
  Obtained from environmental sample
  DOMAIN (423)...(496): S1 RNA binding domain
  misc_feature (1)..(501): Xaa is any amino acid
MYWDYTEPLSQIKPHRLFAINRGEREEVLSTTFDVDENTAVEMLCKSYAIHNDYHRTAIEDGLKRLLSPAVIRELRGDQSEAADDHGISVFGENLKNLLMQQPIKGTRVMGIDPGIRTGTKCAFLNDTGKYLGSVVIHNHKVEEAKKLILEGVKKYDIQLIAVGNGTGSREVQEIVSAVIAENNLEVLYTVVDEDGASVYSASDIAREEFPELDLTIRGAISIGRRLQDPLSELVKIDPKSIGVGLYQHDVNQKKLSDTLDEVVSSVVKHVXVNLNTASVSLLKYVSGINSSLARKLVKYREDKGKIGSREELASVPGMGPKSFEQAAGFLKIPESREALDNTWVHPENYSVARDIREELCKGGTITLTGSLSAEALRKIRERYGVGETTVRDIIEELKKPNRDPRDDYPKPLMQKGVVNFEDLREGMKVTGKVKNVVDFGVFVDLGIKESALVHISELSDHFVKDPMSVVKVGDVLVFRIISLDGERRRISLSRKQLAEN

SEQ ID NO: 33789 - DNA, 741 bp, Unknown
  Obtained from environmental sample
  misc_feature (1)..(741): n is a, c, g, or t
atgaatttttttgataaaggaaagccgttggtcagtaacaagccaatgaaaatgaaaccggatttttctttgattttgcttcagcttgtaatattgattgttgcgtctgcggcgcttacggcggtttttctaaaaacctctgcaccgggaaacactgaggatatttgcgtctataccgctgtttttattgtcgtatttattttgacattctgcatacgcaaaaataacgaatgggaacgcgctattgttcttcgcttcggtaagtttcaaaaagttaggggaccggggctgttttttcttctgcctgtcgccgaccgtgtcgcccaaacagtcgatatacgaatcagggtttcggatttttccgcgcagaaaactttgacgggcgattccgttactgtcgatgttgacgcaatatgtttctggttggtatgggatccgcaaaaggcggttcttgaagttgagaattatgttgacgcagtggtgtactcttccaagactgcattgcgtaacgctatttcaagccatgatctttctacttttcttgaacgcagtgatgtaatcgaaaaacaaattcaggaagaagttgacaaaaaaaccaccgattggggaataacggttcttcatattgagattacagatattcagatacccgaaacccttacaggatttcgctttcgcgtgtcccgcaggcggaaaaggaaaaagaaagggcgtaatcctcttgcggaagcggaaatttga

SEQ ID NO: 33790 - protein, 246 aa, Unknown
  Obtained from environmental sample
  DOMAIN (71)...(246): SPFH domain / Band 7 family
  misc_feature (1)..(246): Xaa is any amino acid
MNFFDKGKPLVSNKPMKMKPDFSLILLQLVILIVASAALTAVFLKTSAPGNTEDICVYTAVFIVVFILTFCIRKNNEWERAIVLRFGKFQKVRGPGLFFLLPVADRVAQTVDIRIRVSDFSAQKTLTGDSVTVDVDAICFWLVWDPQKAVLEVENYVDAVVYSSKTALRNAISSHDLSTFLERSDVIEKQIQEEVDKKTTDWGITVLHIEITDIQIPETLTGFRFRVSRRRKRKKKGRNPLAEAEI

SEQ ID NO: 33791 - DNA, 867 bp, Unknown
  Obtained from environmental sample
  misc_feature (1)..(867): n is a, c, g, or t
ttgacaagatcggccgaggatgatcctgactacgatttatctgattattatgttattttaaaagaaattttatttgtaacagaaaaaaacaggaagaaatcaaaaggattattatactcaattagattaattcttaatattatctacaactggagtaaggaaaatgataatcttaaaccgacattatatgcggcagaaagaacaatattaaatacatgggaatattttcaaagaaacaatttcatggatgatattgaattagttaaaatatttgacttgttttttcatgactttgtgaaaatatatttagattatttttcgagaatagaaccattctgttatatacaagatgggtttaacggaaatagtcgttattatttgttggaaaatataataatttatgaacaactgggtattatcgcaattactggattaaatcattattattttggagctatttgcaaagataaaaatattatttctatagcagaaagaataaaaaatacattgaaggcgtttattgtcaataatccttcaatatcttctccggtttatgataatcatattattgagatagtattatctttaatattattgacctacttcaatgatattaaatttattgaggaatggttaattgagattgttgatcgaattggatttgcttataaggtattaaaaaaatattttcctattgattcagattccctcgaagatgcagtattaatatcaagttatgaagaaaaagataaagaaaaaataatgaagacttcgactttgctagtgatattattacagttttccgctgttttaaatttagattccgtatacaaatttattacaaagataattaatcaagttttttaa

SEQ ID NO: 33792 - protein, 288 aa, Unknown
  Obtained from environmental sample
  misc_feature (1)..(288): Xaa is any amino acid
MTRSAEDDPDYDLSDYYVILKEILFVTEKNRKKSKGLLYSIRLILNIIYNWSKENDNLKPTLYAAERTILNTWEYFQRNNFMDDIELVKIFDLFFHDFVKIYLDYFSRIEPFCYIQDGFNGNSRYYLLENIIIYEQLGIIAITGLNHYYFGAICKDKNIISIAERIKNTLKAFIVNNPSISSPVYDNHIIEIVLSLILLTYFNDIKFIEEWLIEIVDRIGFAYKVLKKYFPIDSDSLEDAVLISSYEEKDKEKIMKTSTLLVILLQFSAVLNLDSVYKFITKIINQVF

SEQ ID NO: 33793 - DNA, 582 bp, Unknown
  Obtained from environmental sample
  misc_feature (1)..(582): n is a, c, g, or t
gtgttttcgtttaacgctgatgtgtacaccggttccatccgttccgcgcggggctataacatcggcagtcttttggaacaatgcggcgatttgttcattgattcaggcggtcatgaatttgccggcggcttcagtctgcataaagaacagtgggacgcttttacggaacgtctgaaaaccacagcgtatgccattgaatttgacgaagatcaggaagggcaaactatcagcgttgacgcggaacttcctcttgactaccttacccccgatctgttgaatctgacggatcgttttgccccttacggaaataataatgaacctttaactttcctagcgaaaaacctcatcattgaagatttaaattttattggcaaacaagaatcaaagcacctgaagttgacccttgccggagggaagcacaaatggccggccctgtactgggatgccgccgtccgcgtaatgaacaaggaatttggcaaaggcgactgggtggacgcggtgttcaacatttcacgcgactggtacaaaggcatcgccactccccaaatgatgattattgatttgaagaaaagtggggactag

SEQ ID NO: 33794 - protein, 193 aa, Unknown
  Obtained from environmental sample
  DOMAIN (1)...(60): DHHA1 domain
  misc_feature (1)..(193): Xaa is any amino acid
MFSFNADVYTGSIRSARGYNIGSLLEQCGDLFIDSGGHEFAGGFSLHKEQWDAFTERLKTTAYAIEFDEDQEGQTISVDAELPLDYLTPDLLNLTDRFAPYGNNNEPLTFLAKNLIIEDLNFIGKQESKHLKLTLAGGKHKWPALYWDAAVRVMNKEFGKGDWVDAVFNISRDWYKGIATPQMMIIDLKKSGD

SEQ ID NO: 33795 - DNA, 699 bp, Unknown
  Obtained from environmental sample
  misc_feature (1)..(699): n is a, c, g, or t
atgcccggcatggaagacgccgtggagcgtatactcgccgcgaaggaagaaggcgagaaagtgctggtttttggcgacagtgatgtggacggcatcaccggcacggttctattgaccgaatacctcgctggtatgggcatggatgtcagctggcggattcctggcggtgaagacccctacgggctttcaatcaaagcggtcgaagattttgcggcggcctatggcaccctcatcattaccgtggactgcggcatatcatgcgttaatgagatcaggcgggcgggggaactttccgtagacgtaattgttaccgaccaccacgaaccgcaggagcaattgccgcaagcgctgacgatcatcaacccaaaattaaaaaacaacgcggatatatcaacgccgccttatccattcaaagacctttccggctgcggcgttgcctttaaactggtgtccgccctgcgctttgcccagaaaagcgaactgtacggtcagccggtatgcctgctgaatacccgtcccgtaaatgacgcgtggattgtcgagattgccaaaacgcgcaaccttgccgttatcggaaccctcagcgaaaccattattccggggatgattcccatcagtgatacccgcttgcccgcttttcttgaagggtcaacagatattggtatgggacgcctctcagcaaaagcggacgctggctaa

SEQ ID NO: 33796 - protein, 232 aa, Unknown
  Obtained from environmental sample
  DOMAIN (14)...(194): DHH family
  misc_feature (1)..(232): Xaa is any amino acid
MPGMEDAVERILAAKEEGEKVLVFGDSDVDGITGTVLLTEYLAGMGMDVSWRIPGGEDPYGLSIKAVEDFAAAYGTLIITVDCGISCVNEIRRAGELSVDVIVTDHHEPQEQLPQALTIINPKLKNNADISTPPYPFKDLSGCGVAFKLVSALRFAQKSELYGQPVCLLNTRPVNDAWIVEIAKTRNLAVIGTLSETIIPGMIPISDTRLPAFLEGSTDIGMGRLSAKADAG

SEQ ID NO: 33797 - DNA, 1317 bp, Unknown
  Obtained from environmental sample
  misc_feature (1)..(1317): n is a, c, g, or t
ttgtttttgtcaggcacgccgttcagagccataaactcaggcgagttcatagaagaccaaatttacaactggacatactccgatgaacaaagagaaaaagaaaattggaaagagcctcctgaaaacccttattcagccctgcctcgtatggttctgatgacttataaaatccctgacagtataagacatattgtttctcaaggcgaatatgacgaattcgatctaaatgaattcttttccgcagacggaaaaaatgaagaagcaaagttcaagtacgaggactatgtgcaaaaatggctcgacctcattcgcggagcgtatcttggcacttcaaccgatgatttaaaacttggcggcaaaaaacccgaaatgccgttttcaaatactaaactgctttcgatacttacccatacgctttggtttttgcccaatgtcgcctcatgttttgccatgcgtaacttaatgcaaaaaagacataacacattttttcaggattacaaaataaatgtatgcgccggaacaggggcaggcgttgggcttgacgctcttacgcctgtaaaggaatcaatgggcgacccgttaaaaaccaaaacaataacgcttacttgcggaaaacttacaactggcgtaaccgttcaaccatggaccggtattttcatgctccgcaatctttcaagccctgaaacatatttccagtccgcttttcgtgtacaaagcccttggataatagagacagaagacggcaaaaaagaaattatgaaacaccaatgttacatttttgattttgcccttgatcgggctttaagacaaattgctgattatagctgcaggcttgatattagcgaagaaagtcctgaaaagaaagtagccgaatttactagatttttacctgtccttgcctatgacggcagtaccatgatgcaaattaacgccgctgatattctcgatatcgcttacgccggaacttccgctacccttctagccaagcgttgggaaagcgccttattggtcaatgttgataacgacactcttgcccgtctaatgtcaaaccccaacgcaatgaaagcattggaaagcatagaaggattccgcagtcttaacgtaggaaaagaacttcaaataattatcaacctttccgaaaaaataaaaaaagcaaaatcaaaagaaggtgttccttctgccgctgacaaaattaaattaaccgaagaagaaaaagagtataaatcaagaggaaaaatgatacaggagaaactcatcaagtttgcacaagaatacctgttttcatgtacctgtcagaatatcgagaagaatgtctaa

SEQ ID NO: 33798 - protein, 438 aa, Unknown
  Obtained from environmental sample
  misc_feature (1)..(438): Xaa is any amino acid
MFLSGTPFRAINSGEFIEDQIYNWTYSDEQREKENWKEPPENPYSALPRMVLMTYKIPDSIRHIVSQGEYDEFDLNEFFSADGKNEEAKFKYEDYVQKWLDLIRGAYLGTSTDDLKLGGKKPEMPFSNTKLLSILTHTLWFLPNVASCFAMRNLMQKRHNTFFQDYKINVCAGTGAGVGLDALTPVKESMGDPLKTKTITLTCGKLTTGVTVQPWTGIFMLRNLSSPETYFQSAFRVQSPWIIETEDGKKEIMKHQCYIFDFALDRALRQIADYSCRLDISEESPEKKVAEFTRFLPVLAYDGSTMMQINAADILDIAYAGTSATLLAKRWESALLVNVDNDTLARLMSNPNAMKALESIEGFRSLNVGKELQIIINLSEKIKKAKSKEGVPSAADKIKLTEEEKEYKSRGKMIQEKLIKFAQEYLFSCTCQNIEKNV

SEQ ID NO: 33799 - DNA, 861 bp, Unknown
  Obtained from environmental sample
  misc_feature (1)..(861): n is a, c, g, or t
atggtaaaccttaaagagcgggaatccgatcaggccaataagaatgctcagaacatacgtcaggaagttaagagagatgaaaacaagaacgctcaggaaaggcagaatatagaacaggaaagacaaaggacgaaggatgatcaagcggccggtaaaattacgccggatcaagcccagcaaaaacaacaggaacttgataagagggaacaggcggctgatcaaaaagataaagatattgccgaacgtaaagaagaagctcaaaaacttgaagaccttgccggaaagaaatctgatgaagcccagcaggaacgccagagtatctcaaatgatctgcaggccggcattccgcagcctgccgaaggagttataggcgtaatgatttccagagatgcccccacgccaatgggaaatcttgtccgtatcaacatgaccggaaccgagacaaaacgctctcctcttgattctgtccacacacggacgcttacttttgtaggcggaaaaatcctcggcgttgcgggtgaaaacaagggaagcggcgcggtacgccttgtcgaaatagaccagaacactcttgaaatagcgaaacagggcgatgacgatattcagacaggaacccttatttggataaacgcaaacgatctttacgcgattacagtcgatcttaaagacagtacttgttacatggggcgttttgacacaaacctcgcgttaaaggcaaaatcagactcgagagtacactcaagcgcgtcattaacaattcaacagggaaagcttcttactcaggatgaaaccggagccgcaataatactggacccggcggccttaacgaagcagattgatccgaggattaaagaccgatag

SEQ ID NO: 33800 - protein, 286 aa, Unknown
  Obtained from environmental sample
  misc_feature (1)..(286): Xaa is any amino acid
MVNLKERESDQANKNAQNIRQEVKRDENKNAQERQNIEQERQRTKDDQAAGKITPDQAQQKQQELDKREQAADQKDKDIAERKEEAQKLEDLAGKKSDEAQQERQSISNDLQAGIPQPAEGVIGVMISRDAPTPMGNLVRINMTGTETKRSPLDSVHTRTLTFVGGKILGVAGENKGSGAVRLVEIDQNTLEIAKQGDDDIQTGTLIWINANDLYAITVDLKDSTCYMGRFDTNLALKAKSDSRVHSSASLTIQQGKLLTQDETGAAIILDPAALTKQIDPRIKDR

SEQ ID NO: 33801 - DNA, 630 bp, Unknown
  Obtained from environmental sample
  misc_feature (1)..(630): n is a, c, g, or t
gtgaaccaaaggttcggcgaaccaagggttcgaattatggcagactggatatattcagataccgttaaagaacattttacaaacccgcgcaatgtgcttatgggtgaggagccggattttgtcccggatgcgaaagggcagacgggaaacattaagtgcggcgatcaaatgctgatgcttttaaaaataaaagacgatgtaataacggacgtgcgctggaaaacttacggctgcgccagcgcgatagcctctaccagcatgctttcagaaactattaaaggaatgaagatagaagacgcctataaaatcaaacctgaagaccttgtagcgaaactaggcgggcttccaagttttaagatacactgctctgttttgggcgataaggccctgcgcgccgcgatagacgactaccttgaaaaaaccggcagaaaaggaatgttaaaagaagagacaagcgttatatgtcattgcctcggtattacagacaaagacatagaaaacgctttccaaaacggcgcccgaaactgggaacaactgcaacaggctaccaaaataggcacagtctgcggcagttgcaaagaaaaagccgtggaattgctccacggccttgatcacatttacagtgtgtaa

SEQ ID NO: 33802 - protein, 209 aa, Unknown
  Obtained from environmental sample
  DOMAIN (152)...(204): BFD-like [2Fe-2S] binding domain
  misc_feature (1)..(209): Xaa is any amino acid
MNQRFGEPRVRIMADWIYSDTVKEHFTNPRNVLMGEEPDFVPDAKGQTGNIKCGDQMLMLLKIKDDVITDVRWKTYGCASAIASTSMLSETIKGMKIEDAYKIKPEDLVAKLGGLPSFKIHCSVLGDKALRAAIDDYLEKTGRKGMLKEETSVICHCLGITDKDIENAFQNGARNWEQLQQATKIGTVCGSCKEKAVELLHGLDHIYSV

SEQ ID NO: 33803 - DNA, 1095 bp, Unknown
  Obtained from environmental sample
  misc_feature (1)..(1095): n is a, c, g, or t
atggaaaaaacagaaacagctgtcgccctgtgcgcggtcggcgcggaaaaagttgtctcaaacgaattaaaaaaactgaccgacaaagacggaaaaccatatatcaaagttgaagattccctttacggcagagtgcgctttcaggcggacagaaaaggcttgtacaaagcgttaatcggtcttcgcgccgccgacagagtcctgcttgaaatcgccaattttaaagccgcagattttgacgctctttttgaaggaaccgctgcggcggaatgggagcggcttgtacctaaaggcatggggcttaaagtcgtaaaagtacgcacaaaccgctcgcagttaaaagcggaaacaagcatacaggcaatcgttcacaaggcggcggcgcagcgtctttgcgaaaaatacaaagtcagccgtctccccgaaaaagtgatgacacgtaagggtgaagacactcacgtgaaaattgcagaggtgcgcgtttatatagaaaaggacatagtttccctccttgtagatttaagcggagatcctctttttaaaagaggttacaggagcgaaggcggcgcagcgccgctgagggagacgactgccgcttccatattgctgttatcaggttggaagcgtaaatttccgctttacgatccattctgcggttccggcacaattttgatagaagcggcaatgtacgcgtgggatatagctccgggattaggcagacgctttgccattcaggatatgccgatagcggactcaaaaattgaacagcaggtacgcgatgagtttcgcgttaaaataaatttcagcggcgcggaagggggacggcttgtcagaatagcgggcagtgacgaagatttgcgttcaatatccatcgcttcatcaaacactgcgcgtctacgcgacattgcggagggcagagaacctcagcgtggcatccgttccacggataaatttttaggaatagagttaaaagttcttccaatggcgcaggcgcagtctccttatgatgatgcgggttttataataacaaatcctccttacggaaaacggcttggagatcaagccgccgcagaagaaacctacaagaatatttag

SEQ ID NO: 33804 - protein, 364 aa, Unknown
  Obtained from environmental sample
  DOMAIN (182)...(364): Putative RNA methylase family UPF0020
  misc_feature (1)..(364): Xaa is any amino acid
MEKTETAVALCAVGAEKVVSNELKKLTDKDGKPYIKVEDSLYGRVRFQADRKGLYKALIGLRAADRVLLEIANFKAADFDALFEGTAAAEWERLVPKGMGLKVVKVRTNRSQLKAETSIQAIVHKAAAQRLCEKYKVSRLPEKVMTRKGEDTHVKIAEVRVYIEKDIVSLLVDLSGDPLFKRGYRSEGGAAPLRETTAASILLLSGWKRKFPLYDPFCGSGTILIEAAMYAWDIAPGLGRRFAIQDMPIADSKIEQQVRDEFRVKINFSGAEGGRLVRIAGSDEDLRSISIASSNTARLRDIAEGREPQRGIRSTDKFLGIELKVLPMAQAQSPYDDAGFIITNPPYGKRLGDQAAAEETYKNI

SEQ ID NO: 33805 - DNA, 531 bp, Unknown
  Obtained from environmental sample
  misc_feature (1)..(531): n is a, c, g, or t
atgaaattttttatccgccttagcaatagcccatacaagtggaacgaagtcccctggattcctatcaatccggggacggatttgcagcaattccggggcaggtatgtccaactggcagtggatttttaccctggcgctgacggggaaacttctccctatctgtcggagttaaaggtgatttacagggcagcggaacctcctccgcctcccgcttatgtagccgcagtggcaagggatggcgctgtggaattgacctggagggccagcgcttcaagggatattggcggttattatatctactacggtactgccaagggggaatacttggaatcaaaatgccccattgatgttggaaacaggacttcgttcctgattgaaggcttaaaaaatgggatcctctactattttgcaatagcatcctacaacaaacccgaaaatgacgagcgtttattagtgcatgagccgggagaattttccagggaagtggcagcaaggcccctggtgcaaacaatcgcgaggatgggggaatga

SEQ ID NO: 33806 - protein, 176 aa, Unknown
  Obtained from environmental sample
  DOMAIN (66)...(146): Fibronectin type III domain
  misc_feature (1)..(176): Xaa is any amino acid
MKFFIRLSNSPYKWNEVPWIPINPGTDLQQFRGRYVQLAVDFYPGADGETSPYLSELKVIYRAAEPPPPPAYVAAVARDGAVELTWRASASRDIGGYYIYYGTAKGEYLESKCPIDVGNRTSFLIEGLKNGILYYFAIASYNKPENDERLLVHEPGEFSREVAARPLVQTIARMGE

SEQ ID NO: 33807 - DNA, 600 bp, Unknown
  Obtained from environmental sample
  misc_feature (1)..(600): n is a, c, g, or t
atgcgaagacgaagaactgaacgcttatgtaaaacagtccaccatcagggcgtggtgatgatgattgaggagccggaagtcgaccccttaaccagggaggacctggatttttgggcagatgagggcaagacaggccttgtgcttcacgaggttgggaatgaccataatttaggggccattgccagagccgcggctttnttcgacgtgcatttcatcgtactgaacgaaaaagacgaagaggcgagactgactaccagcgcatatcgtgttgccgaaggcggcatggaacatatcatcgtgcggaaaataaacaacacagccggatttttaaaagacgcggcaaaaaaaattcttgtcgtcggaaccgacacccgcgcgcggcggcgcattggcgatctttccggcattgcgaaagagtgggccgggacagggaaacgccccggagttgcgctggctctcggaaacgaggaaaacggccttccaaaaaatataaaagacaactgctcctgcctgctccgcattccggggacgggcaatatcgaaagcctgaatgtcgctcaggccgcggctcttttcctgagagaaatttacgatttgtag

SEQ ID NO: 33808 - protein, 199 aa, Unknown
  Obtained from environmental sample
  DOMAIN (43)...(194): SpoU rRNA Methylase family
  misc_feature (1)..(199): Xaa is any amino acid
MRRRRTERLCKTVHHQGVVMMIEEPEVDPLTREDLDFWADEGKTGLVLHEVGNDHNLGAIARAAAXFDVHFIVLNEKDEEARLTTSAYRVAEGGMEHIIVRKINNTAGFLKDAAKKILVVGTDTRARRRIGDLSGIAKEWAGTGKRPGVALALGNEENGLPKNIKDNCSCLLRIPGTGNIESLNVAQAAALFLREIYDL

SEQ ID NO: 33809 - DNA, 1446 bp, Unknown
  Obtained from environmental sample
  misc_feature (1)..(1446): n is a, c, g, or t
atgaagtcgcccttcgggcctacggtggaggcgcggttggggcttctctccgacctgctcgcggggcggcggcggctgatcgtcgccccggcggcggcgctgctgcagcggacgccggcgcggcgcgagctgttcaacgcggtcatccgcttggaaacgggtgcggaagtacctatggactcggtcgccgcgtggctctccaacagcgggttccgccgcgaaagcagcaccgacaacctcggcgcgttctccatacgcggcggcatcctcgatctatacccgttcctctcggataacccgtaccgcgttgagttctggggagatacgatcgagtccatacggagtttcgacgtcttcacccagaagagcgtgggggcgcataaatcgctggaaatcgtgcctatgcgcgagttctgcatatcggaggcccatatcgaatcggcgctggagaggatgctcgcttccggcggaagcggcggcgcggccgccgacgaggccgccgtccgtaagctggaacaccagtggaagacggtgggcgacctcgacggggcggagtggttctggcactggttcggcctcggctccgcctccatcctcgactacctgccgaccgacgccatagtcgtgtgggacgacatagtccccgtcaagcggaggctcggcgaggcgctcgacaactacgcccaccacctggagcgcgtcccggaggccttcgcgccgctggtatcgccgccggcggagctgcttttcgacgaaaaaactgtcgctgatgagctgtcttgttatgacgttgtatatgtcgatacggttgatgtacctaaagataccgtcgtcttcccggtctcgtttttgccgcaaccgtcgcttcagcaggagatcggccttatcgtcggcgacctgcgcgaacgcgccgccggcgggtgccgctgcgtggtcgcctgccacagcgccggacacgcggagaggatggcggagcttctcggcgacgatgtcggggcggtcacggaggtcgttaccggcgcgctccgcggcggctttatctgtacggacggcaacctccttgtatactcggaatcgcaaatcttcaaccgcccgtaccgcgccgtcaaggtaaagaagcagaaatccgggattccgctgggcagttttgaccagctatctgtgcaggacaccgtagtccacgtggagcacggcatcgggcggttcgtgggcgtggagcgcgtgaaggccggcgactccgtcaccgactgcatggtgctgatctacgccgacaacgccaaagtttacgtgccgatagaggacttccacaaggtgcagaagtacgtgggcaaggagggttttgcgccgccgctctcgaagatcggcacgcaggcgtgggagaggctgaaagagcgcacccgcgagagttgcgcgaaatggctcaggaactactcgtgccgattctga

SEQ ID NO: 33810 - protein, 481 aa, Unknown
  Obtained from environmental sample
  DOMAIN (385)...(478): CarD-like/TRCF domain
  misc_feature (1)..(481): Xaa is any amino acid
MKSPFGPTVEARLGLLSDLLAGRRRLIVAPAAALLQRTPARRELFNAVIRLETGAEVPMDSVAAWLSNSGFRRESSTDNLGAFSIRGGILDLYPFLSDNPYRVEFWGDTIESIRSFDVFTQKSVGAHKSLEIVPMREFCISEAHIESALERMLASGGSGGAAADEAAVRKLEHQWKTVGDLDGAEWFWHWFGLGSASILDYLPTDAIVVWDDIVPVKRRLGEALDNYAHHLERVPEAFAPLVSPPAELLFDEKTVADELSCYDVVYVDTVDVPKDTVVFPVSFLPQPSLQQEIGLIVGDLRERAAGGCRCVVACHSAGHAERMAELLGDDVGAVTEVVTGALRGGFICTDGNLLVYSESQIFNRPYRAVKVKKQKSGIPLGSFDQLSVQDTVVHVEHGIGRFVGVERVKAGDSVTDCMVLIYADNAKVYVPIEDFHKVQKYVGKEGFAPPLSKIGTQAWERLKERTRESCAKWLRNYSCRF

SEQ ID NO: 33811 - DNA, 729 bp, Unknown
  Obtained from environmental sample
  misc_feature (1)..(729): n is a, c, g, or t
atgcgggctagtttcttgacgacaagcaaacataccgccgggttctggaacgccccgaccgccgccgccatgccgggaaccgtttcattatttacccttgacctgctcggggaccgcagggactgtgttattcttaccggcatggacgcccagggaaaacataccctgacggcgtttcataaagttgagaatgaaaacctgaaccggccgtttataaaaatagcggaaatacaggtggacggctcaattaatatacaggaaacggaacgccctatggcgtacaggcagggaatcgcgaagggccagccctttgccataatcgcttacgggcgcgacaactcgtcggataatgtactggacaggattgagatcgaatatacgtataaccccgcaagaggattctacgaacagggcagaataacccgtattcccggatcgcaggttgagcagcgccgcgtaagggaaatcctttcaggcaagtcaaaggtttttgaggaattcatcaacgatctctggtaccatgtaagccccgcgggtactgttgacaaaagccagtatctctattttgatcccgcgaacagggagataatattttacggcgaggaaacacagcagatcttcagatggcagagctccaattcgacgccttacggcatttatattaccagccaaaataacgcggtgacaacgctgcgccgtttcctcgacatagaactgggaatcccttga

SEQ ID NO: 33812 - protein, 242 aa, Unknown
  Obtained from environmental sample
  misc_feature (1)..(242): Xaa is any amino acid
MRASFLTTSKHTAGFWNAPTAAAMPGTVSLFTLDLLGDRRDCVILTGMDAQGKHTLTAFHKVENENLNRPFIKIAEIQVDGSINIQETERPMAYRQGIAKGQPFAIIAYGRDNSSDNVLDRIEIEYTYNPARGFYEQGRITRIPGSQVEQRRVREILSGKSKVFEEFINDLWYHVSPAGTVDKSQYLYFDPANREIIFYGEETQQIFRWQSSNSTPYGIYITSQNNAVTTLRRFLDIELGIP

SEQ ID NO: 33813 - DNA, 672 bp, Unknown
  Obtained from environmental sample
  misc_feature (1)..(672): n is a, c, g, or t
gtgataccggagttaaaagacatttccgcctccaacgcggacgcggaagtaaaaatagccgctctgcaatttgctgaaagcgcgtcatggattaccgaccagggcccgattccggttgataatttcctttggcgttatgtagacgccttcggcaataccgctatgggaagcgccttcaggaagttgaacgaaaagctgtcaaccaaaggttttatgagcgaggcttttggctcctacgccccggtaatttttctgctttcggacggagagcctacggacgattttgccggagggctggaggaattaaaacacaacaagtggtttaacgcggcgattaaagtcgcggtagctataggcgatgacgccaataaaaaccgtcttgccgaatttacaggctcaacggagtccgtgcttgaagtacacaacgccgctatgctgcgtaaaacgataaaatttatgtcggtacgggcttcccagattgcaagtaaaagcgtccaggtcagccctgtaaaacaggccgccggcatttcaacagcggtaaatagttctgttatccccgcgaatagcgttgattctgttgatgataaagctttgtcggcaaagcaaaactcgttaaatgaacagttagctgaaataaaaaccttcgccgcaagcggagatgacgaatggtag

SEQ ID NO: 33814 - protein, 223 aa, Unknown
  Obtained from environmental sample
  misc_feature (1)..(223): Xaa is any amino acid
MIPELKDISASNADAEVKIAALQFAESASWITDQGPIPVDNFLWRYVDAFGNTAMGSAFRKLNEKLSTKGFMSEAFGSYAPVIFLLSDGEPTDDFAGGLEELKHNKWFNAAIKVAVAIGDDANKNRLAEFTGSTESVLEVHNAAMLRKTIKFMSVRASQIASKSVQVSPVKQAAGISTAVNSSVIPANSVDSVDDKALSAKQNSLNEQLAEIKTFAASGDDEW

SEQ ID NO: 33815 - DNA, 1236 bp, Unknown
  Obtained from environmental sample
  misc_feature (1)..(1236): n is a, c, g, or t
ttgatggacagatatggtgcatatgattataaccatggtgcggaaaacatctgccttaacagtcaccctaccggctgtgccgctacggtactgcggcagattgaatacgcaaaaaaatcccttcaaccggcaaccggcgcaaagccgcgcctggcgctgatcattggctgttccaacggctacggcctttcgagccgcattgccgccgcctttggctatgggactgttacagtcggagtctcaaaagagaaagccgcatcggaaaaccataccgcaacgccgggtttttacaacaacatggtctttgacagcgaagcggcaaaagcgggtctgattaccagaacgctggatggtaacgcttttctgggagaaatgaaagccaacaccgttctggctgtgcgcgaagccgcggaggaagcggggatttccgccaaaatcgaccttgttgtttattccctggcttctcctgtcaggacggatcctaaaactggtatcctgtacaaatccgcaatcaagcctgttggagaatcattctccggcctgaccctcaacatgatgaacggaacgttcaatacaacccacgctgaatccgccacggaggacgaaatcttcagcacgataaaagttatgggcggcgaggactgggagtactggatggaagcgctgtacaaagaaggactgctctcccccaaaacaagaaccgtcgcttattcgtaccttggaccggaacattcatggccgatttacaaaaacggcacgataggaaaagccaaagaagatttggaaagagcctgcgttgaaataaacaaaacatacgcggagccgggtaaaatagcgggcgcgtgggtctctgtaaacaaagcgctcgttacccgttcaagcgcggtaattccgattattcccctttacatttcatgcttgttcaaagtgatgaaagatatgaatcttcacgaaggctgcatccagcagattgtacgcctgtaccgcgaccgcctgtacgccgccgaaagcggcgacccagaaatggtgcctgttgatcgcaaaggacgcatccgcattgacgactgggaaatgcgcgaagatgtgcaaaaggcgactatggaaaaaatgaaaaatgtaacgccggaaaatgtttttacacaaaccgatgtcgcggggttcaagcacgattttcttgaagcgcacggttttgatgttgcaggcgttgattacgatgcggacgttgacataggatag

SEQ ID NO: 33816 - protein, 411 aa, Unknown
  Obtained from environmental sample
  DOMAIN (14)...(408): Short-chain alcohol dehydrogenase
  misc_feature (1)..(411): Xaa is any amino acid
MMDRYGAYDYNHGAENICLNSHPTGCAATVLRQIEYAKKSLQPATGAKPRLALIIGCSNGYGLSSRIAAAFGYGTVTVGVSKEKAASENHTATPGFYNNMVFDSEAAKAGLITRTLDGNAFLGEMKANTVLAVREAAEEAGISAKIDLVVYSLASPVRTDPKTGILYKSAIKPVGESFSGLTLNMMNGTFNTTHAESATEDEIFSTIKVMGGEDWEYWMEALYKEGLLSPKTRTVAYSYLGPEHSWPIYKNGTIGKAKEDLERACVEINKTYAEPGKIAGAWVSVNKALVTRSSAVIPIIPLYISCLFKVMKDMNLHEGCIQQIVRLYRDRLYAAESGDPEMVPVDRKGRIRIDDWEMREDVQKATMEKMKNVTPENVFTQTDVAGFKHDFLEAHGFDVAGVDYDADVDIG

SEQ ID NO: 33817 - DNA, 384 bp, Unknown
  Obtained from environmental sample
  misc_feature (1)..(384): n is a, c, g, or t
ttgcccttcgcctcgggccgaccttatgccggccgagcaggtggccgaaggacttctggccgccttgaccgccaccggcctggccggaagccgggtgctcctggcccgggcccgggccggccgggatgttttacccataggcctggcccgggccggagcccaggtgcgagacctctccctctatgtcacctaccacccggattggaccgaacccctgccgggccggccggacctgaccaccttaaccagttcctccacggctctggggctggccgcccgggtgcccgaatccgaacgggccctgttcccggccgcctccataggcccggtcaccacccggaccgccctggacctgggcttcccggtggcggtggaggcttatga

SEQ ID NO: 33818 - protein, 127 aa, Unknown
  Obtained from environmental sample
  misc_feature (1)..(127): Xaa is any amino acid
MPFASGRPYAGRAGGRRTSGRLDRHRPGRKPGAPGPGPGRPGCFTHRPGPGRSPGARPLPLCHLPPGLDRTPAGPAGPDHLNQFLHGSGAGRPGARIRTGPVPGRLHRPGHHPDRPGPGLPGGGGGL

SEQ ID NO: 33819 - DNA, 414 bp, Unknown
  Obtained from environmental sample
  misc_feature (1)..(414): n is a, c, g, or t
atgccggccgagcaggtggccgaaggacttctggccgccttgaccgccaccggcctggccggaagccgggtgctcctggcccgggcccgggccggccgggatgttttacccataggcctggcccgggccggagcccaggtgcgagacctctccctctatgtcacctaccacccggattggaccgaacccctgccgggccggccggacctgaccaccttaaccagttcctccacggctctggggctggccgcccgggtgcccgaatccgaacgggccctgttcccggccgcctccataggcccggtcaccacccggaccgccctggacctgggcttcccggtggcggtggaggcttatgaatcaaccatctccggcctggtcgaagccgtgacccgctatttcagccacccatga

SEQ ID NO: 33820 - protein, 137 aa, Unknown
  Obtained from environmental sample
  misc_feature (1)..(137): Xaa is any amino acid
MPAEQVAEGLLAALTATGLAGSRVLLARARAGRDVLPIGLARAGAQVRDLSLYVTYHPDWTEPLPGRPDLTTLTSSSTALGLAARVPESERALFPAASIGPVTTRTALDLGFPVAVEAYESTISGLVEAVTRYFSHP

SEQ ID NO: 33821 - DNA, 954 bp, Unknown
  Obtained from environmental sample
  misc_feature (1)..(954): n is a, c, g, or t
gtggttgcccagggtcacgatgggctcccggctgcggtagttttcttccagcttcatgattcgggcgccggggaagatttgggggaagtccatgatgtttctgaaactggccccccggaaggcgtagatggattgggcctcgtcgcccacggcggtgacccgctggtggtcccggcccaaaaggtgggtcaggcgggcctggaccgggttggtgtcctggtattcatccaccaggatgtaatcatagcggccggccaggcgttggcggatatcttcgtgatcccggagcacggtttccaggcctgtcaggaggtcgtcgaaatccatcagggcgtttttgagcttctggtcccggtattcccgggcgattttttccaacaggggggtgtattcctggaagtgggcgaagttttcggccacgatctcggccaggggccggtccttgttgaccgcctggctcaggaggctgaacagggctcctttttgagggaagcgcttgtatttttttatttcagagaggtcgccgcggatgcgggccagaagggcttcggcgtcgtcctggtctatgatggtgaagccgtccgggtagcccaggagatgggccgtgggccggagaagggcgttggccagggagtgaaaggtgcccccggagacctcgccggcccggtgtccggccagggccatggcccggtccagcatttcccgggccgccttgcgggtgaaggtcaacaggagaatggccggcggcgggacgccccggcccaccaggtaggccacccggtggaccagggtgcgggttttgccgctgccggccccggccacgatgagcaaggggccgccttcataggtggccgcggccagttgggaagggttcaggcgggcggccaggtccggcggcggggccgcttgggttttgaccggttcaggcggctcgggctcgtggtctttaaataa

SEQ ID NO: 33822 - protein, 317 aa, Unknown
  Obtained from environmental sample
  misc_feature (1)..(317): Xaa is any amino acid
MVAQGHDGLPAAVVFFQLHDSGAGEDLGEVHDVSETGPPEGVDGLGLVAHGGDPLVVPAQKVGQAGLDRVGVLVFIHQDVIIAAGQALADIFVIPEHGFQACQEVVEIHQGVFELLVPVFPGDFFQQGGVFLEVGEVFGHDLGQGPVLVDRLAQEAEQGSFLREALVFFYFREVAADAGQKGFGVVLVYDGEAVRVAQEMGRGPEKGVGQGVKGAPGDLAGPVSGQGHGPVQHFPGRLAGEGQQENGRRRDAPAHQVGHPVDQGAGFAAAGPGHDEQGAAFIGGRGQLGRVQAGGQVRRRGRLGFDRFRRLGLVVFK

SEQ ID NO: 33823 - DNA, 1437 bp, Unknown
  Obtained from environmental sample
  misc_feature (1)..(1437): n is a, c, g, or t
ttggaaatatacgataaaggagaattggtatcaacatcagttgaagtgcgcgcatggttcaaaaaagataacgagggatattctttacttgggtattttaacggtattagcaatgaaatctcaggagcggaattaaaaacaaaacgttatcagataactaaatccaaacttacgcccggaaagtatactattaagatagaacgcgtaacctcagactcaacggacagtaaaatagtagatcaggtatatgtcggttcaatcaggtcgagaaagacaaaagataaggatgggaatattatccgccctatccgcgctgaacggcagaaagatttgacgattatcgcgcttcgggtaatggcgacgggaaagcttaataacgtgatcgaaagttttaactatattgctacatcgaaggttccggtatattcaggcggcggtattggttcattatattggcttagcgccgaagaaaccagcaacccggccgcgctgcttttatacgctctccgaggacgcgcggcgcaggaatctgtatctccggatgatatcgactggcaatcatttcaggatttttatacatggtgtgaagaacataattattcgtgtaacgcttacctgtccgagtccgtaacaatagcggagataatgaaaatgatcggaagcgttgcccgcgccgatatcctgcggatagattctaaaattaccgttgtccaggacattgagcgagcgtcgcacatggggctgttcacccccaagaactctataaattatagcataacaatgatgaaagccgatattcccgacgcgatagcgctacggtatattgctgaagattcaggttacacgcaaaacgaagcgcttatttataatacgacggatggcaaccgtggcgataaggagccggataaaatccagaaagttgatctttggggaattactaattcagaacaagtcagacgaattggtatgtacaattacgcatgtctgaaaaaccgtccgttcattcatacaatagaacttgatatcgaatatcttacttgtaacaaaggcgacttgattcaatacgccggcgatattgcgctgaccggatctatgcatggccgtattaccggcttgatatttaacgatactgtttgtactggaatccgcgttgatgagcctgttgaaacggaaccgggcaaacagtacgcggtaagaattagaaaatctgacggaacaattttgttgaaagatatcgccgcggttcaaaagccaaacgtgatatttttctctgaaccttttaaaaaagacaatatgccaagtgaaggcgatatctacgccttcggcgtccgtggttatgaggttattgaccttataataaccgatatccagccgcaggcgggattttacggcgactcttacttgcgtggaatacagtccggaaattttcggaagtga

SEQ ID NO: 33824 - protein, 478 aa, Unknown
  Obtained from environmental sample
  misc_feature (1)..(478): Xaa is any amino acid
MEIYDKGELVSTSVEVRAWFKKDNEGYSLLGYFNGISNEISGAELKTKRYQITKSKLTPGKYTIKIERVTSDSTDSKIVDQVYVGSIRSRKTKDKDGNIIRPIRAERQKDLTIIALRVMATGKLNNVIESFNYIATSKVPVYSGGGIGSLYWLSAEETSNPAALLLYALRGRAAQESVSPDDIDWQSFQDFYTWCEEHNYSCNAYLSESVTIAEIMKMIGSVARADILRIDSKITVVQDIERASHMGLFTPKNSINYSITMMKADIPDAIALRYIAEDSGYTQNEALIYNTTDGNRGDKEPDKIQKVDLWGITNSEQVRRIGMYNYACLKNRPFIHTIELDIEYLTCNKGDLIQYAGDIALTGSMHGRITGLIFNDTVCTGIRVDEPVETEPGKQYAVRIRKSDGTILLKDIAAVQKPNVIFFSEPFKKDNMPSEGDIYAFGVRGYEVIDLIITDIQPQAGFYGDSYLRGIQSGNFRK

SEQ ID NO: 33825 - DNA, 1611 bp, Unknown
  Obtained from environmental sample
  misc_feature (1)..(1611): n is a, c, g, or t
ttggccgaggcacttcgccttgtaattcggcgaaactgctccgcgtttattaacagcgatatccgcaaagcggttcagcagggcgcgggcagggaaaacattaccgccggaattgtatgttccatagtatcgaattatcttaaccgtgttgtcggaaaccgcacaatcggcggcaaaattttcctgcagggcggcgtcgcaaaaaaccccgccgttcctctcgctttcgctatgctgttgaacaaggaaatccttgttccgccgtcgcctgaacttatgggctgtttcggcgtagcgttactcgcaaagcgcaaaagagacgacgggcttcttgcggagcaggcaatcgttcttgacgacattattaaccgtgagattggctatgagcgtgtctttacatgccagtcatgcgaaaacctttgcccgatacaagtgttaaacgtaaacgatcataaatatatgttcggcgggcgctgtaacaaatacacgaatatgcgcaagcaggtaaaagacgtgcctgtgtttgattatgtcgagaaaaggcagaagatgttatttgaagaatttgccgctcccgtaaacgagcaaacatacaaacgcgattatgttgtcggcattccgcgcgctttttccgtgcatacgctttatcccctttacagttggttcttccatgaattgggaattaaaacattcctttctacggaagtcgcccacgcgggagttgcgagagctgaatcaacctactgcttccccgctgaaatagcgcacggagcgatacaggattgtttggataaaaaagccgattatgtgcttctgccgcatttccgtgatatgcccagttacgaggaaaaagtacacgcaaacttttgtccgattactcaagcgcttccttattacatgggaaaagctttccccgacatcgataaaaagaaatggcttccgcttgttgtaagttttaaattcggcgaaggaaaagcgctcgaattgttttgcgagatgacaaaacttttaggcatcagcgaagcggaaacaaaggcggcgtttgatactgcgtgggcgaaacaaaaaagttattttgaagcggcggaaaaaatgggacttcaagcgattgaggacgcgcgcaaagcggatcgtcctgttatcgccgtattgggcagaccgtacaacgcgtttacgcccgaagcgaacatgggtattccgcgcaagtttacaacacgcggctattcaatcgttccgtttgacattttgccgttccgcgacgaacttattttcccgaatatgtactggttctacggacagcaggacttaaaagcggcgaagctcctcaaaaaagaagacaacatttatcttacatttgtttcaaacttttcgtgcgctcccgactcgttcattctccattatgtgaaatggatgatggggcaaaaacccttcctcgtgcttgaattggattcccattcagccgacgccggagtcgatacccgcgttgaagcgttcctcgacatcatcgacggttaccgcgcgaagaaaaatcagtttgaagatgaacgttacgacaacggaatgaggtttgtctgcgaaaaatgtattcgggcgaattcgatttgcgcatag

SEQ ID NO: 33826 - protein, 536 aa, Unknown
  Obtained from environmental sample
  misc_feature (1)..(536): Xaa is any amino acid
MAEALRLVIRRNCSAFINSDIRKAVQQGAGRENITAGIVCSIVSNYLNRVVGNRTIGGKIFLQGGVAKNPAVPLAFAMLLNKEILVPPSPELMGCFGVALLAKRKRDDGLLAEQAIVLDDIINREIGYERVFTCQSCENLCPIQVLNVNDHKYMFGGRCNKYTNMRKQVKDVPVFDYVEKRQKMLFEEFAAPVNEQTYKRDYVVGIPRAFSVHTLYPLYSWFFHELGIKTFLSTEVAHAGVARAESTYCFPAEIAHGAIQDCLDKKADYVLLPHFRDMPSYEEKVHANFCPITQALPYYMGKAFPDIDKKKWLPLVVSFKFGEGKALELFCEMTKLLGISEAETKAAFDTAWAKQKSYFEAAEKMGLQAIEDARKADRPVIAVLGRPYNAFTPEANMGIPRKFTTRGYSIVPFDILPFRDELIFPNMYWFYGQQDLKAAKLLKKEDNIYLTFVSNFSCAPDSFILHYVKWMMGQKPFLVLELDSHSADAGVDTRVEAFLDIIDGYRAKKNQFEDERYDNGMRFVCEKCIRANSICA

SEQ ID NO: 33827 - DNA, 1134 bp, Unknown
  Obtained from environmental sample
  misc_feature (1)..(1134): n is a, c, g, or t
ttgaacgctgggcttgtggttgctgttgccgatgaccctggtatgcactcaagccaaaatgagcaagactcacgctactatgcccaaagtgcccacgttccaatgcttgaaccagcagacagccaagaagcgagggatttcacaatgctcgcttacgagttgagcgaaaaatacgacactccggtgtttttgcgcctcacaacacgaattgcgcactcacgttcttttgtggaaacaggagagagaaaagaagtagagcttccttacaagcaagacattcaaaaatatgtaatggttccagcaaatgcaaaaaaacgccaccccatagtggaagaacgcgaaaaaaaactttcaaacgatataaacaacaatttgtttgagggaaaaataaacaaaattgaatatggctcaaataaaataggcatcgtgtgttccggtgcggtttatcagtatgtaaaagaggctttgccggatttttcaattttcaaacttgaaatggtttatcccattgccgttgaaaatattagagagtttgcaagtaaatgcgaaaaactcatcgtagtggaagagcttgaaccttttattgaaaacacattaaaagcaaatggcataaaatgtagcggaaaagatttaaccggattgcaaggcgaactcagtgttcagaaaatacgcgaagtaatattagggcaaaagcctctgccagaactcacgcaaaatctccctgggcggcctccggttatgtgtgcgggttgcactcatcgcggagttttttatatcatcaataaattaaaactcaatgtggttggcgatattggttgctattcgttggggtgttcgccaccgctaaacgcaatgcactcgcttatctgtatgggtgcgtccatttcaaacgcacacggaatgtttcaggcaaagggcaaggagttttcaaaaaccaatatagccgttataggcgattccacctttatccacagcggaatcacaggtttaatagatgcggtctataataaatcgaacatcaccgttattattatggataaccgcacaacaggaatgacagggcaccaaaatcacccgggcacaggtctcaccataaaaggcgaacccacgcatacgcttctcggccgaatctga

SEQ ID NO: 33828 - protein, 377 aa, Unknown
  Obtained from environmental sample
  DOMAIN (270)...(377): Thiamine pyrophosphate enzyme, C-terminal TPP binding domain
  misc_feature (1)..(377): Xaa is any amino acid
MNAGLVVAVADDPGMHSSQNEQDSRYYAQSAHVPMLEPADSQEARDFTMLAYELSEKYDTPVFLRLTTRIAHSRSFVETGERKEVELPYKQDIQKYVMVPANAKKRHPIVEEREKKLSNDINNNLFEGKINKIEYGSNKIGIVCSGAVYQYVKEALPDFSIFKLEMVYPIAVENIREFASKCEKLIVVEELEPFIENTLKANGIKCSGKDLTGLQGELSVQKIREVILGQKPLPELTQNLPGRPPVMCAGCTHRGVFYIINKLKLNVVGDIGCYSLGCSPPLNAMHSLICMGASISNAHGMFQAKGKEFSKTNIAVIGDSTFIHSGITGLIDAVYNKSNITVIIMDNRTTGMTGHQNHPGTGLTIKGEPTHTLLGRI

SEQ ID NO: 33829 - DNA, 867 bp, Unknown
  Obtained from environmental sample
  misc_feature (1)..(867): n is a, c, g, or t
ttgacattttcgcataacggcgaagttaagataacataccccgaaagttatgtgtataccgtaagctggccggccgctgttgccgctcttgaaaaaagaatacacgtaataatccccgaaccgccgtacagtttcgggaaattcatcgccggccttgaatggcatcccagcagggacaaagttttcggtatttttccgatgatagcagggactatcgccgcgagtttaggagcgatcattttaggcgtgccgatagcactgttatgcgctctttttatggcggaattcctcgggcaaaaaaccgcgtccgtcgtacgagccggcgttgagcttcttgccgggattccttccgtagtgtacgggtttttcggacttatggtgatagttccgcttgttaaaaatattttcaaggtgtcgtcgggcaacactcttctttccgcaatcattgtgctggcgctaatgatactgccgacggtgataaccatcgccgaaacttcgctcagagctgtcccgtcttcggtgcgcgaagcaagtctttctctgggagctagcaagatgcagacggcgtggaaggttgtcctgccccacgccaattcgggagtaatcgccggtgttatactcgggatttcgcgcgcggtgggcgaaacaatggcggtaattcttgtggcgggaaactcgcctcagcttacggtaaatccgcttgccagcgtaagaacgctcacatctacaatcgccatggaaatgggttacgcatcgggcaggcacagcgaaatgcttttttcaatcggcgtaactttattctcgatcatactcattctttacagtttgattttatggtaccgccgccgtatggaggctgaagtatga

SEQ ID NO: 33830 - protein, 288 aa, Unknown
  Obtained from environmental sample
  DOMAIN (68)...(286): Binding-protein-dependent transport system inner membrane component
  misc_feature (1)..(288): Xaa is any amino acid
MTFSHNGEVKITYPESYVYTVSWPAAVAALEKRIHVIIPEPPYSFGKFIAGLEWHPSRDKVFGIFPMIAGTIAASLGAIILGVPIALLCALFMAEFLGQKTASVVRAGVELLAGIPSVVYGFFGLMVIVPLVKNIFKVSSGNTLLSAIIVLALMILPTVITIAETSLRAVPSSVREASLSLGASKMQTAWKVVLPHANSGVIAGVILGISRAVGETMAVILVAGNSPQLTVNPLASVRTLTSTIAMEMGYASGRHSEMLFSIGVTLFSIILILYSLILWYRRRMEAEV

SEQ ID NO: 33831 - DNA, 327 bp, Unknown
  Obtained from environmental sample
  misc_feature (1)..(327): n is a, c, g, or t
ttggttgaggtaagtatgagtacaagaaacattttttcggaagagttaagccggctgcgccacgatattttatcaatggcggcaagggtggaaggaaatctgggcaaggcgctttccgcgttaagaacgcgtaacgctgagcttgcgaatgaagtacgcgcggacgattccgccgtggacgccctgcaattgcagattgaggacgacgccgcgattgttatcgctacgcagcagcctgtggcaagcgatctgcgcgagcttgtttcggtttttaaacttacaagcaatattgagagggtggggatcacgccgctcggccgaatctga

SEQ ID NO: 33832 - protein, 108 aa, Unknown
  Obtained from environmental sample
  DOMAIN (23)...(103): PhoU family
  misc_feature (1)..(108): Xaa is any amino acid
MVEVSMSTRNIFSEELSRLRHDILSMAARVEGNLGKALSALRTRNAELANEVRADDSAVDALQLQIEDDAAIVIATQQPVASDLRELVSVFKLTSNIERVGITPLGRI

SEQ ID NO: 33833 - DNA, 756 bp, Unknown
  Obtained from environmental sample
  misc_feature (1)..(756): n is a, c, g, or t
atgagcggtaaaaaaatagaagtaaacagcctggatctttattatggtgatttcaaggccttgtcaaatatcaatttttcgctcgcgaagcaggatgtggcggcgcttataggaccttcaggctgcgggaaatccacgtttatccgcatattaaaccggatgaacgatttaattccgtcatgccgcataacgggcgaagtttttctggacggcaaggatatttacggcgctatggacgttacggaactgcgcagcagggtggggatggtgtttcaaaagccaaatccatttaacatgagcgtgtttgacaatgtcgcgtacgggaaaagaatgcagggtttaaaaaacaaagggcgcattgcggacattgtggaaatctcgcttaagaaagcggccctttgggacgaggtaaaggacaggctgaaaaagccggctcaggctctttcaggcggacaacagcaaaggctctgtatagcaagaactatcgcgatggagcctgaaattattttgatggacgagccgacaagcgctcttgatccaatcgcgacggggcgcattgaggaacttataggagagttaaaaaaagattatagtataataattgttacgcacgctatgcatcaggcttcaagggtaagtaataaaacggctttttttcttttaggagagttgatcgagtataataatacaagagaagtttttacaaacccaaaagataaaagaacggaagattatatttcgggaaggtttggttga

SEQ ID NO: 33834 - protein, 251 aa, Unknown
  Obtained from environmental sample
  DOMAIN (31)...(222): ABC transporter
  misc_feature (1)..(251): Xaa is any amino acid
MSGKKIEVNSLDLYYGDFKALSNINFSLAKQDVAALIGPSGCGKSTFIRILNRMNDLIPSCRITGEVFLDGKDIYGAMDVTELRSRVGMVFQKPNPFNMSVFDNVAYGKRMQGLKNKGRIADIVEISLKKAALWDEVKDRLKKPAQALSGGQQQRLCIARTIAMEPEIILMDEPTSALDPIATGRIEELIGELKKDYSIIIVTHAMHQASRVSNKTAFFLLGELIEYNNTREVFTNPKDKRTEDYISGRFG

SEQ ID NO: 33835 - DNA, 648 bp, Unknown
  Obtained from environmental sample
  misc_feature (1)..(648): n is a, c, g, or t
gtggtgcttgtttcgatagccgtgtcccttcccgtcggaattgccaccgcgatatttttgaacgagtactccggtaattcctcatggataaaaatcctgcgtctcgcgatagaaacgcttgcgggaattccttccattatctacgggcttttcggccttcttatgttctgcaggctgttaaatttcggccagtccataattgccggggctttcactttaagcataatgattcttcctgtcattatccgcacaaccgaagaatcccttaaatcaatacccgatactttccgtgaaggctctctcgcgttaggcgcaaccaaattccagactattattcatgttgtactgccatccgccctgccgggaattgtaacctccgtgattctcgcgataggcagggtagtgggagaatccgcgcccgtgctgcttacggtcggtcttacaagaaatatgcctcgtacaatttttgaatcaggaagaacccttacaatccacctttattacctgacaaacgaagctgtacgccccgaagatttcggcattgctttcgcgaccgcctttatgctgataattcttgttgtcgtaattaataccgcgacaaagattatgaccgcgaatttcagaaaaaaacttggaggaatactatga

SEQ ID NO: 33836 - protein, 215 aa, Unknown
  Obtained from environmental sample
  DOMAIN (1)...(213): Binding-protein-dependent transport system inner membrane component
  misc_feature (1)..(215): Xaa is any amino acid
MVLVSIAVSLPVGIATAIFLNEYSGNSSWIKILRLAIETLAGIPSIIYGLFGLLMFCRLLNFGQSIIAGAFTLSIMILPVIIRTTEESLKSIPDTFREGSLALGATKFQTIIHVVLPSALPGIVTSVILAIGRVVGESAPVLLTVGLTRNMPRTIFESGRTLTIHLYYLTNEAVRPEDFGIAFATAFMLIILVVVINTATKIMTANFRKKLGGIL

SEQ ID NO: 33837 - DNA, 312 bp, Unknown
  Obtained from environmental sample
  misc_feature (1)..(312): n is a, c, g, or t
ttggcttctttagcctcttttgcctcccgcgctgcccttgcctcacgggcttccctgacttctcttgcctcttttaattcccttgcttcacgggcttctcttgccgcccttgcttccctaatttcacgttcttccctaatttcccttagttcccttgcttcacgcgcctctcttgcctctctcgcctcgcgcgattctcttgcttccattgtcatagccataagccacgcaaggaattcagggtcattactgttcgcgcctgataaaaacgcgtctttgaaagttggatcagccacagtaaaatcggggtag

SEQ ID NO: 33838 - protein, 103 aa, Unknown
  Obtained from environmental sample
  SIGNAL (1)...(29)
  misc_feature (1)..(103): Xaa is any amino acid
MASLASFASRAALASRASLTSLASFNSLASRASLAALASLISRSSLISLSSLASRASLASLASRDSLASIVIAISHARNSGSLLFAPDKNASLKVGSATVKSG

SEQ ID NO: 33839 - DNA, 705 bp, Unknown
  Obtained from environmental sample
  misc_feature (1)..(705): n is a, c, g, or t
atgctggaacaggagatacggcttgaggaggaggctctcggcgaatccgggggcgaaattttcatcaggctctgccgcaccctgtacccccagggcggcgagaaactgttgatcaccgcccttacgggaagggaagtgccctcgggcggcctgcccatggacgcgggctgcatcgtgcataatgtcggttccatcatagcaatcgccgaagcgttctacctcggcaagcccctgattgaccgcgagcttaccgtttccggcggggcctgcaaaaccccaaaaaatatccgcgcccccattggcgcttcgttaaacgacatgcctgttgagtttatggatatagatcatgacaggattgcaaagatactgtacggcggccccatgatgggcagcgccgtttcttcgctcgatgtgccgatacagaaaaacacttccggcattatactgatgacgaaagaagaaacccgcaaggacgcggaaagcccctgtatccgctgcggacgctgtataagatgctgctcctgccgcctcagcccggtaataatgaacaacagccttgaagcgggcgattttgattacgccgtcaaggccggcctgcttgactgtatggaatgtgggagctgcacgtacaactgcccggcaaggatcaaactggttcagcgtttccgtgtcgggaaacaaaagttaaagatgttgaaaaaataa

SEQ ID NO: 33840 - protein, 234 aa, Unknown
  Obtained from environmental sample
  DOMAIN (4)...(127): Respiratory-chain NADH dehydrogenase 51 Kd subunit
  misc_feature (1)..(234): Xaa is any amino acid
MLEQEIRLEEEALGESGGEIFIRLCRTLYPQGGEKLLITALTGREVPSGGLPMDAGCIVHNVGSIIAIAEAFYLGKPLIDRELTVSGGACKTPKNIRAPIGASLNDMPVEFMDIDHDRIAKILYGGPMMGSAVSSLDVPIQKNTSGIILMTKEETRKDAESPCIRCGRCIRCCSCRLSPVIMNNSLEAGDFDYAVKAGLLDCMECGSCTYNCPARIKLVQRFRVGKQKLKMLKK

SEQ ID NO: 33841 - DNA, 1155 bp, Unknown
  Obtained from environmental sample
  misc_feature (1)..(1155): n is a, c, g, or t
atgacaacttaccttttaaaaccgggagagtttaccctgaaggggggcaaccgtaagttttttgaaaaaatcctccgaaataatctggcttcacttctcaagggttccggagccaaaatcattacgagtaacggccgtctttttgtaaactgtccggagggtatggaagataaagccgaagattcgctagaccgactgatgggaatttcaggctgggcaaaagcaagaatcgcggaaaagattattgataaagtaatttccgcctgtgttgaggaaggcaaactgctttgggaaaagggaaaaaagacttttaaaatcgaggcgcgcaggacggacaaaagctttccccttgattcctaccggatccgctgccttgcgggggaggccgttcagaaagaagtccccggcttaaaggtcaacgttcgtgaacccggggccgtaatcgaagtggaaatcagggagaaggcgtatgttttcgcgatgtctcataagggaaggcgggggcttcccgtagggacagcgggccgcggccttcttcttctgtcggggggcattgattctcccgtggccggctatttgatggcgtcaaggggcatggcgcttgacgcggtgtattttcacgcctttccatatacctccgataaggcgctggaaaaaaccgtaaaactggcggaaatactggggcgctatacgctgggtattcgcctctttgttatcggctttacgccgatagaggcgaggataaaagaaaaagccccggaagcgtggaggacgattcttcttagaatggcgatgatggaatgcgccgagaaattggcaataagtgaaagggacaaatgccttattagcggcgagagcctttcgcaggtggcaagccaaacgatagaaaatattacctgtgtccagcacaggctgaaactgccggttctgcggcccctaattggcaccaacaaggaagatatcatcgccatgggagaagccataggaacctacaaaacatcaatccttccatacgaagactgctgtgttcttttcagcccgtctcacccggtactcangggagacctgatggaggcaggaaaactttacgaaggtttggatgcagggccattaatagaagaagcactaaaaaacgcggaaattgtcaaatgttag

SEQ ID NO: 33842 - protein, 384 aa, Unknown
  Obtained from environmental sample
  DOMAIN (70)...(162): THUMP domain
  misc_feature (1)..(384): Xaa is any amino acid
MTTYLLKPGEFTLKGGNRKFFEKILRNNLASLLKGSGAKIITSNGRLFVNCPEGMEDKAEDSLDRLMGISGWAKARIAEKIIDKVISACVEEGKLLWEKGKKTFKIEARRTDKSFPLDSYRIRCLAGEAVQKEVPGLKVNVREPGAVIEVEIREKAYVFAMSHKGRRGLPVGTAGRGLLLLSGGIDSPVAGYLMASRGMALDAVYFHAFPYTSDKALEKTVKLAEILGRYTLGIRLFVIGFTPIEARIKEKAPEAWRTILLRMAMMECAEKLAISERDKCLISGESLSQVASQTIENITCVQHRLKLPVLRPLIGTNKEDIIAMGEAIGTYKTSILPYEDCCVLFSPSHPVLXGDLMEAGKLYEGLDAGPLIEEALKNAEIVKC

SEQ ID NO: 33843 - DNA, 891 bp, Unknown
  Obtained from environmental sample
  misc_feature (1)..(891): n is a, c, g, or t
ttggccgaggattacaaagcggcgattcacgccggggaacttcgcgaactggaaaatgaagcgcagaaattatcggactttgaaaaattggcgggttttatcaataccgccgcctcctgttttactgagggagaacagtcggcgttaagccttacgcgcagggcgaagaacgcccttgatggcgcgtccttggtcgatacgtcgcttggggaaataaacagaaggtttgaaaacctgtactatgaagctgaagatatcgcctcggaattccgcacttacaaagagaacctcgcttttgatccgcaaagactggaagaggtaaatgagcggttggcgttcttgaataaattaaaaaagaaatacgccaaagatagccagccgggaaacgaagaagaggcgatactgttatacaaaacaaacgctcaggcggaaatagaagccctttgcggtgcggaagaaaacaggggcaagttaaaagaggcgattggcgttttggaaaaagcgattgtttcaaaagcgcaggttttaaaggaaaaacgcacggcggccgcggtcaaattaagccaactgataacggaaatattaaaaaatcttggaatgcctaacgcccgttttcaggcggcggttttaccccgtaaaaatgaagggcagatttcttacggtccttatggaacggaagatatcgactttttaatttcagcaaatacgggtgagccgcttaaagatttggcaaaaatagcctccggtggggagctttccagggtaatgttggctattaaaaccgctcttttgtccgatacgcggcgcgatgaaacggaaagcgttgaaacccttatttttgacgagatagataccggtattggggggggaagtcgctttaaaagtgggtga

SEQ ID NO: 33844 - protein, 296 aa, Unknown
  Obtained from environmental sample
  misc_feature (1)..(296): Xaa is any amino acid
MAEDYKAAIHAGELRELENEAQKLSDFEKLAGFINTAASCFTEGEQSALSLTRRAKNALDGASLVDTSLGEINRRFENLYYEAEDIASEFRTYKENLAFDPQRLEEVNERLAFLNKLKKKYAKDSQPGNEEEAILLYKTNAQAEIEALCGAEENRGKLKEAIGVLEKAIVSKAQVLKEKRTAAAVKLSQLITEILKNLGMPNARFQAAVLPRKNEGQISYGPYGTEDIDFLISANTGEPLKDLAKIASGGELSRVMLAIKTALLSDTRRDETESVETLIFDEIDTGIGGGSRFKSG

SEQ ID NO: 33845 - DNA, 456 bp, Unknown
  Obtained from environmental sample
  misc_feature (1)..(456): n is a, c, g, or t
atgggcatacgcagggtgcaccagccgaaggaagaggagcgcgacatcaccggcatcttcgcccgctacaacgtgcttttggcggaagacgccgagataaacgccgagatcgtgaagagcctgctggagccgacggacatctccatagactgcgccgtaaacggcacggaggcggtaaaactgttctcggcggcgccggagaagtacaacctgatcttcatggacgtgcagatgccggaaatggacggtttggaggccacgcggcgcataagggcgctggacaccccgcgcgccaaaaccatacccatagtcgccatgacggcgaacgtcttcaaggaggacgtggacatgtgcctggcggcggggatggacgaccatatagggaaacccatcgacatggacgaactgatcggaaggctgaacaaatatttacgttcggcgaccagtaagatataa

SEQ ID NO: 33846 - protein, 151 aa, Unknown
  Obtained from environmental sample
  DOMAIN (23)...(141): Response regulator receiver domain
  misc_feature (1)..(151): Xaa is any amino acid
MGIRRVHQPKEEERDITGIFARYNVLLAEDAEINAEIVKSLLEPTDISIDCAVNGTEAVKLFSAAPEKYNLIFMDVQMPEMDGLEATRRIRALDTPRAKTIPIVAMTANVFKEDVDMCLAAGMDDHIGKPIDMDELIGRLNKYLRSATSKI

SEQ ID NO: 33847 - DNA, 549 bp, Unknown
  Obtained from environmental sample
  misc_feature (1)..(549): n is a, c, g, or t
gtggacgctcatcgaggccccggccaaggaggccggcatcgacaaattcatcccgaaaccgatctttccgtcaagcatagtcgactcgataaacgaggttatgggcatacgcagggtgcaccagccgaaggaagaggagcgcgacatcaccggcatcttcgcccgctacaacgtgcttttggcggaagacgccgagataaacgccgagatcgtgaagagcctgctggagccgacggacatctccatagactgcgccgtaaacggcacggaggcggtaaaactgttctcggcggcgccggagaagtacaacctgatcttcatggacgtgcagatgccggaaatggacggtttggaggccacgcggcgcataagggcgctggacaccccgcgcgccaaaaccatacccatagtcgccatgacggcgaacgtcttcaaggaggacgtggacatgtgcctggcggcggggatggacgaccatatagggaaacccatcgacatggacgaactgatcggaaggctgaacaaatatttacgttcggcgaccagtaa

SEQ ID NO: 33848 - protein, 182 aa, Unknown
  Obtained from environmental sample
  misc_feature (1)..(182): Xaa is any amino acid
MDAHRGPGQGGRHRQIHPETDLSVKHSRLDKRGYGHTQGAPAEGRGARHHRHLRPLQRAFGGRRRDKRRDREEPAGADGHLHRLRRKRHGGGKTVLGGAGEVQPDLHGRADAGNGRFGGHAAHKGAGHPARQNHTHSRHDGERLQGGRGHVPGGGDGRPYRETHRHGRTDRKAEQIFTFGDQ

SEQ ID NO: 33849 - DNA, 864 bp, Unknown
  Obtained from environmental sample
  misc_feature (1)..(864): n is a, c, g, or t
atggccatgcagaaactaaaaaacataactgaatccaaaaagacgcggacggagaacgagcgccgaaacgaagtgcggacgaggctaaagtttgccgcgtactccaacccggaagagctttttgagagccttggcgcaacgccggatgggctaaacgaagaccaagtggaagaatcccgcgacaagtacggcgaaaacaccgttaccaggggcgaaaaagaatccctcttcaggcgggtggccgatgccttcatcaacccctttaccataatcctatttgtgcttgctgttgtgtctgccatcacagacatccatcttgcaggcccaggcgaggccaaccccaccacggtcataatcatcaccacaatggtgctggtgtcgggtgcacttagatttgtgcaagaaactagaagcggccacgcagccgagaacctgctgaaaatgatcaagaccaccacaaacgttcagcgggtcgaagaaggcaagcgggagataccgctggaagatgttgtagtgggcgacatagttcacttggccgctggcgacatgatcccagccgaccttcgcatcctcttcgccaaggacttgttcatcggacagtcggccctaacgggggagagcgtagccgtcgagaaaacagccagcgcggccaagaacggagaatgcgccctaacagaaatacccaacttggcattcatgggtaccaacgtagtcagcggcagcgcatcgggcgtggttgtggccgtgggggacgacaccatttttggcgaaatggccaagcatgtcaccgacaagcccgtgcagaccagcttgaaaagggcgtcaactctgtctcttggctgctcatcaggttcatgctggtga

SEQ ID NO: 33850 - protein, 287 aa, Unknown
  Obtained from environmental sample
  DOMAIN (23)...(104): Cation transporter/ATPase, N-terminus
  misc_feature (1)..(287): Xaa is any amino acid
MAMQKLKNITESKKTRTENERRNEVRTRLKFAAYSNPEELFESLGATPDGLNEDQVEESRDKYGENTVTRGEKESLFRRVADAFINPFTIILFVLAVVSAITDIHLAGPGEANPTTVIIITTMVLVSGALRFVQETRSGHAAENLLKMIKTTTNVQRVEEGKREIPLEDVVVGDIVHLAAGDMIPADLRILFAKDLFIGQSALTGESVAVEKTASAAKNGECALTEIPNLAFMGTNVVSGSASGVVVAVGDDTIFGEMAKHVTDKPVQTSLKRASTLSLGCSSGSCW

SEQ ID NO: 33851 - DNA, 639 bp, Unknown
  Obtained from environmental sample
  misc_feature (1)..(639): n is a, c, g, or t
ttgataggcatcaatcttcttagggagggtcttgacctgccggaggtggcccttgtggccatactcgacgccgacaaggagggatttttgcgctccgcgcgctcgatcgtgcagatcgccggacgcgcggcgcggaatatcaacgggcggatcaccctctacgccgacacggtcaccgactcgattaaaaaagctatggaggagagcgagcggcggcgcgccaaacaattggcgtacaacaaggagcgcggcatcaccccgcgcagcgcggagaggcggatagaagccatgaccgcgccgtacggggccgcgtccgaagagggcggcttaaccgagaccgccgaaccgcgcgccggatacggcaagagcggcaggggcaggcggccgtccaaacaaaagcccgacgcagagcaacgcgggcgcggcgggaaaataccgtcggcaaccgccggtaataacctattattggagatagaggccgaaatgatagaggccgccaaaaacttagacttcgaaagggccgcgcaactccgcgacaaaatggccgcgatgatacagacgacggaaccgccctcatgggtatccccgaccgcgcagatccgcgaaaaactaataacaaaagacaagaggaaaaaatga

SEQ ID NO: 33852 - protein, 212 aa, Unknown
  Obtained from environmental sample
  DOMAIN (152)...(187): UvrB/uvrC motif
  misc_feature (1)..(212): Xaa is any amino acid
MIGINLLREGLDLPEVALVAILDADKEGFLRSARSIVQIAGRAARNINGRITLYADTVTDSIKKAMEESERRRAKQLAYNKERGITPRSAERRIEAMTAPYGAASEEGGLTETAEPRAGYGKSGRGRRPSKQKPDAEQRGRGGKIPSATAGNNLLLEIEAEMIEAAKNLDFERAAQLRDKMAAMIQTTEPPSWVSPTAQIREKLITKDKRKK

SEQ ID NO: 33853 - DNA, 723 bp, Unknown
  Obtained from environmental sample
  misc_feature (1)..(723): n is a, c, g, or t
gtgattgtgagtaacggtggtacctttgttatgcgcagcggtacaatctccggtaacactgcttctgattctggtggcggggtgcttgtaatagatggggtctttactatgaacggcggtacaatttccggcaatatcgcctccagcgattttggcggcggggtgtttgtgagtaacggtggtacctttgatatgcgcagcggtacaatctccggtaacactgcttctgattctggtggcggggtgcttgtaatggatggggtctttactatgaacggcggtacaatttccggcaatatcgcctccagcaattttggcggcggggtgtttgtgagtaacggtggtacctttgatatgcgcggcggtacaatctccaaaaatatcgccaacagctggggcggcggggtgtttgtgtatgggagtggtacctttacaatgacaaacggtacaatctccggtaacactgcttctgattctggtggcggggtatatgtacaatctactggaaactttatcaagcatggcggaaccatcaccggttatggcagcgacacaagaaatggcaatgcggtaaggaccaatacaaataacgcaatatccaacagaggccacggggtgtatatagaatcaaacccagtcaaacgcaaagagaataccgcagggcctgcggtgaatctgtcttttgacagaggcgtatcaagcacagcaggctgggataattga

SEQ ID NO: 33854 - protein, 240 aa, Unknown
  Obtained from environmental sample
  misc_feature (1)..(240): Xaa is any amino acid
MIVSNGGTFVMRSGTISGNTASDSGGGVLVIDGVFTMNGGTISGNIASSDFGGGVFVSNGGTFDMRSGTISGNTASDSGGGVLVMDGVFTMNGGTISGNIASSNFGGGVFVSNGGTFDMRGGTISKNIANSWGGGVFVYGSGTFTMTNGTISGNTASDSGGGVYVQSTGNFIKHGGTITGYGSDTRNGNAVRTNTNNAISNRGHGVYIESNPVKRKENTAGPAVNLSFDRGVSSTAGWDN

SEQ ID NO: 33855 - DNA, 489 bp, Unknown
  Obtained from environmental sample
  misc_feature (1)..(489): n is a, c, g, or t
atggaagtctataaaattggcgacaaaggccctgctggagggattatcgtttacgtttacaacagtgagaaaaattcctacggtcggcataactacttagaagctgctccgttagatataggaaaagccgcatgggggctttatggggtagatattgaccatatcagtgacgatggtaaacggagtacggaacggattattgctattcttaatcagaatagagaaagtgggaaagcagcgcaattatgcagggcgtatacattaaatggatacagcgattggtatcttccaagcatgggtgatttgcaaatattgttcaagtatagtctggcaacaaataacaaattgggcttgtccaatggctggtattggtcatcgcatacgagtggctatggtgattacgctaatggtatgagctaccccagtctttatggatacgaaggttttaggaatgctacaggttcggttcgtcctgtgcgagctttttaa

SEQ ID NO: 33856 - protein, 162 aa, Unknown
  Obtained from environmental sample
  misc_feature (1)..(162): Xaa is any amino acid
MEVYKIGDKGPAGGIIVYVYNSEKNSYGRHNYLEAAPLDIGKAAWGLYGVDIDHISDDGKRSTERIIAILNQNRESGKAAQLCRAYTLNGYSDWYLPSMGDLQILFKYSLATNNKLGLSNGWYWSSHTSGYGDYANGMSYPSLYGYEGFRNATGSVRPVRAF

SEQ ID NO: 33857 - DNA, 567 bp, Unknown
  Obtained from environmental sample
  misc_feature (1)..(567): n is a, c, g, or t
gtgaatatctgcggtacattgcggaaaacaacattgccctttaactttgaaccatgccccattcccggtctttttgaaattcagccaaaagtctttgccgacagccggggctatttttttgaagcctggtcacagcgggattttgaggccgccggcattaccgcgcattttgtgcaggataaccagtcccgttcggtgaaaggcgtgctgcggggtctgcattttcagaaaacccacgctcagggcaaactggttcgggccattgaaggcgaggtttttgatgtcgcggtagacctgcggaccggttctcccaaccgcggcaaatggcacgccgttgttttaagcggtgaaaagcagaaccagttttacatcccgcaagggtttgcccacggttttctggtgttaagcgacacagcggtctttgcgtataaatgcacggatttttattatcccgaagacgaaggcggcattatctggaacgatcctgccatcggcattaagtggcccgatttgggaatagattatctgctttccgaaaaagacaaaaaactgccgggttatgtttga

SEQ ID NO: 33858 - protein, 188 aa, Unknown
  Obtained from environmental sample
  DOMAIN (16)...(188): dTDP-4-dehydrorhamnose 3,5-epimerase
  misc_feature (1)..(188): Xaa is any amino acid
MNICGTLRKTTLPFNFEPCPIPGLFEIQPKVFADSRGYFFEAWSQRDFEAAGITAHFVQDNQSRSVKGVLRGLHFQKTHAQGKLVRAIEGEVFDVAVDLRTGSPNRGKWHAVVLSGEKQNQFYIPQGFAHGFLVLSDTAVFAYKCTDFYYPEDEGGIIWNDPAIGIKWPDLGIDYLLSEKDKKLPGYV

SEQ ID NO: 33859 - DNA, 312 bp, Unknown
  Obtained from environmental sample
  misc_feature (1)..(312): n is a, c, g, or t
gtggcccgatttgggaatagattatctgctttccgaaaaagacaaaaaactgccgggttatgtttgatggctgacaatatttggttaataggcagtaaaggcatgctgggaaccgagctttccctgctgctggaaaaatccggcctgccctttatcggaactgatcgtgaggtagacattaccgatgcggcggcgcttaccgcggcgcttaaacaatgtgccgaanaacagcctgtcggctggattatcaactgcgccgcctacaccgcggttgacaaggcggagacgatgctgaaagttgccgccgcctga

SEQ ID NO: 33860 - protein, 103 aa, Unknown
  Obtained from environmental sample
  misc_feature (1)..(103): Xaa is any amino acid
MARFGNRLSAFRKRQKTAGLCLMADNIWLIGSKGMLGTELSLLLEKSGLPFIGTDREVDITDAAALTAALKQCAEXQPVGWIINCAAYTAVDKAETMLKVAAA

SEQ ID NO: 33861 - DNA, 885 bp, Unknown
  Obtained from environmental sample
  misc_feature (1)..(885): n is a, c, g, or t
atggcggntgcgacaaatcgccattggttacctctcgatgaaattaccaacgcggttacggggacaacctttgccgcctttgagcctacgcttgattatgtcgcggtaaaatttccaaagtggcctttcgacaaatttgtatacgccagcagggaccttggaacccagatgaaggcgacgggcgaagtaatgtcaatcgctgacacttttgaagaggcgattatcaaagccgtgcgcggcgcggagattgggctcgcgagccttgacctcccgcgtcttgccgcgaagacggacgccgaaattcgcggcctgctaaaaacagtaaccgatgagcggctgtttgtgttatacgaggcgatcaagcgcggcatcagcatagacgagcttttttcaatcacaaaagtagaccgctggtttttacatgggttaaaaaatatcagagatcgcccgtccttgttcgcttccgcctcgccgttgatctataaaatggtagacacctgcggcggcgaatttgaagcgaagactccgtacttttattcgattaaaaacggttttgaaaatgaagctctgcctttcattcaaaagagcgaaaagctgagggtcgtagttctgggaagcggcccgatacggatagggcaggggatagagttcgactacgcctgtgttcattgcgtgtggaccttaagaaaaatgggttacgaagttatcgtaatcaacaataacccggagactgtctcaacggattttgatactgcggacaggctttactttgagccgcttcacattgatgatgtgatgagcattatcgaaaccgaaaaacccataggcgttattgttgcgttcgggcggcgggacggcgatcaagctgacaaagaaattgtatga

SEQ ID NO: 33862 - protein, 294 aa, Unknown
  Obtained from environmental sample
  DOMAIN (197)...(294): Carbamoyl-phosphate synthase L chain, N-terminal domain
  misc_feature (1)..(294): Xaa is any amino acid
MAXATNRHWLPLDEITNAVTGTTFAAFEPTLDYVAVKFPKWPFDKFVYASRDLGTQMKATGEVMSIADTFEEAIIKAVRGAEIGLASLDLPRLAAKTDAEIRGLLKTVTDERLFVLYEAIKRGISIDELFSITKVDRWFLHGLKNIRDRPSLFASASPLIYKMVDTCGGEFEAKTPYFYSIKNGFENEALPFIQKSEKLRVVVLGSGPIRIGQGIEFDYACVHCVWTLRKMGYEVIVINNNPETVSTDFDTADRLYFEPLHIDDVMSIIETEKPIGVIVAFGRRDGDQADKEIV

SEQ ID NO: 33863 - DNA, 888 bp, Unknown
  Obtained from environmental sample
  misc_feature (1)..(888): n is a, c, g, or t
atgcctctcgataaaaacataaaaaaagttttggtaatcggttccggccccattgttatcgggcaggccgccgaatttgattacgccggaacccaggcatgccgcgtgctgagggaagacgggatcgaaatcgtccttgttaattcaaaccccgcgacaataatgaccgacaaaaatatcgcggataaaatttatattgaacctttaacccttattaccgtaaaacgcattattaaaaaagaacgccccgacagtattttatcgggacttggcgggcagacggggctgactctgtgcatgcagttagcacgagacggtttccttgataaaatgaacgtgcgcctgcttggttcttcgcctcagacaattgacaaggccgaagacagaaaaattttcaaagaaaccatggaagctataggacagcctgtggttccctccgtcatagctaccgatgttgaaacggcggtagagttcgctaatgaactcggctatcccgtaattgtacgcccagcattcacgctcggcggcacaggcggcggtaatgccgtagatgaagatcgcctgcgcgagataaccgcaaacggccttgcgctttcgcccatccatcaggtgctaatagaaaaatcaatcgcaggctggaaagaaattgaatttgaagtcatgcgagaccgcgccggaaacgtaatcacagtctgttcaatggaaaacttcgatcctgtcggcatacacacgggcgacagcatagttatcgctcccgccgtcaggttngccgacaaagagtatcagatgctcaggacggcatcgctcgacatcatcaaggcgctcgcgtggagggcgggtgcaacgtgcagttggcgctgcacccgaacagtttcgactacgcgntga

SEQ ID NO: 33864 - protein, 295 aa, Unknown
  Obtained from environmental sample
  SIGNAL (1)...(23)
  DOMAIN (6)...(126): Carbamoyl-phosphate synthase L chain, N-terminal domain
  misc_feature (1)..(295): Xaa is any amino acid
MPLDKNIKKVLVIGSGPIVIGQAAEFDYAGTQACRVLREDGIEIVLVNSNPATIMTDKNIADKIYIEPLTLITVKRIIKKERPDSILSGLGGQTGLTLCMQLARDGFLDKMNVRLLGSSPQTIDKAEDRKIFKETMEAIGQPVVPSVIATDVETAVEFANELGYPVIVRPAFTLGGTGGGNAVDEDRLREITANGLALSPIHQVLIEKSIAGWKEIEFEVMRDRAGNVITVCSMENFDPVGIHTGDSIVIAPAVRXADKEYQMLRTASLDIIKALAWRAGATCSWRCTRTVSTTR

SEQ ID NO: 33865 - DNA, 387 bp, Unknown
  Obtained from environmental sample
  misc_feature (1)..(387): n is a, c, g, or t
ttgaagcttcctgacgatattcgggatttcatcaaacgcaaatatcaaagcaaacaccgggactggttaaaagcggacatgtcaaacaatagctctcaggatttatggccgctggaaatcggccttggtatacctacagaacaggacgcgattcaacagcaagacgcggtgaggtcatggattagcgcatggagatcatggcaaggaagagggagtcttgtttggattgaacgtcactggcgctcccttggagtacaaaccatcccacaaaaattaattttgaatgagccgtctgacgcgctttcctggataggcgaggctgaagcctggtctcgcgcggtcgaacgttttaaaacgcntggtacaacaatggccggcattgattga

SEQ ID NO: 33866 - protein, 128 aa, Unknown
  Obtained from environmental sample
  misc_feature (1)..(128): Xaa is any amino acid
MKLPDDIRDFIKRKYQSKHRDWLKADMSNNSSQDLWPLEIGLGIPTEQDAIQQQDAVRSWISAWRSWQGRGSLVWIERHWRSLGVQTIPQKLILNEPSDALSWIGEAEAWSRAVERFKTXGTTMAGID

SEQ ID NO: 33867 - DNA, 1290 bp, Unknown
  Obtained from environmental sample
  misc_feature (1)..(1290): n is a, c, g, or t
atgcgtgacggcaataaagaattgaaagaaatttcggaacaaatcagcagacagatacctatcgtcaaacgggctgaagatgacctgcgtgaggcaaggcttaaacatgataaggcgtttgagaaactcaaagaattaaaagaacgtctcaatgaaatacagaatgatctttcgatcgtacctctaacaccttttcaaaaggaagggcttgatggttactataccggtattacaaacaatgtccagcttgacaatctcgacaaaaccaccagagctgtatcagacgaactgcacaaaaagatcgaagagcttaatagaagcatagacaaatgtgaaaatgagatagaaaaagttttcatcgaattcaagctaaactggcctcttgacgcaggtgatatggatatctccattttaagcgctccggattttttctcaaaattgaccagactggaaacagacggtcttcctaaacacgaacagcgtttcttcgatttattgcaaaatcaaagccatcaaaatctggcggctttatatacttatttgatcaacgcaagaaaaaccataatggaacgcatggacctcgttaatgacagtctcagcaaggttccgttcaatcaatcggagaaccggaatacataccttcaaattgaaacaagcgacaggcaattaccggaggttagggacttcaaacaggaaatacaacaaacgctgagtcacgcatggaacgaggatcccgaacttgcagaaaaaagattccttatattaaaaaaaatcgtcgaacgccttttcagtcatgaaagcgagcataaacgctggcgtgaatcggtgcttgatgttcgtcagcatgttgaattcataggtcgtgaaaaagacgagaacggtgttgagattgagatttatcgcagtggtgccggcaaatcgggcggacagcgccagaagcttgcgaccacctgcctcgctgcggcgttgaggtatcagcttggcggaaatgatcttggcgtcccgaggtatgctcctgttgttcttgacgaggcattcgacaaggcggacaacgagttcactacgctggtaatgaatattttcaataattttgggttccagatggtagtggcgacaccgctcaagtccgtaatgacactggaaccgtttatcgggggcgcctgctttgttgacatcaacgacaggcgtgtatcaagtgtcctgcttatcgagtacgacaatgaccagcagcgcctgaatcttccacagtactcccgcagagaggccggtaataaagatgcttatcaataa

SEQ ID NO: 33868 - protein, 429 aa, Unknown
  Obtained from environmental sample
  misc_feature (1)..(429): Xaa is any amino acid
MRDGNKELKEISEQISRQIPIVKRAEDDLREARLKHDKAFEKLKELKERLNEIQNDLSIVPLTPFQKEGLDGYYTGITNNVQLDNLDKTTRAVSDELHKKIEELNRSIDKCENEIEKVFIEFKLNWPLDAGDMDISILSAPDFFSKLTRLETDGLPKHEQRFFDLLQNQSHQNLAALYTYLINARKTIMERMDLVNDSLSKVPFNQSENRNTYLQIETSDRQLPEVRDFKQEIQQTLSHAWNEDPELAEKRFLILKKIVERLFSHESEHKRWRESVLDVRQHVEFIGREKDENGVEIEIYRSGAGKSGGQRQKLATTCLAAALRYQLGGNDLGVPRYAPVVLDEAFDKADNEFTTLVMNIFNNFGFQMVVATPLKSVMTLEPFIGGACFVDINDRRVSSVLLIEYDNDQQRLNLPQYSRREAGNKDAYQ

SEQ ID NO: 33869 - DNA, 1044 bp, Unknown
  Obtained from environmental sample
  misc_feature (1)..(1044): n is a, c, g, or t
ttggggtttttcataaggcaggaatgtatgaacgaattatttgagtttaaggcctcaggctcagggtacaccgtcaagcagtttaccaacagcaaggagcgctccagcaagttttactttactacagagagctttaccagcgatgacaagtatttcttttatgcacgcgtacaagacggcaagcctgggacttaccgcgtggaatacgccacgggaaaccaggagaaggttctcagcaacgaggaatatacgaatttcgggatggattacaaccgcgaatgtgcttatgtgcgtaaaggcgactccgtctataaatttgaaacgcttaccggcaaactgacggaaatcggaaccttgccgcccggacgctgtaccggccatttttcggcgtccaaatcggggcttatatggagctcttaccaactggcctgtaaaatctacgcgctggttgtacttgatccaaagacaggcacaagcgaggttgtctggaaagacgaccacgttcttgggcattgccaggcctgcccgggcgacgacgagactgttatgtacattcacgaaaccacaggcgacgccttgcagcggatatggatgtttgactatcccacacgcacggtacgtccgtattacgttgagaaagaaggcgactggattacccacgaggtgtggacagccgacggtaactatctgtattttacgcggtatcctacccaactaatacgcggtacaagggacggccacaattttaaggtcatggccgaatcaacccaatacctacattgcgcccccgaccgttcaggcaaatggatcaccgccgaccgaatgactggtgtttacatgggctggaaaaaccaaatcatgctcataaatgccgaaaccggaaaggaagaagtgcttgctgacctggcggaaccaaatacgggcgcggaacacccgcatccctcgtttaaccgttcgggaaacgttgtgcttttcaactcgcccattgaaaagggtttttgcaacgtatgcgcgattgagctggaccaggtgagaaagccgtag

SEQ ID NO: 33870 - protein, 347 aa, Unknown
  Obtained from environmental sample
  misc_feature (1)..(347): Xaa is any amino acid
MGFFIRQECMNELFEFKASGSGYTVKQFTNSKERSSKFYFTTESFTSDDKYFFYARVQDGKPGTYRVEYATGNQEKVLSNEEYTNFGMDYNRECAYVRKGDSVYKFETLTGKLTEIGTLPPGRCTGHFSASKSGLIWSSYQLACKIYALVVLDPKTGTSEVVWKDDHVLGHCQACPGDDETVMYIHETTGDALQRIWMFDYPTRTVRPYYVEKEGDWITHEVWTADGNYLYFTRYPTQLIRGTRDGHNFKVMAESTQYLHCAPDRSGKWITADRMTGVYMGWKNQIMLINAETGKEEVLADLAEPNTGAEHPHPSFNRSGNVVLFNSPIEKGFCNVCAIELDQVRKP

SEQ ID NO: 33871 - DNA, 438 bp, Unknown
  Obtained from environmental sample
  misc_feature (1)..(438): n is a, c, g, or t
atgtaccgtattgtcgatgaccttgccgaacagatacacggtttgcagggaatacagcatgtgtctgtgtttaaaaaagcggaagattatatcctggaaaatttatcgaggaaaatcagtttaaaagatatttccaaagcggcaggtttttcatccccttacttcagcacgttgttcaaggaagagatgggagaaaatttttcaagctacctgaaccggctaagggtaaaaaaagcttccgctctcctaaccgacacaaaccttagcttaagcagaatagcagcgtcatgcggctttaaggatcaaagctggttctcaaaaatattcaagcactacgccggaatttgcccgggaaaataccgaagccagggcggtaaactggcgccgaagattcccgaaataaagttttcggaagatttcccggtagaggcagtgtaa

SEQ ID NO: 33872 - protein, 145 aa, Unknown
  Obtained from environmental sample
  DOMAIN (78)...(122): Bacterial regulatory helix-turn-helix proteins, AraC family
  misc_feature (1)..(145): Xaa is any amino acid
MYRIVDDLAEQIHGLQGIQHVSVFKKAEDYILENLSRKISLKDISKAAGFSSPYFSTLFKEEMGENFSSYLNRLRVKKASALLTDTNLSLSRIAASCGFKDQSWFSKIFKHYAGICPGKYRSQGGKLAPKIPEIKFSEDFPVEAV

SEQ ID NO: 33873 - DNA, 519 bp, Unknown
  Obtained from environmental sample
  misc_feature (1)..(519): n is a, c, g, or t
atggtcatggcacgaaaaaaagaaaaggatattatcgaccaattgcttgataatatcgacttccgcgggctaacccaggacgaggttgtagggcaaggcggcttaataaaacagctaaccgggaaaatactccagcgggcccttgaagctgagatgacggatcatcttggctatgaaaagaattcgaatgacggggacaacagcgggaacagccggaacgggcacacggaaaaaaccgtgcttttggaaaaccaaagcgcggctattgaagtgccgcgggaccggaacgggacattcgagccgataatagtccccaagcatgaaaagcgcgtcccgctgttcaacgatcaaatcatttcgatgtattcattcgggatgaccgaccgggacattaaagcgcacctggaaaagatatacaacgtcgaagtgtcgcctgatttgataagccgggtaacgaacgcggtaatagacgaagtaagggaatggcaaaaccggccttggaaaaatcatacgcgatag

SEQ ID NO: 33874 - protein, 172 aa, Unknown
  Obtained from environmental sample
  DOMAIN (3)...(172): Transposase, Mutator family
  misc_feature (1)..(172): Xaa is any amino acid
MVMARKKEKDIIDQLLDNIDFRGLTQDEVVGQGGLIKQLTGKILQRALEAEMTDHLGYEKNSNDGDNSGNSRNGHTEKTVLLENQSAAIEVPRDRNGTFEPIIVPKHEKRVPLFNDQIISMYSFGMTDRDIKAHLEKIYNVEVSPDLISRVTNAVIDEVREWQNRPWKNHTR

SEQ ID NO: 33875 - DNA, 621 bp, Unknown
  Obtained from environmental sample
  misc_feature (1)..(621): n is a, c, g, or t
atgaaaaatgttaatgaaaaacacaaagacactgtttttacttttcttttcagcaaccccgacttattgagggaactttactcggcgatagagggaatcactcttccgccggacattcccatcaatatcaacaccctttcagacgttcttttcaggacgcagagaaatgacatttcgtttcttatcaacaaccggcttattgttcttattgaacaccagtcaactatcaacgaaaatatgccgctcagatttttgatgtacattgcaaaactctatcaggaaataacagagccggaagacaagtttaaaagaaaacttgaaaaaatcccaaagcctgagtttatcgtactttacaacggcgaagacaagtatcctgattacaaggaattaaggctttccgatgcttttataaaaaccgacataaagattgatgtaccgctggagttggtagtgcaggtatataacataaacaaagggcggaatcaggagatattgagcaaaagcaggacgcttgaaaattacagccgatttatagacaagatacgggagtaccagaaagagtatcaatggaagtataaagagaagagggaatacttgataaatcgttcaagtctgcgataa

SEQ ID NO: 33876 - protein, 206 aa, Unknown
  Obtained from environmental sample
  misc_feature (1)..(206): Xaa is any amino acid
MKNVNEKHKDTVFTFLFSNPDLLRELYSAIEGITLPPDIPININTLSDVLFRTQRNDISFLINNRLIVLIEHQSTINENMPLRFLMYIAKLYQEITEPEDKFKRKLEKIPKPEFIVLYNGEDKYPDYKELRLSDAFIKTDIKIDVPLELVVQVYNINKGRNQEILSKSRTLENYSRFIDKIREYQKEYQWKYKEKREYLINRSSLR

SEQ ID NO: 33877 - DNA, 417 bp, Unknown
  Obtained from environmental sample
  misc_feature (1)..(417): n is a, c, g, or t
ttgaaaaagataaaagaatcaattgacaagataaccaaatccgccgagaccgtaacaacgaggtttgaggcgatagattcaagcgtcagaacggtggcggatcaggaaacaaacatcctcaacgcaatggaagaacagggagaaagaaacgaacagacgagcagcgccagcttgaccgtaattacacatcttgtaaagaccggttccgaagaaatgcttgagggcagtcaggaagtaatgaaggaaagccagaaccttgaaaaggtaacgcaggaaataacaggcggtatgaacgaaatggcaagcggagcggatcagataaacttagcggtaaacaacgtcaatgatatgactgtcaaaaaccgcgacgccatagacagtttaataaaggaagtttcacgctttaaggtcgaatga

SEQ ID NO: 33878 - protein, 138 aa, Unknown
  Obtained from environmental sample
  misc_feature (1)..(138): Xaa is any amino acid
MKKIKESIDKITKSAETVTTRFEAIDSSVRTVADQETNILNAMEEQGERNEQTSSASLTVITHLVKTGSEEMLEGSQEVMKESQNLEKVTQEITGGMNEMASGADQINLAVNNVNDMTVKNRDAIDSLIKEVSRFKVE

SEQ ID NO: 33879 - DNA, 465 bp, Unknown
  Obtained from environmental sample
  misc_feature (1)..(465): n is a, c, g, or t
atgaacntgctgacaggtcgtttcggacgcccggtaggcgagaacgtggttacagcgtctatgtggtttcatattggagctaacatggatcagagagaacaagtttatatcggcacaatgacaacgaagggtcttggtatccgcaatgtcggtgacgatacctttatttcactggccgaaccggacagtgccaaccgtgccattggaaccatcgacagggcgttaaaaatcatcaacaaacaaagagccgatcttggcgcctatcagaatcgccttgagcacgcagtacgcggtctcgacgtaggagcagaaaacatgcaagcatccgagtcccgcatccgcgacgccaacatggcgaacgagacggtaggttacaccaagaacatgatcttgacccaagctggaacagcaatgctggcgcaagccaatcagagaggtcaatcggttctacagcttctgcagtaa

SEQ ID NO: 33880 - protein, 154 aa, Unknown
  Obtained from environmental sample
  DOMAIN (61)...(132): Bacterial flagellin C-terminus
  misc_feature (1)..(154): Xaa is any amino acid
MNXLTGRFGRPVGENVVTASMWFHIGANMDQREQVYIGTMTTKGLGIRNVGDDTFISLAEPDSANRAIGTIDRALKIINKQRADLGAYQNRLEHAVRGLDVGAENMQASESRIRDANMANETVGYTKNMILTQAGTAMLAQANQRGQSVLQLLQ

SEQ ID NO: 33881 - DNA, 831 bp, Unknown
  Obtained from environmental sample
  misc_feature (1)..(831): n is a, c, g, or t
ttggccgagtattttctttttggtcctacgggcgtcggaaaaacactccttgcgagaaaacttgcccagtacctgtttgctaatgaagaagcgcttgtaagaatagacatgtccgactttatggaaaagcacaatgcttcccgccttgtgggggcgccgcccggctatatcggctatgaagagggcggaatgttaactgaaaaaataaggcgcaatccctatcgcgtagttttatttgacgagatagaaaaagcccatcatgatatttttaacatcctgttacaggtaatggaagagggagaattacgggacagcctggggcatacggtaaatttccgaaatacggtcattatcatgacgagtaacgccggagtgcgggagattacaaaagattcaaggcttggctttacgtcaggttccggcttaatgagcccttccgagattgaatcagccgccatgtcggagcttcgccgtattttcagtcctgaatttttaaacagggttgatgaaacagtcgtctttaatccgttaaagcgcaaacagatagaagcgatttttgacattgagataaaagaactgacaaaccgcctgaccgaacagaattacggcataaaaatatcccccgaagcaaaacgcgttcttgtagataaaggctgggatcaaaaattcggcggcagacccctgcgccgcacaattcaaaaagaactggaatccccgttatcagaactaatccttgaaggaacatgggaaagcggcacggtttttaatgtagggataaaaaacggacaagtcaaaataactggaaagtcaaaagtaaaagtttttgcctaa

SEQ ID NO: 33882 - protein, 276 aa, Unknown
  Obtained from environmental sample
  DOMAIN (3)...(191): ATPase family associated with various cellular activities (AAA)
  misc_feature (1)..(276): Xaa is any amino acid
MAEYFLFGPTGVGKTLLARKLAQYLFANEEALVRIDMSDFMEKHNASRLVGAPPGYIGYEEGGMLTEKIRRNPYRVVLFDEIEKAHHDIFNILLQVMEEGELRDSLGHTVNFRNTVIIMTSNAGVREITKDSRLGFTSGSGLMSPSEIESAAMSELRRIFSPEFLNRVDETVVFNPLKRKQIEAIFDIEIKELTNRLTEQNYGIKISPEAKRVLVDKGWDQKFGGRPLRRTIQKELESPLSELILEGTWESGTVFNVGIKNGQVKITGKSKVKVFA

SEQ ID NO: 33883 - DNA, 648 bp, Unknown
  Obtained from environmental sample
  misc_feature (1)..(648): n is a, c, g, or t
ttgaatattacgaggcttaccccaaaagaggcggaagatttgataaaaaaaggctccaacttcatgcgggaactgaaacttgccctaaaagccagtcaggaaggcgttcacagggcgcatattatcgatggaaggcaggaaggagccgtnttaaaggaaatttactccaacttaggcgtaggaacgatgatttataccgatgaatacgactcgatccgccccttacactccggggatttgccggatattctgcggttaatggaacctttaatgcaaaaaggcgtccttgtcaggcggaatcccgaggaaatacaggaaaaaaaggacgatttctccgttttagatattgacggctctatccgtgcctgcggtgcgttgattgactggggcgaaaaacagggggaaattgccgccgtagcgacagacccgaattataccgatctcggtcttggcaggaaaattgtcggcttcctaattgaaaaggcaaaaaaaagcaaaatgaagcgcgtttttgtgcttaccactcaaacacaggactggtttgaatcgctgggttttaaagacgcgcctgtagacagtctgccggagaagaaacgcaaggtttatgatcaagcccggaaaagtaaggtctttgcgctggatttgtaa

SEQ ID NO: 33884 - protein, 215 aa, Unknown
  Obtained from environmental sample
  DOMAIN (112)...(187): Acetyltransferase (GNAT) family
  misc_feature (1)..(215): Xaa is any amino acid
MNITRLTPKEAEDLIKKGSNFMRELKLALKASQEGVHRAHIIDGRQEGAVLKEIYSNLGVGTMIYTDEYDSIRPLHSGDLPDILRLMEPLMQKGVLVRRNPEEIQEKKDDFSVLDIDGSIRACGALIDWGEKQGEIAAVATDPNYTDLGLGRKIVGFLIEKAKKSKMKRVFVLTTQTQDWFESLGFKDAPVDSLPEKKRKVYDQARKSKVFALDL

SEQ ID NO: 33885 - DNA, 726 bp, Unknown
  Obtained from environmental sample
  misc_feature (1)..(726): n is a, c, g, or t
gtgccatttttactagaaaccaaagaattatcaaaagcctatagagagacgggcggaaatcttgaaatattgaaaaatgtcaatttcaatttgagcgaaggcaaaattgctgtgctaacaggacccagcggttctggcaaatccacttttttgaacatagtgggggctttagacaaaccaaccggaggcttggttttctttaacggcagggaaatgtcgaaattttccaggcgggagataaatagttttcaccgcaaaaatttgggctttatgtttcagtttcatcacctgctcgcagaattcaccgcgtttgaaaatgtgcttatgccagccagaatagcccatcaaaattataacgaaagccgtgaaagagcattgagtcttttgagcattgttgggctttcagataggataggtcatttgccacgcgagctttctggaggcgagcgtcaaagggttgccttggcacgtgcccttatgaacaggccgagtttgattatagcagacgaacccagcggaaatttagacgaaaaaaatgcagaggtgctaaaatctcttattctggaactcaataaaaaattcgggcaaacattcttaatagcaacccacgatatggatttggcgggaatagccaccgacagatggcttgttgctcacggaaccatcattgtaaatacaaatgcctacgaaaggcgcaaatctgttcgcacatctatgggctcgtaa

SEQ ID NO: 33886 - protein, 241 aa, Unknown
  Obtained from environmental sample
  DOMAIN (34)...(220): ABC transporter
  misc_feature (1)..(241): Xaa is any amino acid
MPFLLETKELSKAYRETGGNLEILKNVNFNLSEGKIAVLTGPSGSGKSTFLNIVGALDKPTGGLVFFNGREMSKFSRREINSFHRKNLGFMFQFHHLLAEFTAFENVLMPARIAHQNYNESRERALSLLSIVGLSDRIGHLPRELSGGERQRVALARALMNRPSLIIADEPSGNLDEKNAEVLKSLILELNKKFGQTFLIATHDMDLAGIATDRWLVAHGTIIVNTNAYERRKSVRTSMGS

SEQ ID NO: 33887 - DNA, 915 bp, Unknown
  Obtained from environmental sample
  misc_feature (1)..(915): n is a, c, g, or t
atggcaattttaagcgcgatgataaattcggtaggttgctaccatccagaattactcgcaaatatgaacgactcggattttgaggaagcagccgcaaaactgatttcaaaagttcgcacaatagcggcagccgcatatagaatgagtaccggcaggcccattatgtatgcaatccccgaatatggatatgtacagaactttttgcacatgatgttttccctgcccaaccacccgcatgtgatggacccggatatagtgaaagccttaaacctgattttaattctgcatgcagaccacgagcaaaattgcagcacaagcacggttagaatggtggcaagtggcggggcaaatttgtttgcaagcgttgcggctggagtgtgcgccttgtgggggcatctgcacggtggggcaaatcaggcagttgttgaaatgctggaagatattcgcaaaactcattgctctgttaaagattttgtggaaaaagtaaagcgcaaggaaaatggaattaagttaatgggttttggacacagggtgtataaaaattttgacccgcgttctaaaatattgcgagatgtagcccaaaaagttttgcaaaaacaagggcaaggagacggccttttaaatatcgctcaggaactcgcagacatagccctgaacgatgattattttattcagcgcaagctctacccaaacgtggacttttactccggcataatcatgaaagccataggcataccgctaaatatgtttacggttatgtttgctatagggcgcataccagggtggattgccaactggaaagaagttcacgataatcccaagcaaaaaatttacaggccaaggcaaatttatatgggcgagagcntaaggcattacgagcccatagatgtgcgaacagatttgcgcctttcgtag

SEQ ID NO: 33888 - protein, 304 aa, Unknown
  Obtained from environmental sample
  DOMAIN (1)...(280): Citrate synthase
  misc_feature (1)..(304): Xaa is any amino acid
MAILSAMINSVGCYHPELLANMNDSDFEEAAAKLISKVRTIAAAAYRMSTGRPIMYAIPEYGYVQNFLHMMFSLPNHPHVMDPDIVKALNLILILHADHEQNCSTSTVRMVASGGANLFASVAAGVCALWGHLHGGANQAVVEMLEDIRKTHCSVKDFVEKVKRKENGIKLMGFGHRVYKNFDPRSKILRDVAQKVLQKQGQGDGLLNIAQELADIALNDDYFIQRKLYPNVDFYSGIIMKAIGIPLNMFTVMFAIGRIPGWIANWKEVHDNPKQKIYRPRQIYMGESXRHYEPIDVRTDLRLS

SEQ ID NO: 33889 - DNA, 609 bp, Unknown
  Obtained from environmental sample
  misc_feature (1)..(609): n is a, c, g, or t
atgagcataaaaattattgtttttgattatgggggggttatttgctttgttccctccgctgatatgaggggcgagcttgttaggcttagcgggttatcggctgaggttttgtgggaactggaccggaagtacaggggggagtgggacagggggacttatgacgggatcgggcattataggttcatgctggcaaaggccggcgtctcacttgatgacgacaggctcgcgctgatcgcgaaggccgatattgaaagctggagccatataaattacgatacggtaaaattaatgcgggacattaaagcttcggggcttcgtgtggggattctttccaatatacctcatgattttcccaggattaatatgcctgtattcgccgaggcggatgtcgccgtttattcctgcgatcttggtataataaaacccgaggcgggtatttacgaaaaactgcgggaagaagccggttgtttatatgaagagattgttttttttgacgataaggttgataatgtaagtagagcgcgggaacttgggatacaggcttttctgtgggagggagcggaacaggcccgtaaaataatttccggcatgacaggaggggcaatataa

SEQ ID NO: 33890 - protein, 202 aa, Unknown
  Obtained from environmental sample
  DOMAIN (3)...(187): haloacid dehalogenase-like hydrolase
  misc_feature (1)..(202): Xaa is any amino acid
MSIKIIVFDYGGVICFVPSADMRGELVRLSGLSAEVLWELDRKYRGEWDRGTYDGIGHYRFMLAKAGVSLDDDRLALIAKADIESWSHINYDTVKLMRDIKASGLRVGILSNIPHDFPRINMPVFAEADVAVYSCDLGIIKPEAGIYEKLREEAGCLYEEIVFFDDKVDNVSRARELGIQAFLWEGAEQARKIISGMTGGAI

SEQ ID NO: 33891 - DNA, 501 bp, Unknown
  Obtained from environmental sample
  misc_feature (1)..(501): n is a, c, g, or t
ttgacagattcggccgagctggcccgcgcatacttcgaaacctacgactttccggtcataatcacccgctgctccaacaattacggcccgtaccaatttccggaaaagctgatcccgctgatgatcacaaacgccataaacaacagaccgctgcccgtctacggggacggcacgaacatcagggattggctgcacgtggaagatcactgccgcgccgtggaggccgtcctggaaaagggcaggcccggcgaggtatacaacataggcggggataacgagatgcgcaacatagacatcgtcaagataatactatctcaattagaaaagcccgagaccctgatatcgttcgtaacggatagactgggccacgacaggcgctacgcgatagacgcctcgaagatccgccaagagctgggatgggcgccgcaggtagagttcgaggcgggcatacggggaactatcgagtggtactcaaaaacaagtcaatataaaacgccatga

SEQ ID NO: 33892 - protein, 166 aa, Unknown
  Obtained from environmental sample
  DOMAIN (1)...(89): NAD dependent epimerase/dehydratase family
  misc_feature (1)..(166): Xaa is any amino acid
MTDSAELARAYFETYDFPVIITRCSNNYGPYQFPEKLIPLMITNAINNRPLPVYGDGTNIRDWLHVEDHCRAVEAVLEKGRPGEVYNIGGDNEMRNIDIVKIILSQLEKPETLISFVTDRLGHDRRYAIDASKIRQELGWAPQVEFEAGIRGTIEWYSKTSQYKTP

SEQ ID NO: 33893 - DNA, 663 bp, Unknown
  Obtained from environmental sample
  misc_feature (1)..(663): n is a, c, g, or t
atgcgccgttggggacccgcgattatcgccaatctttcaggttcgtcttccgacgagtatgttaaaggcgcggctttactggacggctcttccgttgacatgattgagcttaatatctcatgtccgaacatcaaagacgggggtctcgccttcggacttgatccgggaacctccgccgcgttggtcgtagcagtccgccgcgtttgccggcataagccgcttatggtaaaactttcacctaactgtccttccatagcctccgtagccctcgcctgcgttaatgccggcgctgacgcgttatcccttgtaaacacgttcagggctatcgcgattgatacggtaaaacgcaaacctgtttttgacaacataatagccggtctgtcgggtcccgcgattaaaccgatagcccttcgcattgtatgggagttatacgattccttaaaggatttaagagtaaatatacccattgtagggatgggcggaatttcctgtacaaatgacgctattgaattccttatggcaggatcgcgcgccattcaagtgggaacctctactttctcaaacccccacacaatgttggaaattattgacggaattcacaaatatatggcggctaacaagattgcaaagttgagtgatatttcgattagggataaatattga

SEQ ID NO: 33894 - protein, 220 aa, Unknown
  Obtained from environmental sample
  DOMAIN (1)...(203): Dihydroorotate dehydrogenase
  misc_feature (1)..(220): Xaa is any amino acid
MRRWGPAIIANLSGSSSDEYVKGAALLDGSSVDMIELNISCPNIKDGGLAFGLDPGTSAALVVAVRRVCRHKPLMVKLSPNCPSIASVALACVNAGADALSLVNTFRAIAIDTVKRKPVFDNIIAGLSGPAIKPIALRIVWELYDSLKDLRVNIPIVGMGGISCTNDAIEFLMAGSRAIQVGTSTFSNPHTMLEIIDGIHKYMAANKIAKLSDISIRDKY

SEQ ID NO: 33895 - DNA, 354 bp, Unknown
  Obtained from environmental sample
  misc_feature (1)..(354): n is a, c, g, or t
ttgataaatccggggaaaaagtctttacaaccttttttgttttcaaggggcgggaattacagcgtcctgcaagcattcccgaaacaggcagaatcatcaaatcagggtacattangccgcccttgccaccccgtagtctgcgatgaattatacggtaagaagtctgccgtaaaactctcatcctttaaacgcggctacaggggcgaccctctggaagagcgaccgttactggatagactgggattacacgcccgtgaattaacattgcctgataggcaaattcttattgccccactcccaaaagatatgtcaagtttgattaagcaactggaaaaaataataaataataaatga

SEQ ID NO: 33896 - protein, 117 aa, Unknown
  Obtained from environmental sample
  misc_feature (1)..(117): Xaa is any amino acid
MINPGKKSLQPFLFSRGGNYSVLQAFPKQAESSNQGTLXRPCHPVVCDELYGKKSAVKLSSFKRGYRGDPLEERPLLDRLGLHARELTLPDRQILIAPLPKDMSSLIKQLEKIINNK

SEQ ID NO: 33897 - DNA, 366 bp, Unknown
  Obtained from environmental sample
  misc_feature (1)..(366): n is a, c, g, or t
atgactgccaatctgcccctgatagaaacggtgcgccttatggcggaatcggcggcttttgaagacccccgctttcctccgttaagaaaagatgaattgtccgctttgcatatcgaaatttccgcgctttctcccatgacgccatgtcccgacccaagacaggtaaaagtcggcgttcacggacttttattgacagggcgcggaagatcgggggttttgctgccgcaggttcccgtggaacagggctgggatcttgatcaatatcttgattacatttgcgtaaagtcggggttaccccagggagcgtatgacgcaccggatactcagctttatacttttacagcgattgtttttggagaagaatga

SEQ ID NO: 33898 - protein, 121 aa, Unknown
  Obtained from environmental sample
  DOMAIN (2)...(121): AMMECR1
  misc_feature (1)..(121): Xaa is any amino acid
MTANLPLIETVRLMAESAAFEDPRFPPLRKDELSALHIEISALSPMTPCPDPRQVKVGVHGLLLTGRGRSGVLLPQVPVEQGWDLDQYLDYICVKSGLPQGAYDAPDTQLYTFTAIVFGEE

SEQ ID NO: 33899 - DNA, 921 bp, Unknown
  Obtained from environmental sample
  misc_feature (1)..(921): n is a, c, g, or t
atgctggaaacgggaagctggaagggaaaggcttttagatcgtataacgttaaaacgccgccgacccgcctgacgcccggacgcagcaatccctacgctaaatttcttgagaatgtgaaagacaaactcgcctccctcggctttgaggaatttgacggccccctggttgaaaccgagttctggaattcagacgccctgtttatgccgcagttccattcggcgcgggacatccacgacagctacagccttaccgatccggcgaaacccggtgaaatcgcaaaggcaaagtcgatagaagaaccctggctttccaatgtggccagcgcccatgaaaacggtgggaatacgggtagccgcggctggagctacacattcgaccgtgaatttacccgtcggttgatcctccgttcccagggcacggtgctttcagcgaaaacactgcccaaggcgaaaatccccggcaaatatttcggcattgtccgctgtttccgctacgaccgcgtggacgccactcatctgcctgacttctaccagaccgaaggcatagtgttaggcgaaagcgtaaacctgcgtaccctgttgggaatgttggatatgttcgcgcgcgaggttgccggcgcgaaagaggttaaatacgttcccggctatttcccctttaccgagccttcggtggaagttcatataaaacatccggtgcttggctggttcgagcttggaggctccggcattttccgtcccgaggtaacgcagagcctgggtgtggacgttcaggtcgcggcctggggcatcggcattgaccgcatggcgcttatggcgctcggtcttaatgatctgcgggatctgttcagcggtaatattgaagacgtgcgtctgcgccggcttactgaaacaaacaaactcaaggaaaaagcaaatgcctaa

SEQ ID NO: 33900 - protein, 306 aa, Unknown
  Obtained from environmental sample
  DOMAIN (14)...(292): tRNA synthetases class II core domain (F)
  misc_feature (1)..(306): Xaa is any amino acid
MLETGSWKGKAFRSYNVKTPPTRLTPGRSNPYAKFLENVKDKLASLGFEEFDGPLVETEFWNSDALFMPQFHSARDIHDSYSLTDPAKPGEIAKAKSIEEPWLSNVASAHENGGNTGSRGWSYTFDREFTRRLILRSQGTVLSAKTLPKAKIPGKYFGIVRCFRYDRVDATHLPDFYQTEGIVLGESVNLRTLLGMLDMFAREVAGAKEVKYVPGYFPFTEPSVEVHIKHPVLGWFELGGSGIFRPEVTQSLGVDVQVAAWGIGIDRMALMALGLNDLRDLFSGNIEDVRLRRLTETNKLKEKANA

SEQ ID NO: 33901 - DNA, 708 bp, Unknown
  Obtained from environmental sample
  misc_feature (1)..(708): n is a, c, g, or t
gtgtggacgttcaggtcgcggcctggggcatcggcattgaccgcatggcgcttatggcgctcggtcttaatgatctgcgggatctgttcagcggtaatattgaagacgtgcgtctgcgccggcttactgaaacaaacaaactcaaggaaaaagcaaatgcctaaaatagaagtaaacgaagaagttttttattcgctcatcggcaacctctggtccaataaagacgaatttgaggaagatctgacctgcgccaaggcggagcttgatgaagacagcgacaaaagcctgcccgttggtgagcgggttctaaaaatcgagcttaacgacaccaatcgccccgacctgtggggaacagcgggctgcgcccgccagcttaaggcataccagaacgggaaaattcccgaatatccgtttttctcacagcccggcaatattaaaaaatgcgcgcataaggtaaaggtggaaaaaagcgttcagaaagtacggccttttcttacgggctttatcgccggagggaaagccatttcagatccagcgttacgcgacatgatacagacccaggaaaaactcgcctggaatttcgggcgcaaacggcgctccatttcgatgggcgtgtaccgcattacaaggatcaactggcccatcatttacaaaggcgtaatcccgacagcgtttctttcgtgccattacagtgggactcccctttaa

SEQ ID NO: 33902 - protein, 235 aa, Unknown
  Obtained from environmental sample
  misc_feature (1)..(235): Xaa is any amino acid
MWTFRSRPGASALTAWRLWRSVLMICGICSAVILKTCVCAGLLKQTNSRKKQMPKIEVNEEVFYSLIGNLWSNKDEFEEDLTCAKAELDEDSDKSLPVGERVLKIELNDTNRPDLWGTAGCARQLKAYQNGKIPEYPFFSQPGNIKKCAHKVKVEKSVQKVRPFLTGFIAGGKAISDPALRDMIQTQEKLAWNFGRKRRSISMGVYRITRINWPIIYKGVIPTAFLSCHYSGTPL

SEQ ID NO: 33903 - DNA, 1263 bp, Unknown
  Obtained from environmental sample
  misc_feature (1)..(1263): n is a, c, g, or t
atgggcgatccccgcgtaacctctattattttggccggcgggcaggggagtcggctgtccccccttacggccacgcgctcgaagccggctgtgcctatcggcgggaagttccggctgatcgacattccggtttccaactgcctcaaccacgggatcaggcacatctggatactcacgcagttcgcctcggaatcgctccacaggcacatattccagacttacaggctcgacaacttttccaagggcttcgtctcggtcttggccgccgcccaatccagcgagggcgcgaattggtaccaggggacggccgacgccgtgcgcaacaatctcagccacttcgaaaacttcggcgaaaccgttctgctcctctccggcgaccatctgtacaggatggacttcgagaagttcgtcaacttccactacgagaacaaggccgatctgacgctcagcgtcgtccccgtgccccgttcgcaggtgagggagctcggcatactcaagatggcccccaactacaaggtgctcgactttgtggagaagcccaaggacgacgcgcaaatagacgacttcgccacgccgccggagttgcgcgagaagacgaagaggggcgaggaggagaggacgcacgtgggttccatgggcatctatctcttcaacaggaagatattggtagacgttttggagaagttcggcgactacgacgacttcggcaagcagattatcccggcggcgataaacagctgcaacgtctacgcctacccgtttacgggttattgggaggatatcgggacgatcagggcattcttcgacgcgcatatatcgctcacttcggttaaaccgccgttcaacttctacgaccaagacaaaccgatattcacgagggcgcgttttctgccggcggccaagttcagcggctcgctgatagactcttccatagtctgcgagggttccataatcggcgacgccacgatctccgagagcgttatcggggtgcgttccgttgtgggcgacaagacgaagctctcccgcgtgatcctgatgggcgccgactactacagcaacgaggacggcggcggggcgctcggcatcggcaagaactgccggatccgcaacgccataatagacaaagacgtattcataggcgacgacgtgcgcttagagaacgtcaacaacatacaggacggcgagcgggacgggatcataatcaaggacggaattatagtggtgccgaanatgctcagggtgcccgacgggtttgtgctgtag

SEQ ID NO: 33904 - protein, 420 aa, Unknown
  Obtained from environmental sample
  DOMAIN (7)...(277): Nucleotidyl transferase
  misc_feature (1)..(420): Xaa is any amino acid
MGDPRVTSIILAGGQGSRLSPLTATRSKPAVPIGGKFRLIDIPVSNCLNHGIRHIWILTQFASESLHRHIFQTYRLDNFSKGFVSVLAAAQSSEGANWYQGTADAVRNNLSHFENFGETVLLLSGDHLYRMDFEKFVNFHYENKADLTLSVVPVPRSQVRELGILKMAPNYKVLDFVEKPKDDAQIDDFATPPELREKTKRGEEERTHVGSMGIYLFNRKILVDVLEKFGDYDDFGKQIIPAAINSCNVYAYPFTGYWEDIGTIRAFFDAHISLTSVKPPFNFYDQDKPIFTRARFLPAAKFSGSLIDSSIVCEGSIIGDATISESVIGVRSVVGDKTKLSRVILMGADYYSNEDGGGALGIGKNCRIRNAIIDKDVFIGDDVRLENVNNIQDGERDGIIIKDGIIVVPXMLRVPDGFVL

SEQ ID NO: 33905 - DNA, 819 bp, Unknown
  Obtained from environmental sample
  misc_feature (1)..(819): n is a, c, g, or t
gtgataaaccaaagcgccagtctgaccgagacaaatgccaccatgaagcaggttgtcgcgaatatcgacaaactcaacaatcatattgaagaccagagcgattatgtaacacaggcatcgtcggccattgaggagatagcggcaaatatcaattctgttacttctactcttgtccacaacgctgataatgttaaggcgctaaaggatgcttcggaaattgggcgtataggattgcagcaagtcgcatcgtatattcaggaaatcgcgcgtgactcggaggggattctggagatcaattcggtgatggagaatatagccagtcaaaccaatttattgtcgatgaacgccgctattgaagctgcgcacgccggcgaggcgggcaaaggctttgcggtagtcgccaacgagatccgcaaactcgccgaatcatcaagcaagcagtcaaaaaccataggcactgttttaaaaaatataaaggagtccatcgacaagataagcaaatccaccgatagtgtacttaccaagttcgaggcaattgactcaagcgtcagggtcgtagcggaacaggaagataacatacggcgggcgatgcaggaacagagcgtggggagcaagcagctccttcagggcgccggtaatttgaacaatattacacagcaggtaaagaccggttccgaggaaatgcttggcggatcaaaggaagtaataaatgaaagccagaacctggaaaagataaccattcagataaccggaggcatgaacgagatggcttctggcgcggaacagatcaacgtagcggtcaacacgtcaacgatataa

SEQ ID NO: 33906 - protein, 272 aa, Unknown
  Obtained from environmental sample
  DOMAIN (30)...(250): Methyl-accepting chemotaxis protein (MCP) signaling domain
  misc_feature (1)..(272): Xaa is any amino acid
MINQSASLTETNATMKQVVANIDKLNNHIEDQSDYVTQASSAIEEIAANINSVTSTLVHNADNVKALKDASEIGRIGLQQVASYIQEIARDSEGILEINSVMENIASQTNLLSMNAAIEAAHAGEAGKGFAVVANEIRKLAESSSKQSKTIGTVLKNIKESIDKISKSTDSVLTKFEAIDSSVRVVAEQEDNIRRAMQEQSVGSKQLLQGAGNLNNITQQVKTGSEEMLGGSKEVINESQNLEKITIQITGGMNEMASGAEQINVAVNTSTI

SEQ ID NO: 33907 - DNA, 1098 bp, Unknown
  Obtained from environmental sample
  misc_feature (1)..(1098): n is a, c, g, or t
atgtccgttttaaaccttgttttttctgacggcacatcggcaaaattaccggctatcagcgattccaattcatttacccaaaggcagtacaatctagccgaaatcgctggcggcaggactatcgcatccctaaatatcgaaaattcaaatacgcaccgggaagtctcggtcggcaggatagaaatagtggatccttcaataacgggcggtttaaaaccgtcaaacgcggtttctaccgctcgcgacgccgttttatcaatggaaggcatagagattacccgcccaactaatgttattgacgatcttataccgggcgttactttaaccgtcaggggcgtttccagcaaacccgttgaattaaaaattaccggcaataaggaagccgtaaaagaggccattatatcttttgtgggtaattacaaccgccttatagcggagataaacgtattgaccgcaagaagccttaattcaggatcagggtacaacaccacggtagacgacacggttataaatgaattgacatatttaacggctgatgaaaaaaaggagatgcagagcagattgggcacttttaacggggacttaaccttaacaaatttaaaaaaccaccttatgaggaccgtaacggccccctaccctaccagccttgagcgcgaactttcacttttatcccagataggcgtcagttcaaacgcctcaagaaatatgggatacaatccgtcacagttaagaggttatctggaaattgacgaaaaagcccttgatgcggccttggagactaaaatacccgcaattaaagagcttttcgcaagcaacacttcaggcgacataatcgccgatacgggcatagcctataacatagacactcttataaaaccgtttgttgaaacaggcggcatcatttccctgaaaaacagcacgcttgattcccgcatcaatcaggacgaaaaacgcattgccacgctggatcgccagttggccgcgaaagaacaggatctgcgaatgcaatattcaaaaatggaatccgcttattcgcggatggaacaaatgtcaaagtcacttgataattttagccagcaaaaccggggcggcaggtaa

SEQ ID NO: 33908 - protein, 365 aa, Unknown
  Obtained from environmental sample
  DOMAIN (80)...(349): Flagellar hook-associated protein 2 C-terminus
  misc_feature (1)..(365): Xaa is any amino acid
MSVLNLVFSDGTSAKLPAISDSNSFTQRQYNLAEIAGGRTIASLNIENSNTHREVSVGRIEIVDPSITGGLKPSNAVSTARDAVLSMEGIEITRPTNVIDDLIPGVTLTVRGVSSKPVELKITGNKEAVKEAIISFVGNYNRLIAEINVLTARSLNSGSGYNTTVDDTVINELTYLTADEKKEMQSRLGTFNGDLTLTNLKNHLMRTVTAPYPTSLERELSLLSQIGVSSNASRNMGYNPSQLRGYLEIDEKALDAALETKIPAIKELFASNTSGDIIADTGIAYNIDTLIKPFVETGGIISLKNSTLDSRINQDEKRIATLDRQLAAKEQDLRMQYSKMESAYSRMEQMSKSLDNFSQQNRGGR

SEQ ID NO: 33909 - DNA, 813 bp, Unknown
  Obtained from environmental sample
  misc_feature (1)..(813): n is a, c, g, or t
atgggagggagcatgaaaactccgttatcatactacggaggcaagcaacagcttgccaaaataattctggggcttattccgccccatcgtgtatattgcgagccttttcttggaggggccgcaatatttttcgctaaagcgccttcgaaggttgagatcgtcaacgataccaacggtgagattattaacttttatgaagtgttaaaacgtgattttacggcccttgaaaaagaggtaactataagcctccacagccgcaaacagcatactcacgcatgggtgatctaccagaacccggaattatttgatcgggtcaaaagggcgtgggcgatctggatgctcgcaaattcttcttatggtcacatgcttgacggcgggttcggctatgacaaagttagcggcggaacgacaaaaaaactggcaaataagaggctcaattttaccgaggactatgctatccggcttcagaacgcccaaatagaatgttgcgatgcgctcaagattatcaggagcagggacacggctgactcttttttttattgcgatccgccctatgtaggatcggatcaggggcattacgatgggtacacccaagaggattttgattgcttgctgaaccttttggctggtatcaaggggaaattccttttgagttctttccgaaacgaaacgctggacaagtttgtaaagcggaagggctggcatactttcgaggtgtcgatggtatgctcgatgaccaataaaaccggaaaaacaaggaaaaaggtcgaggtttttaccgctaactacccaattaaagccccggacaaatag

SEQ ID NO: 33910 - protein, 270 aa, Unknown
  Obtained from environmental sample
  DOMAIN (11)...(243): D12 class N6 adenine-specific DNA methyltransferase
  misc_feature (1)..(270): Xaa is any amino acid
MGGSMKTPLSYYGGKQQLAKIILGLIPPHRVYCEPFLGGAAIFFAKAPSKVEIVNDTNGEIINFYEVLKRDFTALEKEVTISLHSRKQHTHAWVIYQNPELFDRVKRAWAIWMLANSSYGHMLDGGFGYDKVSGGTTKKLANKRLNFTEDYAIRLQNAQIECCDALKIIRSRDTADSFFYCDPPYVGSDQGHYDGYTQEDFDCLLNLLAGIKGKFLLSSFRNETLDKFVKRKGWHTFEVSMVCSMTNKTGKTRKKVEVFTANYPIKAPDK

SEQ ID NO: 33911 - DNA, 954 bp, Unknown
  Obtained from environmental sample
  misc_feature (1)..(954): n is a, c, g, or t
atgcttatggaaataaagctcaacgagccgcagctaaaggcggcaaaccagcttgaaggggcaatccttataatcgcgggggcaggctccggcaagaccagggtaattacctgccggattgcgcggatgcttgaaaagggaataccgcagtcggcgatccttgccctcacctttacaaacaaggcagcgcgtgaaatggaaagccgggtaaaggagatgacggggaaaaaacttacaagcctgactgtaagcacctttcacgcttttggggtaaaaatactccgcgaagaaattgagattctgggatacagaaaaaatttttccatctacgattccaccgacagatgcgaactgataaaagagagcctcagggaatgtaagctttacggtgaaaaaacagacctaaaaaaaatggaagcgcttttttcaaatgtcaagataggccgtcttaattggggcagggctacagaaacatccgctaatgttgccgacaatatctgggaaaaagcgtactacgaatacgagaacagcctaaaaacctacaacgccctggactttgacgatctccttgtgctacctatacatctttttaaggagcaccccgatattcttgaaaagtaccgtaaacgttaccgctatattctggttgatgaattccaggacacaagcctgattcaatataaattacttagacttctggcaaacccttccggcagccaaagcaacatatgcgtggtgggggacgatgatcaatcgatttattcctggcgcggggcanactacgaanacctcctcctgtttgaaaaagactttcctgaattgcttgagatcaaactggaacaaaactaccgctccactaccacgatcctggacgcggcaaacggccttatttcgcataacacaaaccgcaaaggaaaaaccctctggtcgggcancgggaaggcaaacccatag

SEQ ID NO: 33912 - protein, 317 aa, Unknown
  Obtained from environmental sample
  DOMAIN (7)...(317): UvrD/REP helicase
  misc_feature (1)..(317): Xaa is any amino acid
MLMEIKLNEPQLKAANQLEGAILIIAGAGSGKTRVITCRIARMLEKGIPQSAILALTFTNKAAREMESRVKEMTGKKLTSLTVSTFHAFGVKILREEIEILGYRKNFSIYDSTDRCELIKESLRECKLYGEKTDLKKMEALFSNVKIGRLNWGRATETSANVADNIWEKAYYEYENSLKTYNALDFDDLLVLPIHLFKEHPDILEKYRKRYRYILVDEFQDTSLIQYKLLRLLANPSGSQSNICVVGDDDQSIYSWRGAXYEXLLLFEKDFPELLEIKLEQNYRSTTTILDAANGLISHNTNRKGKTLWSGXGKANP

SEQ ID NO: 33913 - DNA, 804 bp, Unknown
  Obtained from environmental sample
  misc_feature (1)..(804): n is a, c, g, or t
ttgcgttttgcggaaaatctcaggtttgacgatttcggcgtcctgttaagaaccaacaaccaattcgactgcatcgaagaagcttttttggcggcaaatattccgtacagggtttcaggcggattcagtttttttgaacgcaaggaaatcagggacatactttcctacatgagggtaatcgccaatcacgacgatgatgtaaacctgcttagaattatcaacaccccaagacgcggcataggcaaagccggcatccacaacgctgcggagcttgcaaaaaaaaatcattccagcctctacgacgccttgtaccgtatttctctcgcaaagcaaccggaactcataaaagaacatggaggaaaagagtacggtatagaagaattcattgaacttattcaaagttcaagagatgaattttttggcgcgggggagctttcaaaaaaagtccggaacctggttgataaaattggctactgggactatttattgaacgaacatggcagggacgaaaaaaaagtttggtggaaatatgacaatatcaaatacctcattgaaatgatagaaaactgggaaaacgatcctgacgtttttgacaaggggctttacgcctacctgaaccgcatcagtcttttaacaagaaccgacggcgaagaggagcgaaacgacgcttcatcgaaaaatcgcggcaaggtaaatttatcgaccatacacgcggccaagggccttgagtttcccngtggtgttcatagcgggcgcggaggaaggcatcatcccccacgaaagaagcctgaagctcgcccataa

SEQ ID NO: 33914 - protein, 267 aa, Unknown
  Obtained from environmental sample
  misc_feature (1)..(267): Xaa is any amino acid
MRFAENLRFDDFGVLLRTNNQFDCIEEAFLAANIPYRVSGGFSFFERKEIRDILSYMRVIANHDDDVNLLRIINTPRRGIGKAGIHNAAELAKKNHSSLYDALYRISLAKQPELIKEHGGKEYGIEEFIELIQSSRDEFFGAGELSKKVRNLVDKIGYWDYLLNEHGRDEKKVWWKYDNIKYLIEMIENWENDPDVFDKGLYAYLNRISLLTRTDGEEERNDASSKNRGKVNLSTIHAAKGLEFPXGVHSGRGGRHHPPRKKPEARP

SEQ ID NO: 33915 - DNA, 1026 bp, Unknown
  Obtained from environmental sample
  misc_feature (1)..(1026): n is a, c, g, or t
atgagtaacgaaaaacgaaaaatattggtgaccagcgccctcccttacgccaacggcgatatccatttggggcacctccttgaagctgtccagacggacatatacgtccgctaccaccggcttcgcggcgacgacgttctctatgtctgcgcggacgatactcacggcacgcccatagagataagcgctatgcggcagggcattacacccgaagagcttatcaatagggcgcgcgagaaccatatccgcgactacgcggggtacgatatcagcttcgatacctactataccaccaattccgaggagaaccgccgctacgcggagcagatatacgagagtttgcgccaaaacgggctcgtgacggagaaggagatcaaccaatactactgcgaacacgacaagcgttttctgcctgaccggttcatcgtcggcacctgcccccgttgcggggcgcagaagcagtacggcgacgtctgcgaggtttgcggggccacatacgagcccaccgacatcgtgaatccggcttgcagcctctgcgggcaaacgccgcagctgcgcgcttccacgcatatatacgtgcaactcgccaagcgggcggatttcctgcgggagtacataaaccgtccgggcgcgctgcaatccgacatgcggaactttgtgggcacttggatagaggaggggctcaaagagtggtgcatatcgcgtgacgggccatacttcggtttcaagataccgggcaccgagaataaatatttttacgtgtggatggacgcgcccatcggttacctctcgtcgaccgatcactactgcgccgaacacggcttagacgtaatggactactggaagaagagcggctcatgcgagatcgttcacttcatcggcaaggacatcgtgtactttcacacactcttttggccggtgatgctcgacagcgccggatttgccgttccgtcaagcattcgtgtccacggtttcctgaatgtggagggcgagaagatgtccaagtcccgcggcccccgcgaataa

SEQ ID NO: 33916 - protein, 341 aa, Unknown
  Obtained from environmental sample
  misc_feature (1)..(341): Xaa is any amino acid
MSNEKRKILVTSALPYANGDIHLGHLLEAVQTDIYVRYHRLRGDDVLYVCADDTHGTPIEISAMRQGITPEELINRARENHIRDYAGYDISFDTYYTTNSEENRRYAEQIYESLRQNGLVTEKEINQYYCEHDKRFLPDRFIVGTCPRCGAQKQYGDVCEVCGATYEPTDIVNPACSLCGQTPQLRASTHIYVQLAKRADFLREYINRPGALQSDMRNFVGTWIEEGLKEWCISRDGPYFGFKIPGTENKYFYVWMDAPIGYLSSTDHYCAEHGLDVMDYWKKSGSCEIVHFIGKDIVYFHTLFWPVMLDSAGFAVPSSIRVHGFLNVEGEKMSKSRGPRE

SEQ ID NO: 33917 - DNA, 1812 bp, Unknown
  Obtained from environmental sample
  misc_feature (1)..(1812): n is a, c, g, or t
atgctcgccgttggcgttggcggtgcagatgctgtggacgcaatggtgagtttaccctgggaattgaaatatccacgcataataggtgttaaattgcgcggctctttgagcggttttgcaagccccaaagatgttatcttgaaattagcaggaattttaaaagtttctggcggtacagattccataatagaatattttggcgaaggtgcaaaaaccctttctgcaacgggaaaaggaactatatgcaatatgggtgcagaaattggtgcaacttgtagcatttttggctttgattcctctatggaaagatatttacgagcaacagacagagcagaaattgcagatgccgctaaaaaaataatttcttatttacgatgcgatgcagaagttgaagttgaaccggaaaaatattttgacaaagttatagaaattgatttaagcgcattaaaaccgcactacaacggcccctttagcccagaccgttcttttgcaatcggtgaaatggaaaaatcactggaagaatttgaaagcccctcggagataagtgcagctttaataggcagttgcacaaattcaagctacgaagacctagcaagagccgcttccataatcaaagacgcacaggcaaaaggcataaagccaaaagttccgctctacataaacccaggttccgaggcggtacgggcaacagcagaaagagatggaattttgcgtacattcacagattttggtgcaacggtatttgccaacgcttgcggtccctgcattggaatgtgggcgagaaacgatataaaaaaaggacaaaaaaacagcattgttcattcattcaaccgcaatttcaccggcagggccgatggcaacgaacaaacccacgcatttgtggcaagcccggaaatgcgatttatagtttgcttttcgggctccctgctctttaatccagaaactgattttttgataaattccgctggcgaaaaacaaaaattatccgcgccttggggtgatgaattacctacaaatggttttgtttttgattcaaatgccgtaaggatttacgaaggcgatagttccgcagagattaaaatagaacccggaagcagcaggcttcagatattaaaaccctttgaaccgtggagcgggagagacattttaaacgcgaaacttttaatcaaagtgagcggaaaatgcaccacagaccacatttccaaagcgggggagtggctaaaatatcgcggacatttggaaaacatctccggcaatcttttaatcggtgccgagaatgcttttaatggcaaaaaaaataaggtgcactttcagccgagtggagcggagatgagcgtgccagaggcagcaaaggcgtataaggctgcaaaaaatccgagcatagttataggagacgaaaattatggcgaaggttctagccgtgaacacgctgctatggaacctcggtttttaggggttgtggctgttatagcaaagagctttgcacgcatacacgaaacaaatctcaaaaaacaggggatactcgcacttacttttgcaaacaaaagcgactatgataaaattttggaaaacgacgctttctcaatttttgggctttctaactttgagcggggtagccagtttgtgcttcttctgtgccacgcagacggtacgcaagaagaagtccctttgagccacacatacaataaaagccaatgggaatggttcaaagctggtagtgcattgaatgcgttgaagaatagtgataaatgcctaactttaacatcaaggctccaaagtacgattccgtttctgaaccgcaggcggagctag

SEQ ID NO: 33918 - protein, 603 aa, Unknown
  Obtained from environmental sample
  DOMAIN (385)...(515): Aconitase C-terminal domain
  misc_feature (1)..(603): Xaa is any amino acid
MLAVGVGGADAVDAMVSLPWELKYPRIIGVKLRGSLSGFASPKDVILKLAGILKVSGGTDSIIEYFGEGAKTLSATGKGTICNMGAEIGATCSIFGFDSSMERYLRATDRAEIADAAKKIISYLRCDAEVEVEPEKYFDKVIEIDLSALKPHYNGPFSPDRSFAIGEMEKSLEEFESPSEISAALIGSCTNSSYEDLARAASIIKDAQAKGIKPKVPLYINPGSEAVRATAERDGILRTFTDFGATVFANACGPCIGMWARNDIKKGQKNSIVHSFNRNFTGRADGNEQTHAFVASPEMRFIVCFSGSLLFNPETDFLINSAGEKQKLSAPWGDELPTNGFVFDSNAVRIYEGDSSAEIKIEPGSSRLQILKPFEPWSGRDILNAKLLIKVSGKCTTDHISKAGEWLKYRGHLENISGNLLIGAENAFNGKKNKVHFQPSGAEMSVPEAAKAYKAAKNPSIVIGDENYGEGSSREHAAMEPRFLGVVAVIAKSFARIHETNLKKQGILALTFANKSDYDKILENDAFSIFGLSNFERGSQFVLLLCHADGTQEEVPLSHTYNKSQWEWFKAGSALNALKNSDKCLTLTSRLQSTIPFLNRRRS

SEQ ID NO: 33919 - DNA, 825 bp, Unknown
  Obtained from environmental sample
  misc_feature (1)..(825): n is a, c, g, or t
ttgcgcataacgaatatttgcgatgaggccggtctttgcgcctttgtgcgcgaagcgtggggggcaagggcgtttcgttatcttgagattatccgttttacgggcggttggcagttattcccggaactgtacgattctctttgcggcgcgcttcgccgcgaaattgccacagactggagcaacgccctgacccttgccaaacttggacgcttgtatatccgcaacgctttgcgcaatctttcgcttattccgcgctttccatcttttgcaaacctttcttttggcgcggctcctgttcttgtccttggagcgggtccctcgcttgatgaaacattagacgctcttgtaaaacattatccgcaaaatttggaacgtcctttcagaattgtttgcgtggatacctgtcttggctcgctgaaagacaggggtattaatcccgatcttgttgttattttggaaagccagcactggaacctgcgcgactttaccggctgttacggattgcaagcttcgtttgcgatagacctttccgctttgccgcagtcggcttttatgcttgccggggacggctttttatttatgacgccctggacgcctctgcgtatttttgaaaggctaaaagaagcgcagatgcttccggccgttcttccgccgcttggttctgtcgggcttacggcagttgaattagccagacggcttacaacaggcattataatctgcgcgggtcttgatttttctttttctcccgacaagtaccatgcccgtggtacgccggggcatcgcgcccctgttaaattcgcagaaccgtcttcacggaatatttaa

SEQ ID NO: 33920 - protein, 274 aa, Unknown
  Obtained from environmental sample
  misc_feature (1)..(274): Xaa is any amino acid
MRITNICDEAGLCAFVREAWGARAFRYLEIIRFTGGWQLFPELYDSLCGALRREIATDWSNALTLAKLGRLYIRNALRNLSLIPRFPSFANLSFGAAPVLVLGAGPSLDETLDALVKHYPQNLERPFRIVCVDTCLGSLKDRGINPDLVVILESQHWNLRDFTGCYGLQASFAIDLSALPQSAFMLAGDGFLFMTPWTPLRIFERLKEAQMLPAVLPPLGSVGLTAVELARRLTTGIIICAGLDFSFSPDKYHARGTPGHRAPVKFAEPSSRNI

SEQ ID NO: 33921 - DNA, 543 bp, Unknown
  Obtained from environmental sample
  misc_feature (1)..(543): n is a, c, g, or t
atgaccttgtgccttgaaaagcgcggagtacaaaccaacatgacctaccttgatgaaaagcgcgttgagcttatttacgacatgcccctttccgaagtcttattcgatttctacgaccgccttaaaagcatttcgaggggttacgcgtcatttgactacgatatttccggctacaaaccgacggaactcgccaaactggacattcttcttaacggcaaggctgtggacgccctttcccagcttgtgttcaagggcaacgcctacgaccgcgcccgcaaagtctgcgaaaggttacgcgacgaaatcccccgccagcagttcaagataccgattcaaggctcaatcggaagccatgtaattgcgcgggaaaccgttaacgcgcttcgcaaagacgtacttgccaaatgttacggcggcgacattacgcgcaaacgcaaactgctggaaaagcaaaaagaaggcaaaaaacgcatgaaaatggtaggcgacgtggaacttccgcaaagcgcgtttttagcggtgttgaaagcgaaagatgaataa

SEQ ID NO: 33922 - protein, 180 aa, Unknown
  Obtained from environmental sample
  DOMAIN (1)...(69): Elongation factor G C-terminus
  misc_feature (1)..(180): Xaa is any amino acid
MTLCLEKRGVQTNMTYLDEKRVELIYDMPLSEVLFDFYDRLKSISRGYASFDYDISGYKPTELAKLDILLNGKAVDALSQLVFKGNAYDRARKVCERLRDEIPRQQFKIPIQGSIGSHVIARETVNALRKDVLAKCYGGDITRKRKLLEKQKEGKKRMKMVGDVELPQSAFLAVLKAKDE

SEQ ID NO: 33923 - DNA, 339 bp, Unknown
  Obtained from environmental sample
  misc_feature (1)..(339): n is a, c, g, or t
atggatagaaaatcttgctccttccggaaggggtattattggcggcttatcgcaaaaactaaatcacgatcatatcactcttacggtcttgccattgatttgcttcctgaaaagttagaaggaaagcaaacatattggttgtggacttcccggaaaatagacgactggtggaatgttccgtacagcgagcgataccatccgcccgagaaagtaataaaaatatttgagtcctatggttttgtctggggcggcaagtgggtacagtttgatactatgcattttgaataccgccccgaagtttttattctgaacggactgcctttagcggacacaccctag

SEQ ID NO: 33924 - protein, 112 aa, Unknown
  Obtained from environmental sample
  misc_feature (1)..(112): Xaa is any amino acid
MDRKSCSFRKGYYWRLIAKTKSRSYHSYGLAIDLLPEKLEGKQTYWLWTSRKIDDWWNVPYSERYHPPEKVIKIFESYGFVWGGKWVQFDTMHFEYRPEVFILNGLPLADTP

SEQ ID NO: 33925 - DNA, 603 bp, Unknown
  Obtained from environmental sample
  misc_feature (1)..(603): n is a, c, g, or t
atgccttccgtgattgaagaagaggaaaaagaaatagaaataaatataccgggagttgattcgaaaaaagggctttccctgtacgccggcgatacgggtatttatatacccctgctgcgctcatacattaccaacacgccggcaactttggaaaaactgaaaaatgtcacggcggagaacctgcgggggcgtgatatatacgtacacgggttaaagggaacaagcgccggcataggcgcggaagaagtacgggcacaggctttacagttggaaaacttgtcaagggcaggcgacttgcagagtgttctggataagaacgacaaacttattgccgatacggaagtcattgtcgccaatgtaaaagcctggctggatcaaaatgacgttcatgaaacaaagccgcgcaaaaaaacccccgatcgggaacttctggctaaactgagggaaagctgtgaaagttacgatatggacagcattgaagaatccatgaaagaacttgaaagtttcgactacgatgaagaggcagatttggtaaaatggatacgggaaaaaattgatatttccaaaatgggcgatgtggcaaagcggcttgcagagctataa

SEQ ID NO: 33926 - protein, 200 aa, Unknown
  Obtained from environmental sample
  DOMAIN (37)...(112): Hpt domain
  misc_feature (1)..(200): Xaa is any amino acid
MPSVIEEEEKEIEINIPGVDSKKGLSLYAGDTGIYIPLLRSYITNTPATLEKLKNVTAENLRGRDIYVHGLKGTSAGIGAEEVRAQALQLENLSRAGDLQSVLDKNDKLIADTEVIVANVKAWLDQNDVHETKPRKKTPDRELLAKLRESCESYDMDSIEESMKELESFDYDEEADLVKWIREKIDISKMGDVAKRLAEL

SEQ ID NO: 33927 - DNA, 807 bp, Unknown
  Obtained from environmental sample
  misc_feature (1)..(807): n is a, c, g, or t
gtgaaggacaagctcgcctccctcggctttgaggaatttgacggcccgttagttgaaacagagttctggaattccgacgccctgttcatgccgcagttccattcggcgcgtgacatacatgacagctacagccttagcgatccgaaaaaacccggtgaaatcgcaaaagcgaagtcaatagaagagccctggctttccaatgtcgccacggcccacgaaaacggcgggaaaaccggcagccgcggctggagctacacatttgaccgtgaatttacccggcggctgatcctccgttcccagggcacggtgctttccgcgaaaaccctgccaaaggcgaaaattcccggcaagtatttcggcattgtccgctgtttccgctatgaccgcgtggacgccacccacctgccggacttctaccagaccgagggcattgtgttaggcgaaaacgtaaacctgcgcacccttttgggaatgctggatatgttcgcccgcgaggttgccggcgcgaaagaggttaaatacgttcccggctatttcccctttacagagccttcggtggaggtgcatataaaacatccggtgcttggctggttcgagctgggaggttccggcattttccgtcccgaggtgacgcanagcctgggtgtggacgttcaggtagcggcctggggcatcggcattgaccgcatggcccttatggcgctcggccttaatgatctgcgggatctgttcagcggcaatattgaagacgtgcggctgcgcccgcttcatgatattaacaaactcaaggaaaaagcaaatgcctaa

SEQ ID NO: 33928 - protein, 268 aa, Unknown
  Obtained from environmental sample
  DOMAIN (2)...(254): tRNA synthetases class II core domain (F)
  misc_feature (1)..(268): Xaa is any amino acid
MKDKLASLGFEEFDGPLVETEFWNSDALFMPQFHSARDIHDSYSLSDPKKPGEIAKAKSIEEPWLSNVATAHENGGKTGSRGWSYTFDREFTRRLILRSQGTVLSAKTLPKAKIPGKYFGIVRCFRYDRVDATHLPDFYQTEGIVLGENVNLRTLLGMLDMFAREVAGAKEVKYVPGYFPFTEPSVEVHIKHPVLGWFELGGSGIFRPEVTXSLGVDVQVAAWGIGIDRMALMALGLNDLRDLFSGNIEDVRLRPLHDINKLKEKANA

SEQ ID NO: 33929 - DNA, 732 bp, Unknown
  Obtained from environmental sample
  misc_feature (1)..(732): n is a, c, g, or t
atgggtgtgtttacatttatgccctcaggggctggcggaatcattgtccgggttgagacggatatacgcaggggaattcccggcgttgacatttcagggcttgcggaaggagcggtcagggaagcgcgtgacagggtacgggctgcttttagaaattcagggttcagttttccgctggacaggattttaattaaccttgcccccgcaggattgaaaaaagacggagctgcgctcgatctgccaatcgcgctttcagtaatggcggcggctggaataatcactatttcgggaaacctgctcgttatgggagagcttgagctttcaggcaggatacgccctgtgcgcggcgttcttgcggctgttgcggcgggacttgcagaaggcatacgcgaatttatcgttcccgcgcaaaatgcggcagaagcggcgattttaacggataagggtatgcgttttaccgccgcggaaaatttacagggcgcggtacacgcacttgtcatgagagaaaaaaacggctatcttcccgaatcacttgatgaggttttttcatcaaccgcgccgatagcggcggatatggcaaatttgtcagctaacgcggcggtaagaacggaggattgtggtgattttgctgatgttcgtgggcagacaatttacaaacgggctttggaaatgccgccgcaggtggacacaacacgcttgtctttggtccacccggccctcggccgaatctga

SEQ ID NO: 33930 - protein, 243 aa, Unknown
  Obtained from environmental sample
  misc_feature (1)..(243): Xaa is any amino acid
MGVFTFMPSGAGGIIVRVETDIRRGIPGVDISGLAEGAVREARDRVRAAFRNSGFSFPLDRILINLAPAGLKKDGAALDLPIALSVMAAAGIITISGNLLVMGELELSGRIRPVRGVLAAVAAGLAEGIREFIVPAQNAAEAAILTDKGMRFTAAENLQGAVHALVMREKNGYLPESLDEVFSSTAPIAADMANLSANAAVRTEDCGDFADVRGQTIYKRALEMPPQVDTTRLSLVHPALGRI

SEQ ID NO: 33931 - DNA, 726 bp, Unknown
  Obtained from environmental sample
  misc_feature (1)..(726): n is a, c, g, or t
atgacaagtgcgtgtaccgcgccctgtaaattttccgcggcggtaaaacgcatacccttatccgttaaaatcgccgcttctgccgcattttgcgcgggaacgataaattcgcgtatgccttctgcaagtcccgccgcaacagccgcaagaacgccgcgcacagggcgtatcctgcctgaaagctcaagctctcccataacgagcaggtttcccgaaatagtgattattccagccgccgccattactgaaagcgcgattggcagatcgagcgcagctccgtcttttttcaatcctgcgggggcaaggttaattaaaatcctgtccagcggaaaactgaaccctgaatttctaaaagcagcccgtaccctgtcacgcgcttccctgaccgctccttccgcaagccctgaaatgtcaacgccgggaattcccctgcgtatatccgtctcaacccggacaatgattccgccagcccctgagggcataaatgtaaacacacccataaaatctcctgcctatatatggcgtgcagatgcgtggcgcttgaccgaaaatgagatttttttcgaaaaatttctcactaagaacacaaagaaagagaagagcacaaaggaggagaggggttgttgtctgaaagatatgcgtggacttcacgataagataacggataataacccctgttttttctttgtgttctttgtgagatttattcgggatttacagacctaa

SEQ ID NO: 33932 - protein, 241 aa, Unknown
  Obtained from environmental sample
  misc_feature (1)..(241): Xaa is any amino acid
MTSACTAPCKFSAAVKRIPLSVKIAASAAFCAGTINSRMPSASPAATAARTPRTGRILPESSSSPITSRFPEIVIIPAAAITESAIGRSSAAPSFFNPAGARLIKILSSGKLNPEFLKAARTLSRASLTAPSASPEMSTPGIPLRISVSTRTMIPPAPEGINVNTPIKSPAYIWRADAWRLTENEIFFEKFLTKNTKKEKSTKEERGCCLKDMRGLHDKITDNNPCFFFVFFVRFIRDLQT

SEQ ID NO: 33933 - DNA, 498 bp, Unknown
  Obtained from environmental sample
  misc_feature (1)..(498): n is a, c, g, or t
ttggtgtcttggggcggttcccaaaccttggttgatcttggcattcaggagcggcttgcgaaagaaggttttaatctgctggacagagataaggcgtcttctcccgaagagcggatggaaataatgaagcgggctttaacatgcgatacttttctttcgggaacaaacgcaatcagcgaagacggtcagcttataaacattgacggaaacggcaacagagtcgccgcgatgacctttggtcctaagcaggtaattatagccgtaggcatgaataaaatagccagaacttacgaagaagcccttgtccgcgcaagaaacatcgccgcgcctctgaatcttcagcgttttccaaacatggaaacaccctgcaccgagacaggttcatgcgatgactgcctaagccccgacacaatctgttcatacattgttacaacccgcttctgcaaaccggcgggaagaattaaagttgttctgattggcacggatttaggtctgtaa

SEQ ID NO: 33934 - protein, 165 aa, Unknown
  Obtained from environmental sample
  DOMAIN (1)...(165): Protein of unknown function (DUF1121)
  misc_feature (1)..(165): Xaa is any amino acid
MVSWGGSQTLVDLGIQERLAKEGFNLLDRDKASSPEERMEIMKRALTCDTFLSGTNAISEDGQLINIDGNGNRVAAMTFGPKQVIIAVGMNKIARTYEEALVRARNIAAPLNLQRFPNMETPCTETGSCDDCLSPDTICSYIVTTRFCKPAGRIKVVLIGTDLGL

SEQ ID NO: 33935 - DNA, 1650 bp, Unknown
  Obtained from environmental sample
  misc_feature (1)..(1650): n is a, c, g, or t
atggtaggcgacttcggcattgccagtatctttgaagttgacgccgggatgagcaagcacatgacggaaaccggcgcaaagaccgagggctacgccgcacctgaagcgtattccggcgttatcggtaaagaatacgactactattcattgggcgtaactctttgggttttgcttacaggtttggagccttttgtcaacgaaaaagggcaggctctgtattccggccagataacattggacactattcagggaaagacagttgataatctgctttcccgttccccgaaaatcaacgcttccatgcagaagctgataagagggcttttaaccgtccgacacgacaagcgctggaaacatgatgaagttacgcgccatcttgccggcgagaacattgaattgtttacggaagtacggacgctgccgttagttgaaatcggcggcgaaagctgttcgtcgtatcaggaaatcgcccgcgcccttatcaatcatccggaagaaggcaagaattttatctttaaaggcagactccttaactaccttatcaaaattgatcagaaacttgtagacaaattgatcgaattaatcgaaaaattcagcgctgagaacagggaagacgaggggcttgtttttatagcttattcactatgtcccaatatggcttttcctcttgaacatgatctttcaatcagcagtttacaggagatgttcacggttttaaatacagacccggacgcgattcttcctttccttagggacgaaagaagaggtttttacgcctatcttgaagtttccggtcttggcgaacatggcaagaaagtaaaggaaatcgtgaactctacaaccggggatatcagggcggtgtcccggattattgcaacgtttcaaggcaatgtgataaatccattccaagatggaattaacaatgaatgccgattaacttctttggaagacatgtacaacttgcccggttacctgaaagagcgggtgatgattttcattgagcgcaactacggactgctccccgcatggatagagaaccttaccgggaaaaaccttgacacttggttatcattgctttctgagaaaaaagatcgaattgcccgctggggagcgtgggagtatttcatcttgtttatgcaggatattgaatcttacgacaggatacaaaaaaacggcgattttattctgtatgaaaaaaacgggaaaaaaggtttgtaccgtatcgcgttaaattcgaaccatgcggagttgctctacggagtggaagttgacggtaatcggcttacgcttaaaaaaaaggacggcggagttgcattaagcggaacatacgccgttaatttcgccgacgggtacgacgggggcggtgtttccactctgccattccttgacggggaaaacaaaatggcgatttttgacggctcccaactttattacttcaatataaactcaagtcttaaagagccgcgccatgaattgaaagacggtgaaatcaatctgctcttaaaactgggcagtgccgttcccgcacttgatcttgcccagagttttaaggaaaaaaataattttaccgacatgaataaatttatcgacgccttcggaaaaaatttgggaagaaagaaaatcgctcgtgccgaatctgtcattcgttaa

SEQ ID NO: 33936 - protein, 549 aa, Unknown
  Obtained from environmental sample
  misc_feature (1)..(549): Xaa is any amino acid
MVGDFGIASIFEVDAGMSKHMTETGAKTEGYAAPEAYSGVIGKEYDYYSLGVTLWVLLTGLEPFVNEKGQALYSGQITLDTIQGKTVDNLLSRSPKINASMQKLIRGLLTVRHDKRWKHDEVTRHLAGENIELFTEVRTLPLVEIGGESCSSYQEIARALINHPEEGKNFIFKGRLLNYLIKIDQKLVDKLIELIEKFSAENREDEGLVFIAYSLCPNMAFPLEHDLSISSLQEMFTVLNTDPDAILPFLRDERRGFYAYLEVSGLGEHGKKVKEIVNSTTGDIRAVSRIIATFQGNVINPFQDGINNECRLTSLEDMYNLPGYLKERVMIFIERNYGLLPAWIENLTGKNLDTWLSLLSEKKDRIARWGAWEYFILFMQDIESYDRIQKNGDFILYEKNGKKGLYRIALNSNHAELLYGVEVDGNRLTLKKKDGGVALSGTYAVNFADGYDGGGVSTLPFLDGENKMAIFDGSQLYYFNINSSLKEPRHELKDGEINLLLKLGSAVPALDLAQSFKEKNNFTDMNKFIDAFGKNLGRKKIARAESVIR

SEQ ID NO: 33937 - DNA, 939 bp, Unknown
  Obtained from environmental sample
  misc_feature (1)..(939): n is a, c, g, or t
atgctcgatataatcagggtggcggcaaggtccaaagggaaaatagatgagcgtagcctgccgaaattgccgaggaacataaaaggcaatatgcttaaatcttttttagtggcattaaacgaagccgcctctgcccctgcaagcgaattcccttcaataatcatcaacaaagcagccccgcgtacctccataaacgaagacctgcgagaaaaactgagggaattgaggaacgaaaaagccgagcagttgcaaatagaatccgggattttggcaaagcaaagccagttgaacgcactcgcaaacacattaaatggcgactgggaagaaaaattcaacgtcgccgagttcatgaattggcaacgcgaaatttggtggtctttaatcccaaaagcgacattgccaaaaacacctgatgaattcagagcctgggcaaaacaaaggcttttagcgatggacgcagaaaccaaagctatggaatcggaaaaattgctcattgagctttcaaagcgcgctactttggaaaacggctatatagctgcattctaccccaccgagcttgaaccgcaaatcattccttttttaaaaaaacttgcagaagagaacagattacttttgccaagggtattggacaaacagaaaatggagttcgctcttgtgcaaaatctggatagcgatctgtgcacaggggcttttaagataatggaacccaaagcggatttgccagcatttgaaaatcctccaacggcatttcttgtgcccggcgttgtttttggcaaggactgcagccgcatagggcatggcgcgggctattatgaccagtttttggctaatttcaaaggcgttccgcggtttggaattgcttattccgttcaaatcagaacttcgctaccgcaaaacgcagcggatatgaaaatggatgaagtgctgtgggttaagtaa

SEQ ID NO: 33938 - protein, 312 aa, Unknown
  Obtained from environmental sample
  DOMAIN (139)...(311): 5-formyltetrahydrofolate cyclo-ligase family
  misc_feature (1)..(312): Xaa is any amino acid
MLDIIRVAARSKGKIDERSLPKLPRNIKGNMLKSFLVALNEAASAPASEFPSIIINKAAPRTSINEDLREKLRELRNEKAEQLQIESGILAKQSQLNALANTLNGDWEEKFNVAEFMNWQREIWWSLIPKATLPKTPDEFRAWAKQRLLAMDAETKAMESEKLLIELSKRATLENGYIAAFYPTELEPQIIPFLKKLAEENRLLLPRVLDKQKMEFALVQNLDSDLCTGAFKIMEPKADLPAFENPPTAFLVPGVVFGKDCSRIGHGAGYYDQFLANFKGVPRFGIAYSVQIRTSLPQNAADMKMDEVLWVK

SEQ ID NO: 33939 - DNA, 360 bp, Unknown
  Obtained from environmental sample
  misc_feature (1)..(360): n is a, c, g, or t
ttgttttctcttcctgcgggtactgagatggttcacttccccgcgttcgccccccggggcctattttgttcggccctggggtgcccaggctcgcgcctgggcgggttcccccattcggacacccccggatcaaagcccgcgtgcggctccccggggcttttcgcagcttaccgcgtccttcttcgcggccgtcagcctaggcatccgccgtcgaccctctctcgcttgccctgcgccggcgggacgcgccggcgcggttgttgctccttgactgctgctcccttctcgcttcccgccccggctcgcgactcgcgcgcccggggcggcccccctatcctccctcgcttcggtttccaataa

SEQ ID NO: 33940 - protein, 119 aa, Unknown
  Obtained from environmental sample
  misc_feature (1)..(119): Xaa is any amino acid
MFSLPAGTEMVHFPAFAPRGLFCSALGCPGSRLGGFPHSDTPGSKPACGSPGLFAAYRVLLRGRQPRHPPSTLSRLPCAGGTRRRGCCSLTAAPFSLPAPARDSRARGGPPILPRFGFQ

SEQ ID NO: 33941 - DNA, 498 bp, Unknown
  Obtained from environmental sample
  misc_feature (1)..(498): n is a, c, g, or t
ttggggtttcggccgggagccgggctggctttcgcgtacggggctggcaccctgttccgccggcgtttcaacgccgttccgctagccacccggtttgtgactccccgcccgcgctgcagcgcgggccgcccgtcccctcgacaccgctccggcaacgcctgcaggctgtcacgccggcgcggtttgggctggtccggtttcgctcgccgctactcccggaatcactcttgttttctcttcctgcgggtactgagatggttcacttccccgcgttcgccccccggggcctattttgttcggccctggggtgcccaggctcgcgcctgggcgggttcccccattcggacacccccggatcaaagcccgcgtgcggctccccggggcttttcgcagcttaccgcgtccttcttcgcggccgtcagcctaggcatccgccgtcgaccctctctcgcttgccctgcgccggcgggacgcgccggcgcggttgttgctccttga

SEQ ID NO: 33942 - protein, 165 aa, Unknown
  Obtained from environmental sample
  misc_feature (1)..(165): Xaa is any amino acid
MGFRPGAGLAFAYGAGTLFRRRFNAVPLATRFVTPRPRCSAGRPSPRHRSGNACRLSRRRGLGWSGFARRYSRNHSCFLFLRVLRWFTSPRSPPGAYFVRPWGAQARAWAGSPIRTPPDQSPRAAPRGFSQLTASFFAAVSLGIRRRPSLACPAPAGRAGAVVAP

SEQ ID NO: 33943 - DNA, 1557 bp, Unknown
  Obtained from environmental sample
  misc_feature (1)..(1557): n is a, c, g, or t
ttggggaggggaaagactacaaaaacaagctggagctatatggcatgcagcctttttctttgccttacacagacttttttttgccgccaatacggggaagaagtcataataatatggaatgtaataaccatgatttatgtcacttaccttctcggttacgaagtcatatatttccatctttggagcaggcatagaactaaagttcttaagactaaagtccttagaactaaagtccttaaggctaaagtcctgggaagcgatgccgacaaggctccggccctgcctatcgacaacattttgtttggcatggtgatatgctacacgtgcggggtttttgactttctgcacaatacgttttccaaagacaacatctctcttttttcatacagtgtatttgtggtttacgtcgggatggtttttaccctgtcccggcggttcagcggaatgtttaagcagctggagaaatcaaacaccatgctggaaatggcggtacatgagcgcacggtagaattggaaaggcaaaccgaaatagccatccaggcaaaccgcgccaaaagccacttccttgccacaatgagccatgagatcagaacccctttgaacgcggtgatcggcttgtcggagattgaactgcgcaagaacctgcctgagtccagcagggaaaacattgcacagatttaccaatcgggctcatcccttctggggataatcaacgatattctggacatctcaaaaatagaagcaaaaagctttgagctttccgaaacggaatttgattttgagaaaatgctacggcgcgtggtgaacgtcgtcaatttccgcatagatgaaaaacatcaaagattttccgtaaatatagatcgttccattccccacaccttaataggggacgaccaacggatagcgcaagtgatcaccaacctattgggaaacgccgttaaatttacccccgaacagggggaaatcagccttaccgtgcgtcttgcgggacaagtggacaatctctgcaccatgcaaatttcggtaagcgacacgggaatcggcataagcccagagcagcaggcaaaactttttaaatcttttgaacaagccgaatccagcacaacgcgcaaatacggcggcacaggcttggggctcgcgatttctaaaagcattgtagagcttatgggcggcaaaatttgggttgaatcggaacaggaaaaaggatccacttttatctttaccattcaacttaaacgcagtacgaatgaaaaacacaggcttttgtcctctgatattaattctaaaaatgtccgtatcatggcagttgacgatgacaaggacgtattagtttattttaatgaaatatcgcaaggcttcggcctaatgtgcgataccgccataagcggggaagaagcgcttaaccttataaaacaaaaaggcggctacaatatttattttatagactggaaaatgccaatcatggacggcatacaacttgcgcatgaaataaaggagcacgcgaaagaaaatcccatcgtaataatgatatccgccgccgaatggagcgtgatgtag

SEQ ID NO: 33944 - protein, 518 aa, Unknown
  Obtained from environmental sample
  DOMAIN (431)...(514): Response regulator receiver domain
  misc_feature (1)..(518): Xaa is any amino acid
MGRGKTTKTSWSYMACSLFLCLTQTFFCRQYGEEVIIIWNVITMIYVTYLLGYEVIYFHLWSRHRTKVLKTKVLRTKVLKAKVLGSDADKAPALPIDNILFGMVICYTCGVFDFLHNTFSKDNISLFSYSVFVVYVGMVFTLSRRFSGMFKQLEKSNTMLEMAVHERTVELERQTEIAIQANRAKSHFLATMSHEIRTPLNAVIGLSEIELRKNLPESSRENIAQIYQSGSSLLGIINDILDISKIEAKSFELSETEFDFEKMLRRVVNVVNFRIDEKHQRFSVNIDRSIPHTLIGDDQRIAQVITNLLGNAVKFTPEQGEISLTVRLAGQVDNLCTMQISVSDTGIGISPEQQAKLFKSFEQAESSTTRKYGGTGLGLAISKSIVELMGGKIWVESEQEKGSTFIFTIQLKRSTNEKHRLLSSDINSKNVRIMAVDDDKDVLVYFNEISQGFGLMCDTAISGEEALNLIKQKGGYNIYFIDWKMPIMDGIQLAHEIKEHAKENPIVIMISAAEWSVM

SEQ ID NO: 33945 - DNA, 558 bp, Unknown
  Obtained from environmental sample
  misc_feature (1)..(558): n is a, c, g, or t
ttgaagaacaggcgtgccttttctcctttccacggaggattcggacttgtcgcaaacggaaaaattcttaaaccgacatactgggcgtttaagttttttaaggatttaggaaacggcgaatgtatccaccgttcagagaatacgattgttttaagaaaaaaggacgggagttatcgcggaattgcgtggaatattgttgcagctaacaattcttccgccgaagaaggcgataaattgactctttgttttattccggaagacggcgtgtttaaggagaacgaatactgcgttatcacaaaaaccgtagatgaagaggtatgcaatcctttaaaagtatggcacgatattggagaacccgctaacccgacgcctgagcaaataaagcttctacaaagcgtgtcgccgcttatagcgactaatcgctgtcacggcgcgccggctattgagttaacgcttgggcgtaacgcgcttgtgtactttgagatatttcccgcgccgataacaagcgatcgcgggtttgactatgaacgctcggtaaacattgagtttgcggattaa

SEQ ID NO: 33946 - protein, 185 aa, Unknown
  Obtained from environmental sample
  misc_feature (1)..(185): Xaa is any amino acid
MKNRRAFSPFHGGFGLVANGKILKPTYWAFKFFKDLGNGECIHRSENTIVLRKKDGSYRGIAWNIVAANNSSAEEGDKLTLCFIPEDGVFKENEYCVITKTVDEEVCNPLKVWHDIGEPANPTPEQIKLLQSVSPLIATNRCHGAPAIELTLGRNALVYFEIFPAPITSDRGFDYERSVNIEFAD

SEQ ID NO: 33947 - DNA, 897 bp, Unknown
  Obtained from environmental sample
  misc_feature (1)..(897): n is a, c, g, or t
ttgatggccggaggggcccttgccataaaaaggaaacaggctttaaaaaggttttttgatttctacaaagggcaaatttcccttgcggaaattgacaaataccttgagggcattcctgaaagaagcagcgaggaaatgaaggcgcttgccaaaatgctgcggctctgcgcggaaaaaatttccagttccggggcccgttatcatgatttggcggaacatgatcatgaacatggcggcacggaccagcagacttatttgaacgacaaagaaaggctgctcatagcgtgtctgcgccggggcgacagcgccgaagcccaggatatcgcgcgggatctattggctgatttcaacaatacgtctgacggcgattttgaatacttcaaaatgaaggcgatagaactggtggtcctggtttcaagaaccggggcaaattccgaaaatgaggcggagcttgtcgaagcgaacagccgtaatataaagcagattgaggattccaacaccgccggggaactgactgataacgtctgcctgattctggaaagaatggccgggaaaattttctctttccaggggattcgccatgcgtccgctctcaggaaagccgaacgatttatctgggataattacaccagaaagatcagcctgaaggagattgccgacgcctcanggctttccgcgccttatttcagcacggtatttaaaaatgaaatgggcgagaacctttcaaattatcttaacaggctcagggtggaaaaagcgctggtaatgcttggtgaaaccgattctcccattaacaagatttcggcggactgcggttttgaggaccaaagctggttttcaaaagtattcaaaagctataccggtatcagcccatacgaataccgtaagtatggatga

SEQ ID NO: 33948 - protein, 298 aa, Unknown
  Obtained from environmental sample
  DOMAIN (200)...(246): Bacterial regulatory helix-turn-helix proteins, AraC family
  misc_feature (1)..(298): Xaa is any amino acid
MMAGGALAIKRKQALKRFFDFYKGQISLAEIDKYLEGIPERSSEEMKALAKMLRLCAEKISSSGARYHDLAEHDHEHGGTDQQTYLNDKERLLIACLRRGDSAEAQDIARDLLADFNNTSDGDFEYFKMKAIELVVLVSRTGANSENEAELVEANSRNIKQIEDSNTAGELTDNVCLILERMAGKIFSFQGIRHASALRKAERFIWDNYTRKISLKEIADASXLSAPYFSTVFKNEMGENLSNYLNRLRVEKALVMLGETDSPINKISADCGFEDQSWFSKVFKSYTGISPYEYRKYG

SEQ ID NO: 33949 - DNA, 1230 bp, Unknown
  Obtained from environmental sample
  misc_feature (1)..(1230): n is a, c, g, or t
ttgatgtatcatgatatggtctatgaggatatcatgctgatatcttcgcgctgtatttttgatgaccatggacggcgtctgggcgtcgtcgccatcagggtaaaaattgacaatatcagaaaatatattgttaataccgccatggttcagggcgcgtacggaatgctgatcagcggagattggattattctggcccatccaaacgaggcgtttgtaggcgaggacgtgcgcagtctggaaattcctttttcgatttttgtaaatgatttaaataatggaatagaaattaccgatcgtccgctgataacgtatcaaggcgaacgcgccatggcttctttccggttcctgcccaacggctggattatgggcattgtaacgcctaaaggtccgtactataagagcatatccaatatgctcttaattctcgttttattgggcacggcgctttcctcggtgctgatcttcgtcctgattcgcgttgacgcggcccgaaacaaatccgacgcggaaaacaggcacaaaacctcttttctggccaacgtgagccacgaaatacggacgcccatgaatgccattataggcatgacggatattttattttacgaaccgcttaacaaacggcagatgggtttcatcaacgatattaaagtttccgcccactcgcttctttcacttatcaacgatattttggatatgtcaaaaattgaagcgggtaaactggagcttaacccgattaactacgattttcagtcgcttctggataatgttcattccatgttcagctatgtaaccaggaagaagggcattgaatttaaatatgaaaccgaggggaagatgccccgttacctgtacggcgatgatataaggcttaaacaggtattaacgaatatctgcggaaacgccgttaaatacaccaaaaaagggtatgtaaaatttaaagtaaccgccgccgatgacaaacttatatttgagattaaggacacaggcatcgggatgcgtaaagaagacctgccgaaactgtttaacacttttcaacggatcgaaaatgaacagaaccgcaccatagtcggaacaggtttggggctttcaatcagcaggacttttgtggaaatgatgggcggaagtataatggtcgacagcgagtatgaacagggaagcgtcttcaggatcataattccggttgttttgagcgaaaaagaagatgttaaatcaaataaaaggcttgcctga

SEQ ID NO: 33950 - protein, 409 aa, Unknown
  Obtained from environmental sample
  DOMAIN (173)...(238): His Kinase A (phosphoacceptor) domain
  misc_feature (1)..(409): Xaa is any amino acid
MMYHDMVYEDIMLISSRCIFDDHGRRLGVVAIRVKIDNIRKYIVNTAMVQGAYGMLISGDWIILAHPNEAFVGEDVRSLEIPFSIFVNDLNNGIEITDRPLITYQGERAMASFRFLPNGWIMGIVTPKGPYYKSISNMLLILVLLGTALSSVLIFVLIRVDAARNKSDAENRHKTSFLANVSHEIRTPMNAIIGMTDILFYEPLNKRQMGFINDIKVSAHSLLSLINDILDMSKIEAGKLELNPINYDFQSLLDNVHSMFSYVTRKKGIEFKYETEGKMPRYLYGDDIRLKQVLTNICGNAVKYTKKGYVKFKVTAADDKLIFEIKDTGIGMRKEDLPKLFNTFQRIENEQNRTIVGTGLGLSISRTFVEMMGGSIMVDSEYEQGSVFRIIIPVVLSEKEDVKSNKRLA

SEQ ID NO: 33951 - DNA, 1353 bp, Unknown
  Obtained from environmental sample
  misc_feature (1)..(1353): n is a, c, g, or t
atggcagcagaatcatcagcgcacagtggcggtattggcccttcaatagggataattttattcgcggtacggtttttcggcagactggcaaagaagatagggataccgcaggttttgggagaactaatagcgggtattgttatcggaccttacgctcttgggagcatacacattcccggatttcctcacggcatttttactttgggcgagggaactttggcagtaagcaacgagttatacgcgattgcctcaatcgcttccattattttactttttgcgtccggtcttgaaacggatatagggcttttcctgcgctattccgtagccggaggcattatcggtataggcggggttctgatctcttttaccttgggtgatctaaccggagtttttctcctccacgcctcctttatggatccccgctgtctctttttggggattctttctaccgccacttctgtcggcataaccgcgcgtattctttccgaacacaagaagatggattcgccggaaggggtaactattctggcggccgcggtttttgacgacgtattgggcatcatcgctctggctgttgtgctgggaattgtaacgcttcttaccgaacatacgggaggaggattacaggccaacgcgattttggctattgccgggaaggctttcggcatctggctgggttttaccgcgctgggactgatcttttcaaaaaaaaatgcgaaatttttaaaattatttaagctcccttccgatttttcaattttggctcggggtgtagctttgatactggcgggtagttttgagaaacagggacttgccatgatcataggcgcttacatcgcaggtctttcactttccaggacagatatagcgatagtgattcaagagcgtatccgcggaatatatgaattttttgtgccggttttcttcgccgttatgggcatgatggtaaacgtcagggaaattatatccccgcctgtgcttattttcggcgcgatatatacaggcatagctatcctatcaaaagtaatcggctgcggcgggccggccctgcttatgggttttaacggcaagggagcattgcgcatcggagcgggcatgatcccaaggcgagaagtcgcgcttattatcgccggcatagggcttgcgatggggattatcaatgatcaattattcgcggtggttatccttatgacattgatcactacaataatggctcccccaatgttaagcgcgtcattgaaacttgcaggttcaggcacgcgaaaccccgtaaaaggcgatgactcggtatcaattagtctgggattttccgtcggaagaaattacagaccttgttataaacaaactgcttga

SEQ ID NO: 33952 - protein, 450 aa, Unknown
  Obtained from environmental sample
  DOMAIN (17)...(410): Sodium/hydrogen exchanger family
  misc_feature (1)..(450): Xaa is any amino acid
MAAESSAHSGGIGPSIGIILFAVRFFGRLAKKIGIPQVLGELIAGIVIGPYALGSIHIPGFPHGIFTLGEGTLAVSNELYAIASIASIILLFASGLETDIGLFLRYSVAGGIIGIGGVLISFTLGDLTGVFLLHASFMDPRCLFLGILSTATSVGITARILSEHKKMDSPEGVTILAAAVFDDVLGIIALAVVLGIVTLLTEHTGGGLQANAILAIAGKAFGIWLGFTALGLIFSKKNAKFLKLFKLPSDFSILARGVALILAGSFEKQGLAMIIGAYIAGLSLSRTDIAIVIQERIRGIYEFFVPVFFAVMGMMVNVREIISPPVLIFGAIYTGIAILSKVIGCGGPALLMGFNGKGALRIGAGMIPRREVALIIAGIGLAMGIINDQLFAVVILMTLITTIMAPPMLSASLKLAGSGTRNPVKGDDSVSISLGFSVGRNYRPCYKQTA

SEQ ID NO: 33953 - DNA, 417 bp, Unknown
  Obtained from environmental sample
  misc_feature (1)..(417): n is a, c, g, or t
ttgagatacaataaactttctgtcgatgggatgtttatcggaagaggctggacaaatgaataccgtaaaaaaggattattacttttagataactggctggaattgcgtattccggttataaacggaattttggcatgggattttttctttgatgccgcgggcattgaaacaatgcagggatattattttggcataaatgaaaacggggatcgcaattttacccttgataatttccgctttagttttggcggaggattaaggtttactatacctcagtttcctttccgacttggtcttgcaaaacgttttaggtttgtagatggagaatttaattgggagccgggacaatttttcggagatgacgataatcccgccaagggagtcgatcttgtaatctcgtttgtgttatcatattag

SEQ ID NO: 33954 - protein, 138 aa, Unknown
  Obtained from environmental sample
  misc_feature (1)..(138): Xaa is any amino acid
MRYNKLSVDGMFIGRGWTNEYRKKGLLLLDNWLELRIPVINGILAWDFFFDAAGIETMQGYYFGINENGDRNFTLDNFRFSFGGGLRFTIPQFPFRLGLAKRFRFVDGEFNWEPGQFFGDDDNPAKGVDLVISFVLSY

SEQ ID NO: 33955 - DNA, 1083 bp, Unknown
  Obtained from environmental sample
  misc_feature (1)..(1083): n is a, c, g, or t
atgccgcatctttccctgcatcgggtctcgacaacctccggcggatcagggctctcgtcggtttcgtttgatgtgcatgacggcgaatgccttgcgctgtttggcgcggaaaaaaccggaattaccctcgcgcttgacgttatcgccggtctcgcgccgatatctcagggtgaaatttttatcgacggcgaacgggttgaccacctgaaaccggctcgccgccgtgtgggcatgatcttccgggattttgcgctgtatccgaatatgaccgcgcaggagaatatggtctttgcgcttactgctcgccggctctccccggaggtgatcacaagccgcctcaggcatcttcttgcgctcttgccgctggaggccatactcaggcgcaagcccaatacgctctcctcgcttgaaaagtccctgaccgcgctcgcccgcgttttgatggaggagcccgagatcattctgatccaaaggctggacaggctgaacgccgaggaaaaggagagcttttttcgttttttgactacagtgcgccgcgaattgcgaccgactatagttttcgcgacaagcgcggcgcaggaggctttcgcgatagcggatcgcgtcgcggttttgcgcaatgggcggcttattcaggtaggcacgcctgaggaactctatcttcgcccaatcgacagcggcatcgccctggacataacctggcataccgccggtctccttccggcaacgattgagctgggagcgggcggggcatggctggcgctttctccctcgtgcaaatttcccctctcttccgctatggagacaaaactgattcatgggcaaagcgttctgctgtgtctcagaccggaagatattcgcatacgggcgcagggggagggatttgagagcaggcttgttgatatacgcaagcagattccgaacgctcttctgacggtttctcttgaaaacggggcaaggatcacgctccagcatccgctgcgctcgctcgcgcggcttgccgtgaacgatccgatatgcttttcccttgaaaccgcttccctgcttatatttgataaccagaccggggatgcgttgtattga

SEQ ID NO: 33956 - protein, 360 aa, Unknown
  Obtained from environmental sample
  DOMAIN (279)...(351): TOBE domain
  misc_feature (1)..(360): Xaa is any amino acid
MPHLSLHRVSTTSGGSGLSSVSFDVHDGECLALFGAEKTGITLALDVIAGLAPISQGEIFIDGERVDHLKPARRRVGMIFRDFALYPNMTAQENMVFALTARRLSPEVITSRLRHLLALLPLEAILRRKPNTLSSLEKSLTALARVLMEEPEIILIQRLDRLNAEEKESFFRFLTTVRRELRPTIVFATSAAQEAFAIADRVAVLRNGRLIQVGTPEELYLRPIDSGIALDITWHTAGLLPATIELGAGGAWLALSPSCKFPLSSAMETKLIHGQSVLLCLRPEDIRIRAQGEGFESRLVDIRKQIPNALLTVSLENGARITLQHPLRSLARLAVNDPICFSLETASLLIFDNQTGDALY

SEQ ID NO: 33957 - DNA, 321 bp, Unknown
  Obtained from environmental sample
  misc_feature (1)..(321): n is a, c, g, or t
atgcaaatggcgaaaaccagcgcctctctcgcgaaactgcataccgcaaagatccccttcatctcgctcttgacgcatccaaccaccggaggcgtaacggcgagtttcgcttcgctcggcgacgtgatcatcgcggaaccgggcgcgatgatcggattcgccggcgcgcgcgtcattgagcaaacgattcgccaacagctccccgagggctttcaaagcgcggaatttcttcaggatcatggctttgtggactgcatcgttccgaggaatgaactgaaggcaaaggtttcgcgaatgctcgcatatatgcgcgcgcaatag

SEQ ID NO: 33958 - protein, 106 aa, Unknown
  Obtained from environmental sample
  misc_feature (1)..(106): Xaa is any amino acid
MQMAKTSASLAKLHTAKIPFISLLTHPTTGGVTASFASLGDVIIAEPGAMIGFAGARVIEQTIRQQLPEGFQSAEFLQDHGFVDCIVPRNELKAKVSRMLAYMRAQ

SEQ ID NO: 33959 - DNA, 1011 bp, Unknown
  Obtained from environmental sample
  misc_feature (1)..(1011): n is a, c, g, or t
gtgttgcttgaggtgcattgcggattgtcctttgggacgattataccgattttcttatccggacagagttgtttcaattttgtcgttaccagggcaaggtcgcttcaggttgtcaagatgggaatcccgatccctgtaccctatggattagttgctaatatttaccaatatagctataattcccccatgggtaaaacctttgtatttgtaaaccaaaaagggggcgtcggcaaaaccacctcggcgctgaacatcggcgcgtatatcgccgaggaaggcaggaatgtccttttggttgattttgacgcccaggcaaacctttccagcggcgtcggggcaaacccgcccaaaccgggaatttatgaacttttatcggggaaagcctcaatcggccaggcgctaaaaaaaacggcagtgccgcgccttgatgtaattccttccagcattgacctttcgggcgccgcggtagagcttatcgggcaggaggaccgcaatctttatttaaaaaaaacgcttgccccggtaaaggacagttatgattttattctgatagactgcccccctagcctggggattcttaccctcaacggcatggcggcggctgattcggtgctcattcccatgcagtgtgaatatttcgcgatggagggcttgagcctgctgctaaaaaccgtccagcgcatccagcgcggcctgaaccgttcccttggaatagagggaattttctttaccatgtacgatcccaggacaaaacttgcccatgatgttgttaagcaggtaagcgcgtatttcaaaaacgccgtctttaagacgataattccccgcaacgtccgcctttccgaagcgccttcccacggccagcccattgtcttgtacgatcccaactgcccgggggcgcgggcataccaaagccttgcaagggaaattatcatgcgctctttgccgaaaggcgcggacggcaaagggggaacagccggtggcgcgtanagcgggtttgggaaggggaattga

SEQ ID NO: 33960 - protein, 336 aa, Unknown
  Obtained from environmental sample
  DOMAIN (67)...(281): CobQ/CobB/MinD/ParA nucleotide binding domain
  misc_feature (1)..(336): Xaa is any amino acid
MLLEVHCGLSFGTIIPIFLSGQSCFNFVVTRARSLQVVKMGIPIPVPYGLVANIYQYSYNSPMGKTFVFVNQKGGVGKTTSALNIGAYIAEEGRNVLLVDFDAQANLSSGVGANPPKPGIYELLSGKASIGQALKKTAVPRLDVIPSSIDLSGAAVELIGQEDRNLYLKKTLAPVKDSYDFILIDCPPSLGILTLNGMAAADSVLIPMQCEYFAMEGLSLLLKTVQRIQRGLNRSLGIEGIFFTMYDPRTKLAHDVVKQVSAYFKNAVFKTIIPRNVRLSEAPSHGQPIVLYDPNCPGARAYQSLAREIIMRSLPKGADGKGGTAGGAXSGFGKGN

SEQ ID NO: 33961 - DNA, 1095 bp, Unknown
  Obtained from environmental sample
  misc_feature (1)..(1095): n is a, c, g, or t
atgtccgcctttccgaagcgccttcccacggtcagcccattgtgttatacgatccccattgtccgggggcgaaagcctaccacagtctcgcaaaggaaattattcaacgcgctgcgtcacagggcgcacattcccgtggaggttccggcagtggcacgtaaagcaggattgggaagggggcttgacgcgctgcttcccggaaatgatgacaatacggactccggctcgtgggacacagacgcggaagaaaaaacggacgcaaagcggcgcggcttgtcaagcaaatcgcctaacgcagtcgtgccaatcgctattgaacatctggttgccaatcccggccagccccggaaaaactttgacgaaacggaactgcgggaactggcggactccattgccgagcatggcgttatccagccgattatcgcggcggatgccggagacggctcatatatcatcattgccggggaacggcgaaccagagccgcgaaactggccggcctcagcgaagtcccggcaataatccgcgagtacaccgatgaaaagcggctggaaatttcccttatcgaaaatattcagcgcagcgaccttaaccccattgaggaagccgccgcgtataaaaaccttatggatttctccagcctgtcccatgaggaacttgccgccagagtaggtaaaaaccgttctacggtgacaaacgccctgcgcttgttgaagctttccgccgaggttcaaaagagccttgagaacggcgatctcagtccgggccacgcgcgggctttgctttcggtaacggacgagatacttcgggacaaactgtttaaggaaattaccgcgaaggggctttccgtccgcgaggctgagaaaaaagcgacggcgttgaattccgcttccgaagaaggcggcggcgcccctgacggtgcggcaaaagaaaaagcgtcaaaacgcccacctgaaataaccgaaatggaagaaaaatttattgagaaacttgggacaaaagtttcaattgacggagggctggagaaaggccgcatccacattgagtattattcaatggaagacctggatagactgtatgggcttcttggctcctag

SEQ ID NO: 33962 - protein, 364 aa, Unknown
  Obtained from environmental sample
  DOMAIN (101)...(191): ParB-like nuclease domain
  misc_feature (1)..(364): Xaa is any amino acid
MSAFPKRLPTVSPLCYTIPIVRGRKPTTVSQRKLFNALRHRAHIPVEVPAVARKAGLGRGLDALLPGNDDNTDSGSWDTDAEEKTDAKRRGLSSKSPNAVVPIAIEHLVANPGQPRKNFDETELRELADSIAEHGVIQPIIAADAGDGSYIIIAGERRTRAAKLAGLSEVPAIIREYTDEKRLEISLIENIQRSDLNPIEEAAAYKNLMDFSSLSHEELAARVGKNRSTVTNALRLLKLSAEVQKSLENGDLSPGHARALLSVTDEILRDKLFKEITAKGLSVREAEKKATALNSASEEGGGAPDGAAKEKASKRPPEITEMEEKFIEKLGTKVSIDGGLEKGRIHIEYYSMEDLDRLYGLLGS

SEQ ID NO: 33963 - DNA, 345 bp, Unknown
  Obtained from environmental sample
  misc_feature (1)..(345): n is a, c, g, or t
atggagggtttgagcctgcttttgcagactgtccagcggatacagcgcagtctgaacaagactttgggtatcgggggaattttttttaccatgtacgatccccggaccagacttgcccaggatgtggtaaaacaggtcagcgcctatttcaagaaaaaagtgttttccacgattatcccgcggaatgtccgcctttccgaagcgccttcccacggtcagcccattgtgttatacgatccccattgtccgggggcgaaagcctaccacagtctcgcaaaggaaattattcaacgcgctgcgtcacagggcgcacattcccgtggaggttccggcagtggcacgtaa

SEQ ID NO: 33964 - protein, 114 aa, Unknown
  Obtained from environmental sample
  misc_feature (1)..(114): Xaa is any amino acid
MEGLSLLLQTVQRIQRSLNKTLGIGGIFFTMYDPRTRLAQDVVKQVSAYFKKKVFSTIIPRNVRLSEAPSHGQPIVLYDPHCPGAKAYHSLAKEIIQRAASQGAHSRGGSGSGT

SEQ ID NO: 33965 - DNA, 459 bp, Unknown
  Obtained from environmental sample
  misc_feature (1)..(459): n is a, c, g, or t
atgcgctgttttgcaattctcatggcggcggggttttcacggcgatttgggggacaaaacaaactgcttgcgcttttcagggagaagccccttgcgcggcataccctggatttagtttgcggcatgggttgttttgagagggttttctttgtctatgcggatgaggaagtcgccgctttggcaaacggccttgaagttacaactgtttataaccccgcgccggagaaagggcagggtgaaagcgcccgacttggactgactgcggctgttaaggcagccgggacagcccaacgctataccgatgaacccgaatattatatgttttttccctgcgatcagcccctgctcgatcaggatacgataagggttttgcttgacgctgccggccctggctgtatagccgagcctgctgtttgggaggcaaccatagtccaagcctgttttctgcctcttttgtag

SEQ ID NO: 33966 - protein, 152 aa, Unknown
  Obtained from environmental sample
  misc_feature (1)..(152): Xaa is any amino acid
MRCFAILMAAGFSRRFGGQNKLLALFREKPLARHTLDLVCGMGCFERVFFVYADEEVAALANGLEVTTVYNPAPEKGQGESARLGLTAAVKAAGTAQRYTDEPEYYMFFPCDQPLLDQDTIRVLLDAAGPGCIAEPAVWEATIVQACFLPLL

SEQ ID NO: 33967 - DNA, 900 bp, Unknown
  Obtained from environmental sample
  misc_feature (1)..(900): n is a, c, g, or t
ttgggggcgccccgggctctggccttgcccttgggggcgaccggccgtcgggcggccctggccctctccggaaacttggaccggcatctgtcctttttgctggaaggccttacggtcgttgatttcccgaatgatttttccgcctatgatctggtgatgctcttggattgccactccctggcccgcctggagcgaagcgaactcgcggggccgctccccgccggcggccctcccctggtggcggttgaccatcatcccctccgcggagaggagacgctggaagccggctggtttctcgaaccggcggcctcctccaccggcgaactggtctggcgtctgttgtcggccttaaaccttagtccgcccccggaagcccgggaagcccttctattggccatagcttcggataccggctttttcagccaaggcaacaccaccgccgccgccttaagggccgtggccgacttggtggaaatgagcggcagcggcttggtggaaacagtccaccgccgactgcgcgaggacttgcccttaaaacgccttaaactcaggggactggccttggactccctgcggctccattgtgatggccgtctggccttgatggcggtgaccccggccaccctcaaggcggccggggcggtcatggccgacaccgaggatttggtggaaatgggacgcagcttggccggcgtgactctttcggccttgataaaagaccatgggtcggggcgcctgcgggtcagtctgcgcagccgggagccggtgaacgcttcggccttggccggccttttcggcggcggcgggcaccgtctagccgcggcttaccacgactccctggccgccacagccgaagaagcggcggccaatctcctggcccgggcggaaaattttttatga

SEQ ID NO: 33968 - protein, 299 aa, Unknown
  Obtained from environmental sample
  SIGNAL (1)...(21)
  DOMAIN (232)...(297): DHHA1 domain
  misc_feature (1)..(299): Xaa is any amino acid
MGAPRALALPLGATGRRAALALSGNLDRHLSFLLEGLTVVDFPNDFSAYDLVMLLDCHSLARLERSELAGPLPAGGPPLVAVDHHPLRGEETLEAGWFLEPAASSTGELVWRLLSALNLSPPPEAREALLLAIASDTGFFSQGNTTAAALRAVADLVEMSGSGLVETVHRRLREDLPLKRLKLRGLALDSLRLHCDGRLALMAVTPATLKAAGAVMADTEDLVEMGRSLAGVTLSALIKDHGSGRLRVSLRSREPVNASALAGLFGGGGHRLAAAYHDSLAATAEEAAANLLARAENFL

SEQ ID NO: 33969 - DNA, 696 bp, Unknown
  Obtained from environmental sample
  misc_feature (1)..(696): n is a, c, g, or t
atgcggctgggactggcgaatcttccccttatgattgcgttggacatttttccatttggaagctatatgactttggtctgtcttaaaatattcggacaggcaataattactgggactttgttttcgtatgtttttttattttccgtaacgggaactttgttttcatctcttgtaatgttttttttgcgccgtatgtttgcttccccgggtcgtgaaagaatttcatttatcggcataggaacggccggcgctatggttttcaatatagcgcagttatctcttgcgcggctttttatctttcatgaaaacacgcgttatatcgcgcccctttttctgcggcaggactgttacaggcattgcgctncgcgcttttgccaagcctttacgcgcaattcgcttggaatcaaccagggccggccaatggaaacgaatccaattttttggaaaactattccggccccaagcattgtttttttccggcctgtaaaaagccccccccttttttcaacccagaccggaaaaccggtttccccaattccttttttttgggcttcctcttttactttcccggaaaaaaaaaacccccccttttccccccctttaaaaaaaaattttttaaaaagcggggtaaaaacttttttccccccccccgggggggggtgttttttttttttggggggggcccccccaaaataa

SEQ ID NO: 33970 - protein, 231 aa, Unknown
  Obtained from environmental sample
  DOMAIN (1)...(112): Heptaprenyl diphosphate synthase component I
  misc_feature (1)..(231): Xaa is any amino acid
MRLGLANLPLMIALDIFPFGSYMTLVCLKIFGQAIITGTLFSYVFLFSVTGTLFSSLVMFFLRRMFASPGRERISFIGIGTAGAMVFNIAQLSLARLFIFHENTRYIAPLFLRQDCYRHCAXRFCQAFTRNSLGINQGRPMETNPIFWKTIPAPSIVFFRPVKSPPLFSTQTGKPVSPIPFFWASSFTFPEKKNPPFSPPLKKNFLKSGVKTFFPPPGGGCFFFLGGAPPK

SEQ ID NO: 33971 - DNA, 450 bp, Unknown
  Obtained from environmental sample
  misc_feature (1)..(450): n is a, c, g, or t
atggataaacaaaaactaatctggaaagaggaaagccggaaaaaggtttttgactgcagggtgttctctgttcgggaaagcgtctgcagatcgcctaacgataagaccggggttttttcggttattgaggcggcggactgggctatagtaataccggtgctgaagtccccgtcaggcaaagaatttgtaatggtttggcagtggaggcacggctatctggatttaagccttgagtttccaggcggggtattcgagccgggcgagaatccggaggaagccgcgtccagggagcttcttgaggagacaggctacaaggcgggtaaaatacggaaaatcggcgagttcagccccaatccggcgattatgtccaacaaggtgcatttttccttgccgaggatcttgcggacacgggcaaacagggccttgacgccgatgaatttgtggagatag

SEQ ID NO: 33972 - protein, 149 aa, Unknown
  Obtained from environmental sample
  DOMAIN (47)...(149): NUDIX domain
  misc_feature (1)..(149): Xaa is any amino acid
MDKQKLIWKEESRKKVFDCRVFSVRESVCRSPNDKTGVFSVIEAADWAIVIPVLKSPSGKEFVMVWQWRHGYLDLSLEFPGGVFEPGENPEEAASRELLEETGYKAGKIRKIGEFSPNPAIMSNKVHFSLPRILRTRANRALTPMNLWR

SEQ ID NO: 33973 - DNA, 1491 bp, Unknown
  Obtained from environmental sample
  misc_feature (1)..(1491): n is a, c, g, or t
ttggtggcgcaggctttgcgtgatttggggaaaaaagtgcggttcatctactcgtgggacgattacgatgtgttccgtaaagtgcctaaaaatatgccgaagcaggacgagcttgacggctacctgcgctttcctatcactatggttcccgatccgtgggagcgtgatgcaagttatgcccgtcatcatgaggtcgatgtcgaaaacactctgccgaaggtggggatttttcccgaatatatttatcaggcggaacgttaccgctcctcacgttatgcgcaagggatacgaaaagcgctggagaagcgaagcgagcttaaagaaattttggacaagttccgtgacgatgaccacaagattcaaggcgaatggtggcctgtcagcgttttttgcgaaaaatgcaataaggacgagaccgacattgaaggttgggacggcgattggggtttgagttacaaatgtaataagtgcggcaataaggagacgttggacattcgaaaagcaaagggtattaaactgtcgtggcgtatcgactggcctatgcgctgggaatacgaaaaagttgattttgagcctgcgggtaaggatcatcacagtcagggcggaagttttgatacggctcgccatgtgtgcaaggacgtatacgactgggacgctccgattactttccgctacgattttatcggcactaaggggcttccgggaaaaatgtcgtcgtcgtcgggtaacgtaattactcttgatgacgtgcttaatgtgtacacgcccgaagtcgcccgttatctgtttgcgggaacaagacctaataccgaatttactatttcttttgatcttgacgttataaaaatttacgaggactatgacaaaacagaacgcatagcctggaaaatggaacccgctaaggacgacgcgatatacatgtgggaacggcgcatttacgagctttcacagccgcaaaccgatccggacggaaaaacattgcccctggaaaaaatgacaaaaccatttcagattcctttccggcatttatgcagccttatccagattgccgacggcgacacggaaaaagcgttatcctcaatcgcatccgcgccaggcgcgccgtctacaggcccttccgaagaacagcttacccctctgcgggcgagggccgaatgcgccaaatactgggtagccaactacgcgcccgaggaattccgtttcaagctgaagtctcccggcgacgctccggcggcgctttccccgcaggaacaggcagcgataaaactgttatgcgaagacgtggtttcccgcatcgaaacctttaccgacgacaagccctgcgccgaggcgatctacaaggtcgccgaaaaagtcggcattgaaggcaaagcgttgtttcgcgccgcgtaccaggccctgataggcaaggaccagggcccgcgtcttgccagctttctgagagcgatagacaaacaaaggctgctggacattttaacaatgagcaaatag

SEQ ID NO: 33974 - protein, 496 aa, Unknown
  Obtained from environmental sample
  DOMAIN (1)...(492): tRNA synthetases class I (K)
  misc_feature (1)..(496): Xaa is any amino acid
MVAQALRDLGKKVRFIYSWDDYDVFRKVPKNMPKQDELDGYLRFPITMVPDPWERDASYARHHEVDVENTLPKVGIFPEYIYQAERYRSSRYAQGIRKALEKRSELKEILDKFRDDDHKIQGEWWPVSVFCEKCNKDETDIEGWDGDWGLSYKCNKCGNKETLDIRKAKGIKLSWRIDWPMRWEYEKVDFEPAGKDHHSQGGSFDTARHVCKDVYDWDAPITFRYDFIGTKGLPGKMSSSSGNVITLDDVLNVYTPEVARYLFAGTRPNTEFTISFDLDVIKIYEDYDKTERIAWKMEPAKDDAIYMWERRIYELSQPQTDPDGKTLPLEKMTKPFQIPFRHLCSLIQIADGDTEKALSSIASAPGAPSTGPSEEQLTPLRARAECAKYWVANYAPEEFRFKLKSPGDAPAALSPQEQAAIKLLCEDVVSRIETFTDDKPCAEAIYKVAEKVGIEGKALFRAAYQALIGKDQGPRLASFLRAIDKQRLLDILTMSK

SEQ ID NO: 33975 - DNA, 966 bp, Unknown
  Obtained from environmental sample
  misc_feature (1)..(966): n is a, c, g, or t
gtggaaggcacggcgacgcgggtttttgaggagatcgaacagcggcaggtagaccccggactgcttgaacgggtggagggcaacaacttccgtacacgcatataccccattcccgccgatggaatacgcacaatcgcaatcggttacgaagaggagctgactctcgaaaacgagtcgtttcaatacaaattgccaatggcttaccaaaacccgatagaaaaattctcagtaaaggctaccgtttggaaaagcgacacaaagccgattgtcttagattctattgataaatttatttttgacaaggccgacgagaactataccgcctcgtttacccgcgaaaactacactccaaaccgcgccttgagtttcgcgttaccggcaccggcgaacactccgcggtttattacgcaatcggcgcggggaagccactacttcttggcctctatcacgcccaagatagaaccgcgtcaaaagcaatggaacgatgatctggcaatcatttgggacgtgtcgctaagcggttcgcaacgcaatttagaccgtgagatggaattgcttgatattatctttgcagacaagaaaaacgccaatgtccatctttactttttgaacaatacattaaacaaaatggtcaataaaaacaccgtcaacggtgagcataaagtccgtgacggtaattgggacggtttaagaaacgtcttgaaaaaagcggtttttgacggcggcaccgacttttcaaaaattaacttagacgctattatcggaaatgaaattttattcttttccgacggaatctcaacattgagcgacgcggatttcataaagaatagcgccgccgccgcaaagcgcccaatacattgcgtcgtctcctcagctatggccgattacagcgcgatgaggttgattgccggtaagacgaacggcaagtttgtgaatatcaacgcngttatcttccngagagattga

SEQ ID NO: 33976 - protein, 321 aa, Unknown
  Obtained from environmental sample
  misc_feature (1)..(321): Xaa is any amino acid
MEGTATRVFEEIEQRQVDPGLLERVEGNNFRTRIYPIPADGIRTIAIGYEEELTLENESFQYKLPMAYQNPIEKFSVKATVWKSDTKPIVLDSIDKFIFDKADENYTASFTRENYTPNRALSFALPAPANTPRFITQSARGSHYFLASITPKIEPRQKQWNDDLAIIWDVSLSGSQRNLDREMELLDIIFADKKNANVHLYFLNNTLNKMVNKNTVNGEHKVRDGNWDGLRNVLKKAVFDGGTDFSKINLDAIIGNEILFFSDGISTLSDADFIKNSAAAAKRPIHCVVSSAMADYSAMRLIAGKTNGKFVNINAVIFXRD

SEQ ID NO: 33977 - DNA, 840 bp, Unknown
  Obtained from environmental sample
  misc_feature (1)..(840): n is a, c, g, or t
ttgatcgccgagagcttggatgacgcctctttttcaggatgcgccggacaggacgagcttgcctcaatctttgaaaaagaaattacagatgcgggcgcttccgttactctggcaagatccaacgaaaaaacaggcatctgttttgcctgtaccgtggacggacaactgcgttttgcggcaagcccaagagcggcgcttgagcttaacgaatcacatatcaacgaggagttaattgccggagcggaagttttagtcctggatggctatattctggaccgccgcccattggttcaacacattctaaagctggcaagccgtatggggattccagtcgctcttgatgccgcttctgtttttcaggttttaagcaaagccgaagaaatccttacatacagtcgcagctatcccctgtttgtttttatgaatgcggatgagacaattgccttttataatacaatcagaaaaaaccacgataatgaatcaggattaacagaaaaagaaaaagaagaagtaatcatacgcgacatttgcccaatgctgaaaataattaccgacggcgaattattccctattatagttgtcaaactcggaggccacggcgcggtagtaatcgcgggcggaaatgtctaccgcgaggatacatttgcaattattccgcgaaacacagtcggagccggagatgctttttgcgccgccttcatttctgcgtggttgcgggacaattcgctttccgagtgcgccgcgcttggaaacaaagtagcgcgggaaatccttgaagttcctggaacacacataaaaagcggaaaattaaaatcgttcgcgaagattttgcaaagatag

SEQ ID NO: 33978 - protein, 279 aa, Unknown
  Obtained from environmental sample
  DOMAIN (1)...(270): pfkB family carbohydrate kinase
  misc_feature (1)..(279): Xaa is any amino acid
MIAESLDDASFSGCAGQDELASIFEKEITDAGASVTLARSNEKTGICFACTVDGQLRFAASPRAALELNESHINEELIAGAEVLVLDGYILDRRPLVQHILKLASRMGIPVALDAASVFQVLSKAEEILTYSRSYPLFVFMNADETIAFYNTIRKNHDNESGLTEKEKEEVIIRDICPMLKIITDGELFPIIVVKLGGHGAVVIAGGNVYREDTFAIIPRNTVGAGDAFCAAFISAWLRDNSLSECAALGNKVAREILEVPGTHIKSGKLKSFAKILQR

SEQ ID NO: 33979 - DNA, 594 bp, Unknown
  Obtained from environmental sample
  misc_feature (1)..(594): n is a, c, g, or t
atggcaaaaaaagcgcttgttttattggcagacggttttgaggatgtcgaggcggtaacgcctattgattatctgagccgcgccggaatagaagttactaccgtttcaatttccgaaagcctgaccgttacaagcaaatggggcggtattaagatgagcgcccgtactacgcttgccgaacttaccaaacagggaacagccggctatgacgcggtaattcttcccggcggaatgcccggctcaacaaaccttgcggcttcaaaagagacaggctcgctccttaaaaacatggcggcggcggggaaaacaatttgcgctatttgcgccgctcccgctcttgtactcgccccccttggcctgcttaacgggaaaaattttacctgctacccgggaatggaagaaaaagtgaacgctgctcgtagcgacgctacttgctgcgacaatggcaaatggtctgacaaccgcgttgtggcggacggtaatgtcatcacaagccgaggtgcgggaacagcgggagagtttgctgccgcgattattgaaaaactactggacaaagccgccgcgaaaaaaattgcggacgctgttttgctgtaa

SEQ ID NO: 33980 - protein, 197 aa, Unknown
  Obtained from environmental sample
  DOMAIN (31)...(183): DJ-1/PfpI family
  misc_feature (1)..(197): Xaa is any amino acid
MAKKALVLLADGFEDVEAVTPIDYLSRAGIEVTTVSISESLTVTSKWGGIKMSARTTLAELTKQGTAGYDAVILPGGMPGSTNLAASKETGSLLKNMAAAGKTICAICAAPALVLAPLGLLNGKNFTCYPGMEEKVNAARSDATCCDNGKWSDNRVVADGNVITSRGAGTAGEFAAAIIEKLLDKAAAKKIADAVLL

SEQ ID NO: 33981 - DNA, 309 bp, Unknown
  Obtained from environmental sample
  misc_feature (1)..(309): n is a, c, g, or t
ttggaagcaaacgtagcacttgaaaatggcttggaattgaagtggcaaataacagtgaatggaaaaccagttaatcaatacacggtgaaagaccaagtttattttatgatgggcgacaaccgcgacaattccgcagacggtcgctattggggttttgtgagcgcaaggaatataaaagcaaaagcattcataatatacttcagcctagacaaagaatccaaaattgaactcctaaaaccttggacatggatttacctgccagccgacatccgctggagccgtatcgctaggataatacatcttatataa

SEQ ID NO: 33982 - protein, 102 aa, Unknown
  Obtained from environmental sample
  misc_feature (1)..(102): Xaa is any amino acid
MEANVALENGLELKWQITVNGKPVNQYTVKDQVYFMMGDNRDNSADGRYWGFVSARNIKAKAFIIYFSLDKESKIELLKPWTWIYLPADIRWSRIARIIHLI

SEQ ID NO: 33983 - DNA, 900 bp, Unknown
  Obtained from environmental sample
  misc_feature (1)..(900): n is a, c, g, or t
gtggtgatattttttgccatacaagcctatagaattccaagcggttcaatggaaaacaccctttatgagggagatttccttttagggttaaaatttgtttatggcattccaattccatttacttacagcaaaatacccatttccgagccggatgttggcgaaattgtgatattccgttacccaggcgaacctgaatatccagattacaataccaaacgctatgctcatattgcaaatgccttgatgctaggcaactttttttgggacaaagaagcaccagagggaagcccaaaactaatccactacgcagacggcccaaaagattatataaaaaggtgcgtggcaaaaagtgggcagcgtgttgcggttaaaggtggcaagctgtttttgaatggtgtggagcaacgcttgcgaggtcttgggaaatatacagaaaggaacagagaaaacacgccgagggattatttaaaagagataaaagttccagtcccagatgagaccataatttttgataccctttctacccacgacctttggtggattcgctcgcttatggttcaagagatgccggatagccttgttgagttcaatataattttaactaaaaatgggcaaagattgcaaaattatacttttgagaattttcgcgtgccaatagaaaaccacaagtattttctgctaaacacgctttttagccaaaataaaataatcccgcaaaatttaagaatgggagataccataatcggtgctatggatttggattttttcagcaaatatgcccgcacaggatttttaactcgctataatccaaatatgctgcaaaaaagcgttttcggcagccgccttgttggctacgatgccttgacggttcgcaactggaagacttggaagcaaacgtag

SEQ ID NO: 33984 - protein, 299 aa, Unknown
  Obtained from environmental sample
  DOMAIN (11)...(133): Peptidase S24-like
  misc_feature (1)..(299): Xaa is any amino acid
MVIFFAIQAYRIPSGSMENTLYEGDFLLGLKFVYGIPIPFTYSKIPISEPDVGEIVIFRYPGEPEYPDYNTKRYAHIANALMLGNFFWDKEAPEGSPKLIHYADGPKDYIKRCVAKSGQRVAVKGGKLFLNGVEQRLRGLGKYTERNRENTPRDYLKEIKVPVPDETIIFDTLSTHDLWWIRSLMVQEMPDSLVEFNIILTKNGQRLQNYTFENFRVPIENHKYFLLNTLFSQNKIIPQNLRMGDTIIGAMDLDFFSKYARTGFLTRYNPNMLQKSVFGSRLVGYDALTVRNWKTWKQT

SEQ ID NO: 33985 - DNA, 450 bp, Unknown
  Obtained from environmental sample
  misc_feature (1)..(450): n is a, c, g, or t
atgcacaaagaaggcgcggctttcagaagccttctcaacagcttcgccatcgccgtctccctcggcctgcaatacggggtacccctggaagaatacgtagacgcttttaccttcagcagatttgaacccaacggcatagtcaaaggccacgactatgtaaagatggcaaccagcgtcattgactttatcttccgagatctcgcgataagctacttaaagcgtgtcgatcttggtcaggtaaagccggaagacctactggccacagggacaaaagccgacaaccggacggaaaacagcacggggctttggaacagcggggacggctcttaccaggccagaattaaaggctacgaaggagatgcctgcccttcatgcggcagttttaccctgatacggaacggtacgtgtatgaagtgcgacacttgcggagaaacaacaggctgtagttag

SEQ ID NO: 33986 - protein, 149 aa, Unknown
  Obtained from environmental sample
  misc_feature (1)..(149): Xaa is any amino acid
MHKEGAAFRSLLNSFAIAVSLGLQYGVPLEEYVDAFTFSRFEPNGIVKGHDYVKMATSVIDFIFRDLAISYLKRVDLGQVKPEDLLATGTKADNRTENSTGLWNSGDGSYQARIKGYEGDACPSCGSFTLIRNGTCMKCDTCGETTGCS

SEQ ID NO: 33987 - DNA, 912 bp, Unknown
  Obtained from environmental sample
  misc_feature (1)..(912): n is a, c, g, or t
atgacacggcgtgcaacctggcctcggtcaaccctggcccgcttttacgacaaaaccgcccgaacctttgacgttgaaaaataccttcacgcgataagggtgtggacaaccatccttgaaatttccgttgtcatggcccagttcccttccccggagatagcagagctttcctacaaataccggactctggggctgggctatgccagcctggggagcctcctcatgatcatgggccttgcctacgactcccctgaaggccgtgcggttgccggttccctctcggcgattcttacaggcgaagcctacgcccagtccgccaggatggctgcggaattcggccccttcgcgcaatacgcggaaaactcaaacgcaatgctccgcgttatacgcaaccaccgcagggcctgttacaacgcccctccttcgcagtacgaagggctacacacgattccacagggaatagatcccgccaaatgccaagcggctttcgacttgtcttgcttccttgacgcggcaaagaagagctgggatgatgccctggcccttggggaaaagcacggcttccgcaacgcccaggtgagcgcgattgcccccaccggaaccataggccttttgatggactgcgacactaccggggtcgagccggatttcgccctggtaaaattcaagaagcttgcgggcggcggaagcttcaagatcataaaccagtccgtcccgcccgcgctgacggccttgggctacagcgaagctgaaatcgaagccataaccgcctacgccacggggcgaaaaaccctaaagggctgtccggtcatcaacgccgaaagcctcgcggaaaaaggttttaccccggaagctgttgccctggcggaagaagcgctaaaaagctcccacagtctggaaacccgtaattag

SEQ ID NO: 33988 - protein, 303 aa, Unknown
  Obtained from environmental sample
  misc_feature (1)..(303): Xaa is any amino acid
MTRRATWPRSTLARFYDKTARTFDVEKYLHAIRVWTTILEISVVMAQFPSPEIAELSYKYRTLGLGYASLGSLLMIMGLAYDSPEGRAVAGSLSAILTGEAYAQSARMAAEFGPFAQYAENSNAMLRVIRNHRRACYNAPPSQYEGLHTIPQGIDPAKCQAAFDLSCFLDAAKKSWDDALALGEKHGFRNAQVSAIAPTGTIGLLMDCDTTGVEPDFALVKFKKLAGGGSFKIINQSVPPALTALGYSEAEIEAITAYATGRKTLKGCPVINAESLAEKGFTPEAVALAEEALKSSHSLETRN

SEQ ID NO: 33989 - DNA, 1257 bp, Unknown
  Obtained from environmental sample
  misc_feature (1)..(1257): n is a, c, g, or t
atgcgccacttcctgtttgaagacaaagactacgaataccgccccagcttccgccgccgcaggaaggaaaaagactccgccgccgaatttgccaggctcgtccgcgcgttcggcgggaagcgctttacgtcaaaaagggcaagcgcggcaaagaggctagacctaaggcaaaagtgcattgccaagatgcagtattccagcagcatcgaagcgcacagggtacagcttgaaaaataccttacaagggaaggcacagaccgcgaaggcaacgccgccgaattgttcgggaccgacctggaagaatacaagaaaaacatggcaggcagaaacatccgcatatttttgagccccgaatccccaagcgtcgatacggaaattctagccaggcaatttatcaaaaaacttgaaaagcagacaggctaccgcctgtattggcagggggcctgccatttcaacaccgcgcacccccacgcccaccttttgatcaacggcatagacaagcagggcagggaagtgaacattcctagggatatcgtgaagacctttatgagggaaacggccagggacctatgcacggctcaggccgggctccgcacccagaaagaccttgaccgcgaaaaggaacaggaactgtccgcgctccgctttaccaggcttgacagctacatacaggagataggcggcagatcgggagggtcccgcatttccgttacggaaacttttaaggacaaggatcgggtcctagcaaggctcgaaaccctgcgcaagctgaacctctgtacttacgaaagcaacggctacactttaaagaacaactggcaggaagacctaaagaacaattcaaggtacaacgtttttttgaaggcaagggaagagctgcggtatgccgacccgtcggcaatgaaggtctatacgggcgagcaggggcttgtcacgggaaaggttacaaaaatttaccgcaccgacggcgatgccagcgacaaccacgtcgccgtccttgaaacactggacggcaaggcatttttcgttccgttccttaaaaggccggagattcacgacaaaggcaacaaaacccttttgaaggaaggagagctaatcaccttaaaaacctacaagtcgcagaaagggcggcttacgccgatcctgtttaaaagggagcttggctcacttaaaaaagagatcaggctaaacggccattacggaaggcttgcgtcggaaataaaagaaacgaanacaaatctattcgattctttttaa

SEQ ID NO: 33990 - protein, 418 aa, Unknown
  Obtained from environmental sample
  misc_feature (1)..(418): Xaa is any amino acid
MRHFLFEDKDYEYRPSFRRRRKEKDSAAEFARLVRAFGGKRFTSKRASAAKRLDLRQKCIAKMQYSSSIEAHRVQLEKYLTREGTDREGNAAELFGTDLEEYKKNMAGRNIRIFLSPESPSVDTEILARQFIKKLEKQTGYRLYWQGACHFNTAHPHAHLLINGIDKQGREVNIPRDIVKTFMRETARDLCTAQAGLRTQKDLDREKEQELSALRFTRLDSYIQEIGGRSGGSRISVTETFKDKDRVLARLETLRKLNLCTYESNGYTLKNNWQEDLKNNSRYNVFLKAREELRYADPSAMKVYTGEQGLVTGKVTKIYRTDGDASDNHVAVLETLDGKAFFVPFLKRPEIHDKGNKTLLKEGELITLKTYKSQKGRLTPILFKRELGSLKKEIRLNGHYGRLASEIKETXTNLFDSF

SEQ ID NO: 33991 - DNA, 381 bp, Unknown
  Obtained from environmental sample
  misc_feature (1)..(381): n is a, c, g, or t
ttgaggataatctcactcataaacaaaccttacactatttatggagcaaggacaaggttctatagaagcagcagtttcaataccctaccctttccaaaatcggtaaaacaggtgtatcattggttcatgaatattacaaccaggggccgttacgcgcttcgcgcttctttggctctggccaaaatgggaactaacggagagccggtctccattagtagcctttctgaaaaagaaaatatttcctcggtttttcttgaacaaattttctttaggctaagaaaggctggaattgtaacttcaataagggggccgggcggaggtttctgttttgcgaagagcctgaatgaactgacagtcaggcaaatcaaagaggcggcataa

SEQ ID NO: 33992 - protein, 126 aa, Unknown
  Obtained from environmental sample
  DOMAIN (43)...(126): Transcriptional regulator
  misc_feature (1)..(126): Xaa is any amino acid
MRIISLINKPYTIYGARTRFYRSSSFNTLPFPKSVKQVYHWFMNITTRGRYALRASLALAKMGTNGEPVSISSLSEKENISSVFLEQIFFRLRKAGIVTSIRGPGGGFCFAKSLNELTVRQIKEAA

SEQ ID NO: 33993 - DNA, 978 bp, Unknown
  Obtained from environmental sample
  misc_feature (1)..(978): n is a, c, g, or t
ttgtttatgagtgagattatcctcaaggcggaggatctggacggttatctgacaaacgttgaccgtgatcacattgaccacatgggcaggctgtaccgcgaggtgatgagcagttattcaattcttgataagagtcggcttgaaaaggaaaagaagcgcgaagaagaaaacctgatacggcttttcaatgaaatgggaaacattatgcaggatatttgcagtgaagaaaagcagttgcatgtgtattcctttgaaaccccccaggaaagccatcctgaagcgtcaaggttgattgccaaactgagggatctcaggactgaaaatgaagaatttgtatattatatacagcgggcatacgaaatgctttttaagctggcatacggggggacaacgggtttcaacaagaattatctgatagttaaaacgcccgttaatatccctgttcagaattttgccattcacaagataacaaacattgacgacaagatagaaaataccgtaatgtgcgtcatgctgaggggagcgcttcttccttcgatgataatgagcaaggaaatccaggaatattcatcgcacgggtatgttacgccttttgcccttttcaagatccgccgtgacgatgcaaaaaaagaattcgatatggaatacatcctggatctatcaaagtcttattttaatctgaaagaccttgacggaaaggatcttatcttcgccgacccgatgaatgcgaccggcggaagcctggtaactgtcgttaagtttttgttaaacgaaggaattcatcccaaatccatacaattcttcaatgttattgccgctcttaaaggggcgttaagggctgtacgcgctctggaaaattgccatgtttataccctttggatggaccccatgctaaacgaaaacgcgtatatcatgcccggtctgggagacgcgggggacagaatcaacggagtcgattctgaaaagcaagaaatataa

SEQ ID NO: 33994 - protein, 325 aa, Unknown
  Obtained from environmental sample
  misc_feature (1)..(325): Xaa is any amino acid
MFMSEIILKAEDLDGYLTNVDRDHIDHMGRLYREVMSSYSILDKSRLEKEKKREEENLIRLFNEMGNIMQDICSEEKQLHVYSFETPQESHPEASRLIAKLRDLRTENEEFVYYIQRAYEMLFKLAYGGTTGFNKNYLIVKTPVNIPVQNFAIHKITNIDDKIENTVMCVMLRGALLPSMIMSKEIQEYSSHGYVTPFALFKIRRDDAKKEFDMEYILDLSKSYFNLKDLDGKDLIFADPMNATGGSLVTVVKFLLNEGIHPKSIQFFNVIAALKGALRAVRALENCHVYTLWMDPMLNENAYIMPGLGDAGDRINGVDSEKQEI

SEQ ID NO: 33995 - DNA, 402 bp, Unknown
  Obtained from environmental sample
  misc_feature (1)..(402): n is a, c, g, or t
atgcgtgtaatggcggatgcaaatattattgtttcggcgatattattcccaaaatcagtaaccgcaaatgttctaaagcatttgatagacaactattctcttgttttaagtaaatatactatttatgaagtagaagatgtatttaatgaaaaatttccgcatagagtaacggaaatgaaagactttttacaaaaaataccttatgagttatttattcttaaaaaaaccaaaactaaaaaatatccaaatataagggatatcgacgatttacctgtattggcgaacgcaattgagtcaaaagtcgatttgttaattacaggggataaagattttgatgatgtacaaattaaaaaaccaaaaataataaatcctcgaaaatatatagatgaatatatgaaataa

SEQ ID NO: 33996 - protein, 133 aa, Unknown
  Obtained from environmental sample
  DOMAIN (3)...(121): PIN domain
  misc_feature (1)..(133): Xaa is any amino acid
MRVMADANIIVSAILFPKSVTANVLKHLIDNYSLVLSKYTIYEVEDVFNEKFPHRVTEMKDFLQKIPYELFILKKTKTKKYPNIRDIDDLPVLANAIESKVDLLITGDKDFDDVQIKKPKIINPRKYIDEYMK
